United States Patent Application Publication US 2026/0327580 A1 - sequence listing, part 3

SEQ ID NO: 3021 - DNA, 2529 bp, synthetic construct
  misc_feature 1..2529: note = Variant of DNA polymerase I from Thermus sp. strain 2.9
  source 1..2529: mol_type = other DNA
atgcaccatcatcatcatcatggcggtagcggcgtgttaccggtgttcgagcctaaaggtcgcgtgcttctggttgatggccatcatctcgcgtatcgtaacttctttgccctgaaaggattaaccaccagcagcggcgagccggtacagggtgtctacggctttgcaaagtcgctcctgaaagctctgaaagaagacggtgatgtggtgattgttgtctttgatgcgaaagcgccaagttttcgccacgaagcgtacgaagcttacaaagccgggcgtgctccaacgccggaagactttcctcgccaattggcgcttatgaaggaattagtggatttgcttggcctcgaacgcttggaagttcccggtttcgaggcagacgacgtattagcgactctcgcaaagaaagccgaacgtgagggctatgaagtccagatcttgacagcagatcgcgatcttttccagcttttatctccgcgcatctcggtgttacacccggaagggcatcgtatcaccccggaatggctctgggagaaatatggtttgcgtcccgaacaatgggtggattttcgcgccttagcaggcgatccgagcgacaatattccgggagttaaaggtatcggcgagaagacggcgctcaagctccttaaagaatgggggtcgttggagaacttgcttaagaatttagatcaggtcaaaccagagtcagtgcgtgagaagattcttgctcacctcgaagacctcaaattaagccgcgaattgtcccgtgtacgcaccgatttgccgctcgaagttgatttccgccgccgccgcgaacctgactgggagggtcttaaagcgtttttagagcgtcttgaatttggttcgctcttgcatgaattcggccttttagaaagcccgttaccagccgaagaagcaccttggccaccgcccgagggcgcgtttttaggttaccgtttgagtcgcccggaaccgatgtgggccgaattactggctcttgcagcgtctgcccagggacgtgtgtatcgcgcggaagaccctcatggtgcgctccgcggcctcttcgaagtccgtggactccttgccaaagacttagctgttgttgcattgcgcgaaggtcttgatttacctccgactgatgatccaatgcttcttgcgtacctcttggacccgtcaaacacgacgcccgaaggcgtagcccgtcgttacggcggcgagtggaccgaagatgcagcgaaacgcgcgttattggccgaacgtttgcacgccaatttattaggacgtttgcaaggcgaggaacgtctcctctggctttacgaagaagtggagaaaccattgagtcgcgtgctcgcgcatatggaagctaccggtgtcaaattagacgtggcgtatttggagaatctcagccttgaagttgctgcccacatgcgccgcttggaggaagaagtattccgtttagcaggccgttcctttcgccttaattctcgcgatcagttagaacgtgtgttgttcgatgaacttggtctccgtcctatcggcaagacagagaagaccggtaaacgtagcacttcagcggcggttttagaagctcttcgcgaagtccatcccattgtggacaagatcttggtttaccgcgaactcgcgaaattgaaaggcacctatattgaccgtcttccggcattagtccacccgaaaacgggacgcctccatacccgcttcaaccaaacagccacggcgaccggtcgtttgtcctcctctgatccaaaccttcagaatattccagtacgtaccccattgggccagaagatccgccgtgcgtttgtagctgaggagggttggcgtttagtggccctcgattatagccaaattgaattacgtgtccttgcccatctttctggcgatgagaacctcatccgcgtgtttcaggaaggcaaagacattcacactcaaacggcaagctggatgtttggattatcagctgaagcgatcgatcctttgatgcgtcgtgcagcgaagaccatcaatttcggtgttctctacggtatgagtgcctttcgtttgtcgcaggaattaggcattccctatgaagaagcttcggcgttcattcagaaatactttcaaagctatcccaaagttaaagcatggatcgagaagactctcgaagaaggccgcacacgtggttacgtagagaccttatttggacgtcgccgctatgttcccgatttaaacgctcgcgtgaaaggcaagcgtgaagccgccgaacgcatggcgttcaacatgcctgtacagggcacggcagctgacctcatgaaacttgcaatggtgcgcctttttccacaattgcgtgaagttggtgcccgcatgctcttgcaggtccacgatgaactcttgttagaagcgccaaaagagcgtgcggaagaggtggcagccctcgcgaaaaccgttatggaaggcgtgtggcccttagcggtgcctcttgaagtcgaagttggtattggcgaggattggctggctgccaaaggataatga

SEQ ID NO: 3022 - protein, 841 aa, synthetic construct
  REGION 1..841: note = Variant of DNA polymerase I from Thermus sp. strain 2.9
MHHHHHHGGSGVLPVFEPKGRVLLVDGHHLAYRNFFALKGLTTSSGEPVQGVYGFAKSLLKALKEDGDVVIVVFDAKAPSFRHEAYEAYKAGRAPTPEDFPRQLALMKELVDLLGLERLEVPGFEADDVLATLAKKAEREGYEVQILTADRDLFQLLSPRISVLHPEGHRITPEWLWEKYGLRPEQWVDFRALAGDPSDNIPGVKGIGEKTALKLLKEWGSLENLLKNLDQVKPESVREKILAHLEDLKLSRELSRVRTDLPLEVDFRRRREPDWEGLKAFLERLEFGSLLHEFGLLESPLPAEEAPWPPPEGAFLGYRLSRPEPMWAELLALAASAQGRVYRAEDPHGALRGLFEVRGLLAKDLAVVALREGLDLPPTDDPMLLAYLLDPSNTTPEGVARRYGGEWTEDAAKRALLAERLHANLLGRLQGEERLLWLYEEVEKPLSRVLAHMEATGVKLDVAYLENLSLEVAAHMRRLEEEVFRLAGRSFRLNSRDQLERVLFDELGLRPIGKTEKTGKRSTSAAVLEALREVHPIVDKILVYRELAKLKGTYIDRLPALVHPKTGRLHTRFNQTATATGRLSSSDPNLQNIPVRTPLGQKIRRAFVAEEGWRLVALDYSQIELRVLAHLSGDENLIRVFQEGKDIHTQTASWMFGLSAEAIDPLMRRAAKTINFGVLYGMSAFRLSQELGIPYEEASAFIQKYFQSYPKVKAWIEKTLEEGRTRGYVETLFGRRRYVPDLNARVKGKREAAERMAFNMPVQGTAADLMKLAMVRLFPQLREVGARMLLQVHDELLLEAPKERAEEVAALAKTVMEGVWPLAVPLEVEVGIGEDWLAAKG

SEQ ID NO: 3023 - DNA, 2529 bp, synthetic construct
  misc_feature 1..2529: note = Variant of DNA polymerase I from Thermus sp. strain 2.9
  source 1..2529: mol_type = other DNA
atgcaccatcatcatcatcatggcggtagcggcgtgttaccggtgttcgagcctaaaggtcgcgtgcttctggttgatggccatcatctcgcgtatcgtaacttctttgccctgaaaggattaaccaccagctcgggcgagccggtacagggtgtctacggctttgcaaagtcgctcctgaaagctctgaaagaagacggtgatgtggtgattgttgtctttgatgcgaaagcgccaagttttcgccacgaagcgtacgaagcttacaaagccgggcgtgctccaacgccggaagactttcctcgccaattggcgcttatgaaggaattagtggatttgcttggcctcgaacgcttggaagttcccggtttcgaggcagacgacgtattagcgactctcgcaaagaaagccgaacgtgagggctatgaagtccagatcttgacagcagatcgcgatcttttccagcttttatctccgcgcatctcggtgttacacccggaagggcatcgtatcaccccggaatggctctgggagaaatatggtttgcgtcccgaacaatgggtggattttcgcgccttagcaggcgatccgagcgacaatattccgggagttaaaggtatcggcgagaagacggcgctcaagctccttaaagaatgggggtcgttggagaacttgcttaagaatttagatcaggtcaaaccagagtcagtgcgtgagaagattcttgctcacctcgaagacctcaaattaagccgcgaattgtcccgtgtacgcaccgatttgccgctcgaagttgatttcggtcgccgccgcgaacctgactgggagggtcttaaagcgtttttagagcgtcttgaatttggttcgctcttgcatgaattcggccttttagaaagcccgttaccagccgaagaagcaccttggccaccgcccgagggcgcgtttttaggttaccgtttgagtcgcccggaaccgatgtgggccgaattactggctcttgcagcgtctgcccagggacgtgtgtatcgcgcggaagaccctcatggtgcgctccgcggcctcttcgaagtccgtggactccttgccaaagacttagctgttgttgcattgcgcgaaggtcttgatttacctccgactgatgatccaatgcttcttgcgtacctcttggacccgtcaaacacgacgcccgaaggcgtagcccgtcgttacggcggcgagtggaccgaagatgcagcgaaacgcgcgttattggccgaacgtttgcacgccaatttattaggacgtttgcaaggcgaggaacgtctcctctggctttacgaagaagtggagaaaccattgagtcgcgtgctcgcgcatatggaagctaccggtgtcaaattagacgtggcgtatttggaggctctcagccttgaagttgctgcccacatgcgccgcttggaggaagaagtattccgtttagcaggccattcctttcgccttaattctcgcgatcagttagaacgtgtgttgttcgatgaacttggtctccctcctatcggcaagacagagaagaccggtaaacgtagcacttcagcggcggttttagaagctcttcgcgaagtccatcccattgtggacaagatcttgcagtaccgcgaactcgcgaaattgaaaggcacctatattgaccgtcttccggcattagtccacccgaaaacgggacgcctccatacccgcttcaaccaaacagccacggcgaccggtcgtttgtcctcctctgatccaaaccttcagaatattccagtacgtaccccattgggccagaagatccgccgtgcgtttgtagctgaggagggttggcgtttagtggccctcgattatcgtcaaattgaattacgtgtccttgcccatctttctggcgatgagaacctcatccgcgtgtttcaggaaggcaaagacattcacactcaaacggcaagctggatgtttggattatcagctgaagcgatcgatcctttgatgcgtcgtgcagcgaagaccatcaatttcggtgttctctacggtatgagtgcctttcgtttgtcgcaggaattaggcattccctatgaagaagctgcggcgttcattcagaaatactttcaaagctatcccaaagttaaagcatggatcgagaagactctcgaagaaggccgcacacgtggttacgtagagaccttatttggacgtcgccgctatgttcccgatttaaacgctcgcgtgaaaggcaagcgtgaagccgccgaacgcatggcgttcaacatgcctgtacagggcacggcagctgacctcatgaaacttgcaatggtgcgcctttttccacaattgcgtgaagttggtgcccgcatgctcttgcaggtccacgatgaactcttgttagaagcgccaaaagagcgtgcggaagaggtggcagccctcgcgaaagaagttatggaaggcgtgtggcccttagcggtgcctcttgaagtcgaagttggtattggcgaggattggctggctgccaaaggataatga

SEQ ID NO: 3024 - protein, 841 aa, synthetic construct
  REGION 1..841: note = Variant of DNA polymerase I from Thermus sp. strain 2.9
MHHHHHHGGSGVLPVFEPKGRVLLVDGHHLAYRNFFALKGLTTSSGEPVQGVYGFAKSLLKALKEDGDVVIVVFDAKAPSFRHEAYEAYKAGRAPTPEDFPRQLALMKELVDLLGLERLEVPGFEADDVLATLAKKAEREGYEVQILTADRDLFQLLSPRISVLHPEGHRITPEWLWEKYGLRPEQWVDFRALAGDPSDNIPGVKGIGEKTALKLLKEWGSLENLLKNLDQVKPESVREKILAHLEDLKLSRELSRVRTDLPLEVDFGRRREPDWEGLKAFLERLEFGSLLHEFGLLESPLPAEEAPWPPPEGAFLGYRLSRPEPMWAELLALAASAQGRVYRAEDPHGALRGLFEVRGLLAKDLAVVALREGLDLPPTDDPMLLAYLLDPSNTTPEGVARRYGGEWTEDAAKRALLAERLHANLLGRLQGEERLLWLYEEVEKPLSRVLAHMEATGVKLDVAYLEALSLEVAAHMRRLEEEVFRLAGHSFRLNSRDQLERVLFDELGLPPIGKTEKTGKRSTSAAVLEALREVHPIVDKILQYRELAKLKGTYIDRLPALVHPKTGRLHTRFNQTATATGRLSSSDPNLQNIPVRTPLGQKIRRAFVAEEGWRLVALDYRQIELRVLAHLSGDENLIRVFQEGKDIHTQTASWMFGLSAEAIDPLMRRAAKTINFGVLYGMSAFRLSQELGIPYEEAAAFIQKYFQSYPKVKAWIEKTLEEGRTRGYVETLFGRRRYVPDLNARVKGKREAAERMAFNMPVQGTAADLMKLAMVRLFPQLREVGARMLLQVHDELLLEAPKERAEEVAALAKEVMEGVWPLAVPLEVEVGIGEDWLAAKG

SEQ ID NO: 3025 - DNA, 2529 bp, synthetic construct
  misc_feature 1..2529: note = Variant of DNA polymerase I from Thermus sp. strain 2.9
  source 1..2529: mol_type = other DNA
atgcaccatcatcatcatcatggcggtagcggcgtgttaccggtgttcgagcctaaaggtcgcgtgcttctggttgatggccatcatctcgcgtatcgtaacttctttgccctgaaaggattaaccaccagcagcggcgagccggtacagggtgtctacggctttgcaaagtcgctcctgaaagctctgaaagaagacggtgatgtggtgattgttgtctttgatgcgaaagcgccaagttttcgccacgaagcgtacgaagcttacaaagccgggcgtgctccaacgccggaagactttcctcgccaattggcgcttatgaaggaattagtggatttgcttggcctcgaacgcttggaagttcccggtttcgaggcagacgacgtattagcgactctcgcaaagaaagccgaacgtgagggctatgaagtccagatcttgacagcagatcgcgatcttttccagcttttatctccgcgcatctcggtgttacacccggaagggcatcgtatcaccccggaatggctctgggagaaatatggtttgcgtcccgaacaatgggtggattttcgcgccttagcaggcgatccgagcgacaatattccgggagttaaaggtatcggcgagaagacggcgctcaagctccttaaagaatgggggtcgttggagaacttgcttaagaatttagatcaggtcaaaccagagtcagtgcgtgagaagattcttgctcacctcgaagacctcaaattaagccgcgaattgtcccgtgtacgcaccgatttgccgctcgaagttgatttccaacgccgccgcgaacctgactgggagggtcttaaagcgtttttagagcgtcttgaatttggttcgctcttgcatgaattcggccttttagaaagcccgttaccagccgaagaagcaccttggccaccgcccgagggcgcgtttttaggttaccgtttgagtcgcccggaaccgatgtgggccgaattactggctcttgcagcgtctgcccagggacgtgtgtatcgcgcggaagaccctcatggtgcgctccgcggcctcttcgaagtccgtggactccttgccaaagacttagctgttgttgcattgcgcgaaggtcttgatttacctccgactgatgatccaatgcttcttgcgtacctcttggacccgtcaaacacgacgcccgaaggcgtagcccgtcgttacggcggcgagtggaccgaagatgcagcgaaacgcgcgttattggccgaacgtttgcacgccaatttattaggacgtttgcaaggcgaggaacgtctcctctggctttacgaagaagtggagaaaccattgagtcgcgtgctcgcgcatatggaagctaccggtgtcaaattagacgtggcgtatttggagaatctcagccttgaagttgctgcccacatgcgccgcttggaggaagaagtattccgtttagcaggccgttcctttcgccttaattctcgcgatcagttagaacgtgtgttgttcgatgaacttggtctccctcctatcggcaagacagagaagaccggtaaacgtagcacttcagcggcggttttagaagctcttcgcgaagtccatcccattgtggacaagatcttgcaataccgcgaactcgcgaaattgaaaggcacctatattgaccgtcttccggcattagtccacccgaaaacgggacgcctccatacccgcttcaaccaaacagccacggcgaccggtcgtttgtcctcctctgatccaaaccttcagaatattccagtacgtaccccattgggccagaagatccgccgtgcgtttgtagctgaggagggttggcgtttagtggccctcgattatagccaaattgaattacgtgtccttgcccatctttctggcgatgagaacctcatccgcgtgtttcaggaaggcaaagacattcacactcaaacggcaagctggatgtttggattatcagctgaagcgatcgatcctttgatgcgtcgtgcagcgaagaccatcaatttcggtgttctctacggtatgagtgcctttcgtttgtcgcaggaattaggcattccctatgaagaagctgcggcgttcattcagaaatactttcaaagctatcccaaagttaaagcatggatcgagaagactctcgaagaaggccgcacacgtggttacgtagagaccttatttggacgtcgccgctatgttcccgatttaaacgctcgcgtgaaaggcaagcgtgaagccgccgaacgcatggcgttcaacatgcctgtacagggcacggcagctgacctcatgaaacttgcaatggtgcgcctttttccacaattgcgtgaagttggtgcccgcatgctcttgcaggtccacgatgaactcttgttagaagcgccaaaagagcgtgcggaagaggtggcagccctcgcgaaagaagttatggaaggcgtgtggcccttagcggtgcctcttgaagtcgaagttggtattggcgaggattggctggctgccaaaggataatga

SEQ ID NO: 3026 - protein, 841 aa, synthetic construct
  REGION 1..841: note = Variant of DNA polymerase I from Thermus sp. strain 2.9
MHHHHHHGGSGVLPVFEPKGRVLLVDGHHLAYRNFFALKGLTTSSGEPVQGVYGFAKSLLKALKEDGDVVIVVFDAKAPSFRHEAYEAYKAGRAPTPEDFPRQLALMKELVDLLGLERLEVPGFEADDVLATLAKKAEREGYEVQILTADRDLFQLLSPRISVLHPEGHRITPEWLWEKYGLRPEQWVDFRALAGDPSDNIPGVKGIGEKTALKLLKEWGSLENLLKNLDQVKPESVREKILAHLEDLKLSRELSRVRTDLPLEVDFQRRREPDWEGLKAFLERLEFGSLLHEFGLLESPLPAEEAPWPPPEGAFLGYRLSRPEPMWAELLALAASAQGRVYRAEDPHGALRGLFEVRGLLAKDLAVVALREGLDLPPTDDPMLLAYLLDPSNTTPEGVARRYGGEWTEDAAKRALLAERLHANLLGRLQGEERLLWLYEEVEKPLSRVLAHMEATGVKLDVAYLENLSLEVAAHMRRLEEEVFRLAGRSFRLNSRDQLERVLFDELGLPPIGKTEKTGKRSTSAAVLEALREVHPIVDKILQYRELAKLKGTYIDRLPALVHPKTGRLHTRFNQTATATGRLSSSDPNLQNIPVRTPLGQKIRRAFVAEEGWRLVALDYSQIELRVLAHLSGDENLIRVFQEGKDIHTQTASWMFGLSAEAIDPLMRRAAKTINFGVLYGMSAFRLSQELGIPYEEAAAFIQKYFQSYPKVKAWIEKTLEEGRTRGYVETLFGRRRYVPDLNARVKGKREAAERMAFNMPVQGTAADLMKLAMVRLFPQLREVGARMLLQVHDELLLEAPKERAEEVAALAKEVMEGVWPLAVPLEVEVGIGEDWLAAKG

SEQ ID NO: 3027 - DNA, 2529 bp, synthetic construct
  misc_feature 1..2529: note = Variant of DNA polymerase I from Thermus sp. strain 2.9
  source 1..2529: mol_type = other DNA
atgcaccatcatcatcatcatggcggtagcggcgtgttaccggtgttcgagcctaaaggtcgcgtgcttctggttgatggccatcatctcgcgtatcgtaacttctttgccctgaaaggattaaccaccagcagcggcgagccggtacagggtgtctacggctttgcaaagtcgctcctgaaagctctgaaagaagacggtgatgtggtgattgttgtctttgatgcgaaagcgccaagttttcgccacgaagcgtacgaagcttacaaagccgggcgtgctccaacgccggaagactttcctcgccaattggcgcttatgaaggaattagtggatttgcttggcctcgaacgcttggaagttcccggtttcgaggcagacgacgtattagcgactctcgcaaagaaagccgaacgtgagggctatgaagtccagatcttgacagcagatcgcgatcttttccagcttttatctccgcgcatctcggtgttacacccggaagggcatcgtatcaccccggaatggctctgggagaaatatggtttgcgtcccgaacaatgggtggattttcgcgccttagcaggcgatccgagcgacaatattccgggagttaaaggtatcggcgagaagacggcgctcaagctccttaaagaatgggggtcgttggagaacttgcttaagaatttagatcaggtcaaaccagagtcagtgcgtgagaagattcttgctcacctcgaagacctcaaattaagccgcgaattgtcccgtgtacgcaccgatttgccgctcgaagttgatttccgccgccgccgcgaacctgactgggagggtcttaaagcgtttttagagcgtcttgaatttggttcgctcttgcatgaattcggccttttagaaagcccgttaccagccgaagaagcaccttggccaccgcccgagggcgcgtttttaggttaccgtttgagtcgcccggaaccgatgtgggccgaattactggctcttgcagcgtctgcccagggacgtgtgtatcgcgcggaagaccctcatggtgcgctccgcggcctcttcgaagtccgtggactccttgccaaagacttagctgttgttgcattgcgcgaaggtcttgatttacctccgactgatgatccaatgcttcttgcgtacctcttggacccgtcaaacacgacgcccgaaggcgtagcccgtcgttacggcggcgagtggaccgaagatgcagcgaaacgcgcgttattggccgaacgtttgcacgccaatttattaggacgtttgcaaggcgaggaacgtctcctctggctttacgaagaagtggagaaaccattgagtcgcgtgctcgcgcatatggaagctaccggtgtcaaattagacgtggcgtatttggaggcactcagccttgaagttgctgcccacatgcgccgcttggaggaagaagtattccgtttagcaggccattcctttcgccttaattctcgcgatcagttagaacgtgtgttgttcgatgaacttggtctccgtcctatcggcaagacagagaagaccggtaaacgtagcacttcagcggcggttttagaagctcttcgcgaagtccatcccattgtggacaagatcttgcagtaccgcgaactcgcgaaattgaaaggcacctatattgaccgtcttccggcattagtccacccgaaaacgggacgcctccatacccgcttcaaccaaacagccacggcgaccggtcgtttgtcctcctctgatccaaaccttcagaatattccagtacgtaccccattgggccagaagatccgccgtgcgtttgtagctgaggagggttggcgtttagtggccctcgattatagccaaattgaattacgtgtccttgcccatctttctggcgatgagaacctcatccgcgtgtttcaggaaggcaaagacattcacactcaaacggcaagctggatgtttggattatcagctgaagcgatcgatcctttgatgcgtcgtgcagcgaagaccatcaatttcggtgttctctacggtatgagtgcctttcgtttgtcgcaggaattaggcattccctatgaagaagctcaggcgttcattcagaaatactttcaaagctatcccaaagttaaagcatggatcgagaagactctcgaagaaggccgcacacgtggttacgtagagaccttatttggacgtcgccgctatgttcccgatttaaacgctcgcgtgaaaggcaagcgtgaagccgccgaacgcatggcgttcaacatgcctgtacagggcacggcagctgacctcatgaaacttgcaatggtgcgcctttttccacaattgcgtgaagttggtgcccgcatgctcttgcaggtccacgatgaactcttgttagaagcgccaaaagagcgtgcggaagaggtggcagccctcgcgaaagaagttatggaaggcgtgtggcccttagcggtgcctcttgaagtcgaagttggtattggcgaggattggctggctgccaaaggataatga

SEQ ID NO: 3028 - protein, 841 aa, synthetic construct
  REGION 1..841: note = Variant of DNA polymerase I from Thermus sp. strain 2.9
MHHHHHHGGSGVLPVFEPKGRVLLVDGHHLAYRNFFALKGLTTSSGEPVQGVYGFAKSLLKALKEDGDVVIVVFDAKAPSFRHEAYEAYKAGRAPTPEDFPRQLALMKELVDLLGLERLEVPGFEADDVLATLAKKAEREGYEVQILTADRDLFQLLSPRISVLHPEGHRITPEWLWEKYGLRPEQWVDFRALAGDPSDNIPGVKGIGEKTALKLLKEWGSLENLLKNLDQVKPESVREKILAHLEDLKLSRELSRVRTDLPLEVDFRRRREPDWEGLKAFLERLEFGSLLHEFGLLESPLPAEEAPWPPPEGAFLGYRLSRPEPMWAELLALAASAQGRVYRAEDPHGALRGLFEVRGLLAKDLAVVALREGLDLPPTDDPMLLAYLLDPSNTTPEGVARRYGGEWTEDAAKRALLAERLHANLLGRLQGEERLLWLYEEVEKPLSRVLAHMEATGVKLDVAYLEALSLEVAAHMRRLEEEVFRLAGHSFRLNSRDQLERVLFDELGLRPIGKTEKTGKRSTSAAVLEALREVHPIVDKILQYRELAKLKGTYIDRLPALVHPKTGRLHTRFNQTATATGRLSSSDPNLQNIPVRTPLGQKIRRAFVAEEGWRLVALDYSQIELRVLAHLSGDENLIRVFQEGKDIHTQTASWMFGLSAEAIDPLMRRAAKTINFGVLYGMSAFRLSQELGIPYEEAQAFIQKYFQSYPKVKAWIEKTLEEGRTRGYVETLFGRRRYVPDLNARVKGKREAAERMAFNMPVQGTAADLMKLAMVRLFPQLREVGARMLLQVHDELLLEAPKERAEEVAALAKEVMEGVWPLAVPLEVEVGIGEDWLAAKG

SEQ ID NO: 3029 - DNA, 2529 bp, synthetic construct
  misc_feature 1..2529: note = Variant of DNA polymerase I from Thermus sp. strain 2.9
  source 1..2529: mol_type = other DNA
atgcaccatcatcatcatcatggcggtagcggcgtgttaccggtgttcgagcctaaaggtcgcgtgcttctggttgatggccatcatctcgcgtatcgtaacttctttgccctgaaaggattaaccaccagctcgggcgagccggtacagggtgtctacggctttgcaaagtcgctcctgaaagctctgaaagaagacggtgatgtggtgattgttgtctttgatgcgaaagcgccaagttttcgccacgaagcgtacgaagcttacaaagccgggcgtgctccaacgccggaagactttcctcgccaattggcgcttatgaaggaattagtggatttgcttggcctcgaacgcttggaagttcccggtttcgaggcagacgacgtattagcgactctcgcaaagaaagccgaacgtgagggctatgaagtccagatcttgacagcagatcgcgatcttttccagcttttatctccgcgcatctcggtgttacacccggaagggcatcgtatcaccccggaatggctctgggagaaatatggtttgcgtcccgaacaatgggtggattttcgcgccttagcaggcgatccgagcgacaatattccgggagttaaaggtatcggcgagaagacggcgctcaagctccttaaagaatgggggtcgttggagaacttgcttgaaaatttagatcaggtcaaaccagagtcagtgcgtgagaagattcttgctcacctcgaagacctcaaattaagccgcgaattgtcccgtgtacgcaccgatttgccgctcgaagttgatttccgtcgccgccgcgaacctgactgggagggtcttaaagcgtttttagagcgtcttgaatttggttcgctcttgcatgaattcggccttttagaaagcccgttaccagccgaagaagcaccttggccaccgcccgaaggcgcgtttttaggttaccgtttgagtcgcccggaaccgatgtgggccgaattagcggctcttgcagcgtctgcccagggacgtgtgtatcgcgcggaagaccctcatggtgcgctccgcggcctcttcgaagtccgcggactccttgccaaagacttagctgttgttgcattgcgcgaaggtcttgatttacctccgactgatgatccaatgcttcttgcgtacctcttggacccgtcaaacacgacgcccgaaggcgtagcccgtcgttacggcggcgagtggaccgaagatgcagcgaaacgcgcgttattggccgaacgtttgcacgaaaatttattaggacgtttgcaaggcgaggaacgtctcctctggctttacgaagaagtggagaaaccattgagtcgcgtgctcgcgcatatggaagctaccggtgtcaaattagacgtggcgtatttggaggctctcagccttgaagttgctgcccacatgcgccgcttggaggaagaagtattccgtttagcaggccattcctttcgccttaattctcgcgatcagttagaacgtgtgttgttcgatgaacttggtctccctcctatcggcaagacagagaagaccggtaaacgtagcacttcagccgcggttttagaagctcttcgcgaagtccatcccattgtggacaagatcttgcagtaccgcgaactcgcgaaattgaaaggcacctatattgaccgtcttccggcattagtccacccgaaaacgggacgcctccatacccgcttcaaccaaacagccacggcgaccggtcgtttgtcctcctctgatccaaaccttcagaatattccagtacgtaccccattgggccagaagatccgcaaagcgtttgtagctgaggagggttggcgtttagtggccctcgattatagccaaattgaattacgtgtccttgcccatctttctggcgatgagaacctcatccgcgtgtttcaggaaggcaaagacattcacactcaaacggcaagctggatgtttggattatcagctgaagcgatcgatcctttgatgcgtcgtgcagcgaagaccatcaatttcggtgttctctacggtatgagtgcctttcgtttgtcgcaggaattaggcattccctatgaagaagctgcggcgttcattcagaaatactttcaaagctatcccaaagttaaagcatggatcgagaagactctcgaagaaggccgcacacgtggttacgtagagaccttatttggacgtcgccgctatgttcccgatttaaacgctcgcgtgaaaggcaagcgtgaagccgccgaacgcatggcgttcaacatgcctgtacagggcacggcagctgacctcatgaaacttgcaatggtgcgcctttttccacaattgcgtgaagttggtgcccgcatgctcttgcaggtccacgatgaactcttgttagaagcgccaaaagagcgtgcggaagaggtggcagccctcgcgaaagaagttatggaaggcgtgtggcccttagcggtgcctcttgaagtcgaagttggtattggcgaggattggctggctgccaaaggataatga

SEQ ID NO: 3030 - protein, 841 aa, synthetic construct
  REGION 1..841: note = Variant of DNA polymerase I from Thermus sp. strain 2.9
MHHHHHHGGSGVLPVFEPKGRVLLVDGHHLAYRNFFALKGLTTSSGEPVQGVYGFAKSLLKALKEDGDVVIVVFDAKAPSFRHEAYEAYKAGRAPTPEDFPRQLALMKELVDLLGLERLEVPGFEADDVLATLAKKAEREGYEVQILTADRDLFQLLSPRISVLHPEGHRITPEWLWEKYGLRPEQWVDFRALAGDPSDNIPGVKGIGEKTALKLLKEWGSLENLLENLDQVKPESVREKILAHLEDLKLSRELSRVRTDLPLEVDFRRRREPDWEGLKAFLERLEFGSLLHEFGLLESPLPAEEAPWPPPEGAFLGYRLSRPEPMWAELAALAASAQGRVYRAEDPHGALRGLFEVRGLLAKDLAVVALREGLDLPPTDDPMLLAYLLDPSNTTPEGVARRYGGEWTEDAAKRALLAERLHENLLGRLQGEERLLWLYEEVEKPLSRVLAHMEATGVKLDVAYLEALSLEVAAHMRRLEEEVFRLAGHSFRLNSRDQLERVLFDELGLPPIGKTEKTGKRSTSAAVLEALREVHPIVDKILQYRELAKLKGTYIDRLPALVHPKTGRLHTRFNQTATATGRLSSSDPNLQNIPVRTPLGQKIRKAFVAEEGWRLVALDYSQIELRVLAHLSGDENLIRVFQEGKDIHTQTASWMFGLSAEAIDPLMRRAAKTINFGVLYGMSAFRLSQELGIPYEEAAAFIQKYFQSYPKVKAWIEKTLEEGRTRGYVETLFGRRRYVPDLNARVKGKREAAERMAFNMPVQGTAADLMKLAMVRLFPQLREVGARMLLQVHDELLLEAPKERAEEVAALAKEVMEGVWPLAVPLEVEVGIGEDWLAAKG

SEQ ID NO: 3031 - DNA, 2529 bp, synthetic construct
  misc_feature 1..2529: note = Variant of DNA polymerase I from Thermus sp. strain 2.9
  source 1..2529: mol_type = other DNA
atgcaccatcatcatcatcatggcggtagcggcgtgttaccggtgttcgagcataaaggtcgcgtgcttctggttgatggccatcatctcgcgtatcgtaacttctttgccctgaaaggattaaccaccagcagcggcgagccggtacagggtgtctacggctttgcaaagtcgctcctgaaagctctgaaagaagacggtgatgtggtgattgttgtctttgatgcgaaagcgccaagttttcgccacgaagcgtacgaagcttacaaagccgggcgtgctccaacgccggaagactttcctcgccaattggcgcttatgaaggaattagtggatttgcttggcctcgaacgcttggaagttcccggtttcgaggcagacgacgtattagcgactctcgcaaagaaagccgaacgtgagggctatgaagtccagatcttgacagcagatcgcgatcttttccagcttttatctccgcgcatctcggtgttacacccggaagggcatcgtatcaccccggaatggctctgggagaaatatggtttgcgtcccgaacaatgggtggattttcgcgccttagcaggcgatccgagcgacaatattccgggagttaaaggtatcggcgagaagacggcgctcaagctccttaaagaatgggggtcgttggagaacttgcttaagaatttagatcaggtcaaaccagagtcagtgcgtgagaagattcttgctcacctcgaagacctcaaattaagccgcgaattgtcccgtgtacgcaccgatttgccgctcgaagttgatttccagcgccgccgcgaacctgactgggagggtcttaaagcgtttttagagcgtcttgaatttggttcgctcttgcatgaattcggccttttagaaagcccgttagttgccgaagaagcaccttggccaccgccccagggcgcgtttttaggttaccgtttgagtcgcccggaaccgatgtgggccgaattactggctcttgcagcgtctgcccagggacgtgtgtatcgcgcggaagaccctcatggtgcgctccgcggcctcttcgaagtccgtggactccttgccaaagacttagctgttgttgcattgcgcgaaggtcttgatttacctccgactgatgatccaatgcttcttgcgtacctcttggacccgtcaaacacgacgcccgaaggcgtagcccgtcgttacggcggcgagtggaccgaagatgcagcgaaacgcgcgttattggccgaacgtttgcacgcgaatttattaggacgtttgcaaggcgaggaacgtctcctctggctttacgaagaagtggagaaaccattgagtcgcgtgctcgcgcatatggaagctaccggtgtcaaattagacgtggcgtatttggaggctctcagccttgaagttgctgcccacatgcgccgcttggaggaagaagtattccgtttagcaggccattcctttcgccttaattctcgcgatcagttagaacgtgtgttgttcgatgaacttggtctccctcctatcggcaagacagagaagaccggtaaacgtagcacttcagcggcggttttagaagctcttcgcgaagtccatcccattgtggacaagatcttgcagtaccgcgaactcgcgaaattgaaaggcacctatattgaccgtcttccggcattagtccacccgaaaacgggacgcctccatacccgcttcaaccaaacagccacggcgaccggtcgtttgtcctcctctgatccaaaccttcagaatattccagtacgtaccccattgggccagaagatccgcaaagcgtttgtagctgaggagggttggcgtttagtggccctcgattatagccaaattgaattacgtgtccttgcccatctttctggcgatgagaacctcatccgcgtgtttcaggaaggcaaagacattcacactcaaacggcaagctggatgtttggattaggtgctgaagcgatcgatcctttgatgcgtcgtgcagcgaagaccatcaatttcggtgttctctacggtatgagtgcctttcgtttgtcgcaggaattaggcattccctatgaagaagctcaggcgttcattcagaaatactttcaaagctatcccaaagttaaagcatggatcgagaagactctcgaagaaggccgcacacgtggttacgtagagaccttatttggacgtcgccgctatgttcccgatttaaacgctcgcgtgaaaggcaagcgtgaagccgccgaacgcatggcgttcaacatgcctgtacagggcacggcagctgacctcatgaaacttgcaatggtgcgcctttttccacaattgcgtgaagttggtgcccgcatgctcttgcaggtccacgatgaactcttgttagaagcgccaaaagagcgtgcggaagaggtggcagccctcgcgaaagaagttatggaaggcgtgtggcccttagcggtgcctcttgaagtcgaagttggtattggcgaggattggctggctgccaaaggataatga

SEQ ID NO: 3032 - protein, 841 aa, synthetic construct
  REGION 1..841: note = Variant of DNA polymerase I from Thermus sp. strain 2.9
MHHHHHHGGSGVLPVFEHKGRVLLVDGHHLAYRNFFALKGLTTSSGEPVQGVYGFAKSLLKALKEDGDVVIVVFDAKAPSFRHEAYEAYKAGRAPTPEDFPRQLALMKELVDLLGLERLEVPGFEADDVLATLAKKAEREGYEVQILTADRDLFQLLSPRISVLHPEGHRITPEWLWEKYGLRPEQWVDFRALAGDPSDNIPGVKGIGEKTALKLLKEWGSLENLLKNLDQVKPESVREKILAHLEDLKLSRELSRVRTDLPLEVDFQRRREPDWEGLKAFLERLEFGSLLHEFGLLESPLVAEEAPWPPPQGAFLGYRLSRPEPMWAELLALAASAQGRVYRAEDPHGALRGLFEVRGLLAKDLAVVALREGLDLPPTDDPMLLAYLLDPSNTTPEGVARRYGGEWTEDAAKRALLAERLHANLLGRLQGEERLLWLYEEVEKPLSRVLAHMEATGVKLDVAYLEALSLEVAAHMRRLEEEVFRLAGHSFRLNSRDQLERVLFDELGLPPIGKTEKTGKRSTSAAVLEALREVHPIVDKILQYRELAKLKGTYIDRLPALVHPKTGRLHTRFNQTATATGRLSSSDPNLQNIPVRTPLGQKIRKAFVAEEGWRLVALDYSQIELRVLAHLSGDENLIRVFQEGKDIHTQTASWMFGLGAEAIDPLMRRAAKTINFGVLYGMSAFRLSQELGIPYEEAQAFIQKYFQSYPKVKAWIEKTLEEGRTRGYVETLFGRRRYVPDLNARVKGKREAAERMAFNMPVQGTAADLMKLAMVRLFPQLREVGARMLLQVHDELLLEAPKERAEEVAALAKEVMEGVWPLAVPLEVEVGIGEDWLAAKG

SEQ ID NO: 3033 - DNA, 2529 bp, synthetic construct
  misc_feature 1..2529: note = Variant of DNA polymerase I from Thermus sp. strain 2.9
  source 1..2529: mol_type = other DNA
atgcaccatcatcatcatcatggcggtagcggcgtgttaccggtgttcgagcctaaaggtcgcgtgcttctggttgatggccatcatctcgcgtatcgtaacttctttgccctgaaaggattaaccaccagcagcggcgagccggtacagggtgtctacggctttgcaaagtcgctcctgaaagctctgaaagaagacggtgatgtggtgattgttgtctttgatgcgaaagcgccaagttttcgccacgaagcgtacgaagcttacaaagccgggcgtgctccaacgccggaagactttcctcgccaattggcgcttatgaaggaattagtggatttgcttggcctcgaacgcttggaagttcccggtttcgaggcagacgacgtattagcgactctcgcaaagaaagccgaacgtgagggctatgaagtccagatcttgacagcagatcgcgatcttttccagcttttatctccgcgcatctcggtgttacacccggaagggcatcgtatcaccccggaatggctctgggagaaatatggtttgcgtcccgaacaatgggtggattttcgcgccttagcaggcgatccgagcgacaatattccgggagttaaaggtatcggcgagaagacggcgctcaagctccttaaagaatgggggtcgttggagaacttgcttaagaatttagatcaggtcaaaccagagtcagtgcgtgagaagattcttgctcacctcgaagacctcaaattaagccgcgaattgtcccgtgtacgcaccgatttgccgctcgaagttgatttccgccgccgccgcgaacctgactgggagggtcttaaagcgtttttagagcgtcttgaatttggttcgctcttgcatgaattcggccttttagaaagcccgttaccagccgaagaagcaccttggccaccgcccgagggcgcgtttttaggttaccgtttgagtcgcccggaaccgatgtgggccgaattactggctcttgcagcgtctgcccagggacgtgtgtatcgcgcggaagaccctcatggtgcgctccgcggcctcttcgaagtcaacggactccttgccaaagacttagctgttgttgcattgcgcgaaggtcttgatttacctccgactgatgatccaatgcttcttgcgtacctcttggacccgtcaaacacgacgcccgaaggcgtagcccgtcgttacggcggcgagtggaccgaagatgcagcgaaacgcgcgttattggccgaacgtttgcacgccaatttattaggacgtttgcaaggcgaggaacgtctcctctggctttacgaagaagtggagaaaccattgagtcgcgtgctcgcgcatatggaagctaccggtgtcaaattagacgtggcgtatttggagaatctcagccttgaagttgctgcccacatgcgccgcttggaggaagaagtattccgtttagcaggccattcctttcgccttaattctcgcgatcagttagaacgtgtgttgttcgatgaacttggtctccctcctatcggcaagacagagaagaccggtaaacgtagcacttcagcggcggttttagaagctcttcgcgaagtccatcccattgtggacaagatcttgcagtaccgcgaactcgcgaaattgaaaggcacctatattgaccgtcttccggcattagtccacccgaaaacgggacgcctccatacccgcttcaaccaaacagccacggcgaccggtcgtttgtcctcctctgatccaaaccttcagaatattccagtacgtaccccattgggccagaagatccgccgtgcgtttgtagctgaggagggttggcgtttagtggccctcgattatagccaaattgaattacgtgtccttgcccatctttctggcgatgagaacctcatccgcgtgtttcaggaaggcaaagacattcacactcaaacggcaagctggatgtttggattatcagctgaagcgatcgatcctttgatgcgtcgtgcagcgaagaccatcaatttcggtgttctctacggtatgagtgcctttcgtttgtcgcaggaattaggcattccctatgaagaagctcaggcgttcattcagaaatactttcaaagctatcccaaagttaaagcatggatcgagaagactctcgaagaaggccgcacacgtggttacgtagagaccttatttggacgtcgccgctatgttcccgatttaaacgctcgcgtgaaaggcaagcgtgaagccgccgaacgcatggcgttcaacatgcctgtacagggcacggcagctgacctcatgaaacttgcaatggtgcgcctttttccacaattgcgtgaagttggtgcccgcatgctcttgcaggtccacgatgaactcttgttagaagcgccaaaagagcgtgcggaagaggtggcagccctcgcgaaaaccgttatggaaggcgtgtggcccttagcggtgcctcttgaagtcgaagttggtattggcgaggattggctggctgccaaaggataatga

SEQ ID NO: 3034 - protein, 841 aa, synthetic construct
  REGION 1..841: note = Variant of DNA polymerase I from Thermus sp. strain 2.9
MHHHHHHGGSGVLPVFEPKGRVLLVDGHHLAYRNFFALKGLTTSSGEPVQGVYGFAKSLLKALKEDGDVVIVVFDAKAPSFRHEAYEAYKAGRAPTPEDFPRQLALMKELVDLLGLERLEVPGFEADDVLATLAKKAEREGYEVQILTADRDLFQLLSPRISVLHPEGHRITPEWLWEKYGLRPEQWVDFRALAGDPSDNIPGVKGIGEKTALKLLKEWGSLENLLKNLDQVKPESVREKILAHLEDLKLSRELSRVRTDLPLEVDFRRRREPDWEGLKAFLERLEFGSLLHEFGLLESPLPAEEAPWPPPEGAFLGYRLSRPEPMWAELLALAASAQGRVYRAEDPHGALRGLFEVNGLLAKDLAVVALREGLDLPPTDDPMLLAYLLDPSNTTPEGVARRYGGEWTEDAAKRALLAERLHANLLGRLQGEERLLWLYEEVEKPLSRVLAHMEATGVKLDVAYLENLSLEVAAHMRRLEEEVFRLAGHSFRLNSRDQLERVLFDELGLPPIGKTEKTGKRSTSAAVLEALREVHPIVDKILQYRELAKLKGTYIDRLPALVHPKTGRLHTRFNQTATATGRLSSSDPNLQNIPVRTPLGQKIRRAFVAEEGWRLVALDYSQIELRVLAHLSGDENLIRVFQEGKDIHTQTASWMFGLSAEAIDPLMRRAAKTINFGVLYGMSAFRLSQELGIPYEEAQAFIQKYFQSYPKVKAWIEKTLEEGRTRGYVETLFGRRRYVPDLNARVKGKREAAERMAFNMPVQGTAADLMKLAMVRLFPQLREVGARMLLQVHDELLLEAPKERAEEVAALAKTVMEGVWPLAVPLEVEVGIGEDWLAAKG

SEQ ID NO: 3035 - DNA, 2529 bp, synthetic construct
  misc_feature 1..2529: note = Variant of DNA polymerase I from Thermus sp. strain 2.9
  source 1..2529: mol_type = other DNA
atgcaccatcatcatcatcatggcggtagcggcgtgttaccggtgttcgagcctaaaggtcgcgtgcttctggttgatggccatcatctcgcgtatcgtaacttctttgccctgaaaggattaaccaccagcagcggcgagccggtacagggtgtctacggctttgcaaagtcgctcctgaaagctctgaaagaagacggtgatgtggtgattgttgtctttgatgcgaaagcgccaagttttcgccacgaagcgtacgaagcttacaaagccgggcgtgctccaacgccggaagactttcctcgccaattggcgcttatgaaggaattagtggatttgcttggcctcgaacgcttggaagttcccggtttcgaggcagacgacgtattagcgactctcgcaaagaaagccgaacgtgagggctatgaagtccagatcttgacagcagatcgcgatcttttccagcttttatctccgcgcatctcggtgttacacccggaagggcatcgtatcaccccggaatggctctgggagaaatatggtttgcgtcccgaacaatgggtggattttcgcgccttagcaggcgatccgagcgacaatattccgggagttaaaggtatcggcgagaagacggcgctcaagctccttaaagaatgggggtcgttggagaacttgcttaagaatttagatcaggtcaaaccagagtcagtgcgtgagaagattcttgctcacctcgaagacctcaaattaagccgcgaattgtcccgtgtacgcaccgatttgccgctcgaagttgatttccgtcgccgccgcgaacctgactgggagggtcttaaagcgtttttagagcgtcttgaatttggttcgctcttgcatgaattcggccttttagaaagcccgttaccagccgaagaagcaccttggccaccgcccgagggcgcgtttttaggttaccgtttgagtcgcccggaaccgatgtgggccgaattactggctcttgcagcgtctgcccagggacgtgtgtatcgcgcggaagaccctcatggtgcgctccgcggcctcttcgaagtccgtggactccttgccaaagacttagctgttgttgcattgcgcgaaggtcttgatttacctccgactgatgatccaatgcttcttgcgtacctcttggacccgtcaaacacgacgcccgaaggcgtagcccgtcgttacggcggcgagtggaccgaagatgcagcgaaacgcgcgttattggccgaacgtttgcacgccaatttattaggacgtttgcaaggcgaggaacgtctcctctggctttacgaagaagtggagaaaccattgagtcgcgtgctcgcgcatatggaagctaccggtgtcaaattagacgtggcgtatttggaggctctcagccttgaagttgctgcccacatgcgccgcttggaggaagaagtattccgtttagcaggccattcctttcgccttaattctcgcgatcagttagaacgtgtgttgttcgatgaacttggtctccctcctatcggcaagacagagaagaccggtaaacgtagcactcaggcggcggttttagaagctcttcgcgaagtccatcccattgtggacaagatcttgcagtaccgcgaactcgcgaaattgaaaggcacctatattgaccgtcttccggcattagtccacccgaaaacgggacgcctccatacccgcttcaaccaaacagccacggcgaccggtcgtttgtcctcctctgatccaaaccttcagaatattccagtacgtaccccattgggccagaagatccgccgtgcgtttgtagctgaggagggttggcgtttagtggccctcgattatagccaaattgaattacgtgtccttgcccatctttctggcgatgagaacctcatccgcgtgtttcaggaaggcaaagacattcacactcaaacggcaagctggatgtttggattatcagctgaagcgatcgatcctttgatgcgtcgtgcagcgaagaccatcaatttcggtgttctctacggtatgagtgcctttcgtttgtcgcaggaattaggcattccctatgaagaagctgcggcgttcattcagaaatactttcaaagctatcccaaagttaaagcatggatcgagaagactctcgaagaaggccgcacacgtggttacgtagagaccttatttggacgtcgccgctatgttcccgatttaaacgctcgcgtgaaaggcaagcgtgaagccgccgaacgcatggcgttcaacatgcctgtacagggcacggcagctgacctcatgaaacttgcaatggtgcgcctttttccacaattgcgtgaagttggtgcccgcatgctcttgcaggtccacgatgaactcttgttagaagcgccaaaagagcgtgcggaagaggtggcagccctcgcgaaagaagttatggaaggcgtgtggcccttagcggtgcctcttgaagtcgaagttggtattggcgaggattggctggctgccaaaggataatga

SEQ ID NO: 3036 - protein, 841 aa, synthetic construct
  REGION 1..841: note = Variant of DNA polymerase I from Thermus sp. strain 2.9
MHHHHHHGGSGVLPVFEPKGRVLLVDGHHLAYRNFFALKGLTTSSGEPVQGVYGFAKSLLKALKEDGDVVIVVFDAKAPSFRHEAYEAYKAGRAPTPEDFPRQLALMKELVDLLGLERLEVPGFEADDVLATLAKKAEREGYEVQILTADRDLFQLLSPRISVLHPEGHRITPEWLWEKYGLRPEQWVDFRALAGDPSDNIPGVKGIGEKTALKLLKEWGSLENLLKNLDQVKPESVREKILAHLEDLKLSRELSRVRTDLPLEVDFRRRREPDWEGLKAFLERLEFGSLLHEFGLLESPLPAEEAPWPPPEGAFLGYRLSRPEPMWAELLALAASAQGRVYRAEDPHGALRGLFEVRGLLAKDLAVVALREGLDLPPTDDPMLLAYLLDPSNTTPEGVARRYGGEWTEDAAKRALLAERLHANLLGRLQGEERLLWLYEEVEKPLSRVLAHMEATGVKLDVAYLEALSLEVAAHMRRLEEEVFRLAGHSFRLNSRDQLERVLFDELGLPPIGKTEKTGKRSTQAAVLEALREVHPIVDKILQYRELAKLKGTYIDRLPALVHPKTGRLHTRFNQTATATGRLSSSDPNLQNIPVRTPLGQKIRRAFVAEEGWRLVALDYSQIELRVLAHLSGDENLIRVFQEGKDIHTQTASWMFGLSAEAIDPLMRRAAKTINFGVLYGMSAFRLSQELGIPYEEAAAFIQKYFQSYPKVKAWIEKTLEEGRTRGYVETLFGRRRYVPDLNARVKGKREAAERMAFNMPVQGTAADLMKLAMVRLFPQLREVGARMLLQVHDELLLEAPKERAEEVAALAKEVMEGVWPLAVPLEVEVGIGEDWLAAKG

SEQ ID NO: 3037 - DNA, 2529 bp, synthetic construct
  misc_feature 1..2529: note = Variant of DNA polymerase I from Thermus sp. strain 2.9
  source 1..2529: mol_type = other DNA
atgcaccatcatcatcatcatggcggtagcggcgtgttaccggtgttcgagcctaaaggtcgcgtgcttctggttgatggccatcatctcgcgtatcgtaacttctttgccctgaaaggattaaccaccagcagcggcgagccggtacagggtgtctacggctttgcaaagtcgctcctgaaagctctgaaagaagacggtgatgtggtgattgttgtctttgatgcgaaagcgccaagttttcgccacgaagcgtacgaagcttacaaagccgggcgtgctccaacgccggaagactttcctcgccaattggcgcttatgaaggaattagtggatttgcttggcctcgaacgcttggaagttcccggtttcgaggcagacgacgtattagcgactctcgcaaagaaagccgaacgtgagggctatgaagtccagatcttgacagcagatcgcgatcttttccagcttttatctccgcgcatctcggtgttacacccggaagggcatcgtatcaccccggaatggctctgggagaaatatggtttgcgtcccgaacaatgggtggattttcgcgccttagcaggcgatccgagcgacaatattccgggagttaaaggtatcggcgagaagacggcgctcaagctccttaaagaatgggggtcgttggagaacttgcttaagaatttagatcaggtcaaaccagagtcagtgcgtgagaagattcttgctcacctcgaagacctcaaattaagccgcgaattgtcccgtgtacgcaccgatttgccgctcgaagttgatttccgccgccgccgcgaacctgactgggagggtcttaaagcgtttttagagcgtcttgaatttggttcgctcttgcatgaattcggccttttagaaagcccgttaccagccgaagaagcaccttggccaccgcccgagggcgcgtttttaggttaccgtttgagtcgcccggaaccgatgtgggccgaattactggctcttgcagcgtctgcccagggacgtgtgtatcgcgcggaagaccctcatggtgcgctccgcggcctcttcgaagtcaacggactccttgccaaagacttagctgttgttgcattgcgcgaaggtcttgatttacctccgactgatgatccaatgcttcttgcgtacctcttggacccgtcaaacacgacgcccgaaggcgtagcccgtcgttacggcggcgagtggaccgaagatgcagcgaaacgcgcgttattggccgaacgtttgcacgccaatttattaggacgtttgcaaggcgaggaacgtctcctctggctttacgaagaagtggagaaaccattgagtcgcgtgctcgcgcatatggaagctaccggtgtcaaattagacgtggcgtatttggagaatctcagccttgaagttgctgcccacatgcgccgcttggaggaagaagtattccgtttagcaggccattcctttcgccttaattctcgcgatcagttagaacgtgtgttgttcgatgaacttggtctccctcctatcggcaagacagagaagaccggtaaacgtagcacttcagcggcggttttagaagctcttcgcgaagtccatcccattgtggacaagatcttgcagtaccgcgaactcgcgaaattgaaaggcacctatattgaccgtcttccggcattagtccacccgaaaacgggacgcctccatacccgcttcaaccaaacagccacggcgaccggtcgtttgtcctcctctgatccaaaccttcagaatattccagtacgtaccccattgggccagaagatccgccgtgcgtttgtagctgaggagggttggcgtttagtggccctcgattatagccaaattgaattacgtgtccttgcccatctttctggcgatgagaacctcatccgcgtgtttcaggaaggcaaagacattcacactcaaacggcaagctggatgtttggattatcagctgaagcgatcgatcctttgatgcgtcgtgcagcgaagaccatcaatttcggtgttctctacggtatgagtgcctttcgtttgtcgcaggaattaggcattccctatgaagaagctcaggcgttcattcagaaatactttcaaagctatcccaaagttaaagcatggatcgagaagactctcgaagaaggccgcacacgtggttacgtagagaccttatttggacgtcgccgctatgttcccgatttaaacgctcgcgtgaaaggcaagcgtgaagccgccgaacgcatggcgttcaacatgcctgtacagggcacggcagctgacctcatgaaacttgcaatggtgcgcctttttccacaattgcgtgaagttggtgcccgcatgctcttgcaggtccacgatgaactcttgttagaagcgccaaaagagcgtgcggaagaggtggcagccctcgcgaaagaagttatggaaggcgtgtggcccttagcggtgcctcttgaagtcgaagttggtattggcgaggattggctggctgccaaaggataatga

SEQ ID NO: 3038 - protein, 841 aa, synthetic construct
  REGION 1..841: note = Variant of DNA polymerase I from Thermus sp. strain 2.9
MHHHHHHGGSGVLPVFEPKGRVLLVDGHHLAYRNFFALKGLTTSSGEPVQGVYGFAKSLLKALKEDGDVVIVVFDAKAPSFRHEAYEAYKAGRAPTPEDFPRQLALMKELVDLLGLERLEVPGFEADDVLATLAKKAEREGYEVQILTADRDLFQLLSPRISVLHPEGHRITPEWLWEKYGLRPEQWVDFRALAGDPSDNIPGVKGIGEKTALKLLKEWGSLENLLKNLDQVKPESVREKILAHLEDLKLSRELSRVRTDLPLEVDFRRRREPDWEGLKAFLERLEFGSLLHEFGLLESPLPAEEAPWPPPEGAFLGYRLSRPEPMWAELLALAASAQGRVYRAEDPHGALRGLFEVNGLLAKDLAVVALREGLDLPPTDDPMLLAYLLDPSNTTPEGVARRYGGEWTEDAAKRALLAERLHANLLGRLQGEERLLWLYEEVEKPLSRVLAHMEATGVKLDVAYLENLSLEVAAHMRRLEEEVFRLAGHSFRLNSRDQLERVLFDELGLPPIGKTEKTGKRSTSAAVLEALREVHPIVDKILQYRELAKLKGTYIDRLPALVHPKTGRLHTRFNQTATATGRLSSSDPNLQNIPVRTPLGQKIRRAFVAEEGWRLVALDYSQIELRVLAHLSGDENLIRVFQEGKDIHTQTASWMFGLSAEAIDPLMRRAAKTINFGVLYGMSAFRLSQELGIPYEEAQAFIQKYFQSYPKVKAWIEKTLEEGRTRGYVETLFGRRRYVPDLNARVKGKREAAERMAFNMPVQGTAADLMKLAMVRLFPQLREVGARMLLQVHDELLLEAPKERAEEVAALAKEVMEGVWPLAVPLEVEVGIGEDWLAAKG

SEQ ID NO: 3039 - DNA, 2529 bp, synthetic construct
  misc_feature 1..2529: note = Variant of DNA polymerase I from Thermus sp. strain 2.9
  source 1..2529: mol_type = other DNA
atgcaccatcatcatcatcatggcggtagcggcgtgttaccggtgttcgagcctaaaggtcgcgtgcttctggttgatggccatcatctcgcgtatcgtaacttctttgccctgaaaggattaaccaccagctcgggcgagccggtacagggtgtctacggctttgcaaagtcgctcctgaaagctctgaaagaagacggtgatgtggtgattgttgtctttgatgcgaaagcgccaagttttcgccacgaagcgtacgaagcttacaaagccgggcgtgctccaacgccggaagactttcctcgccaattggcgcttatgaaggaattagtggatttgcttggcctcgaacgcttggaagttcccggtttcgaggcagacgacgtattagcgactctcgcaaagaaagccgaacgtgagggctatgaagtccagatcttgacagcagatcgcgatcttttccagcttttatctccgcgcatctcggtgttacacccggaagggcatcgtatcaccccggaatggctctgggagaaatatggtttgcgtcccgaacaatgggtggattttcgcgccttagcaggcgatccgagcgacaatattccgggagttaaaggtatcggcgagaagacggcgctcaagctccttaaagaatgggggtcgttggagaacttgcttgaaaatttagatcaggtcaaaccagagtcagtgcgtgagaagattcttgctcacctcgaagacctcaaattaagccgcgaattgtcccgtgtacgcaccgatttgccgctcgaagttgatttccgtcgccgccgcgaacctgactgggagggtcttaaagcgtttttagagcgtcttgaatttggttcgctcttgcatgaattcggccttttagaaagcccgttaccagccgaagaagcaccttggccaccgcccgaaggcgcgtttttaggttaccgtttgagtcgcccggaaccgatgtgggccgaattactggctcttgcagcgtctgcccagggacgtgtgtatcgcgcggaagaccctcatggtgcgctccgcggcctcttcgaagtccgtggactccttgccaaagacttagctgttgttgcattgcgcgaaggtcttgatttacctccgactgatgatccaatgcttcttgcgtacctcttggacccgtcaaacacgacgcccgaaggcgtagcccgtcgttacggcggcgagtggaccgaagatgcagcgaaacgcgcgttattggccgaacgtttgcacgaaaatttattaggacgtttgcaaggcgaggaacgtctcctctggctttacgaagaagtggagaaaccattgagtcgcgtgctcgcgcatatggaagctaccggtgtcaaattagacgtggcgtatttggaggctctcagccttgaagttgctgcccacatgcgccgcttggaggaagaagtattccgtttagcaggccattcctttcgccttaattctcgcgatcagttagaacgtgtgttgttcgatgaacttggtctccctcctatcggcaagacagagaagaccggtaaacgtagcacttcagcggcggttttagaagctcttcgcgaagtccatcccattgtggacaagatcttgcagtaccgcgaactcgcgaaattgaaaggcacctatattgaccgtcttccggcattagtccacccgaaaacgggacgcctccatacccgcttcaaccaaacagccacggcgaccggtcgtttgtcctcctctgatccaaaccttcagaatattccagtacgtaccccattgggccagaagatccgccgtgcgtttgtagctgaggagggttggcgtttagtggccctcgattatagccaaattgaattacgtgtccttgcccatctttctggcgatgagaacctcatccgcgtgtttcaggaaggcaaagacattcacactcaaacggcaagctggatgtttggattatcagctgaagcgatcgatcctttgatgcgtcgtgcagcgaagaccatcaatttcggtgttctctacggtatgagtgcctttcgtttgtcgcaggaattaggcattccctatgaagaagctgcggcgttcattcagaaatactttcaaagctatcccaaagttaaagcatggatcgagaagactctcgaagaaggccgcacacgtggttacgtagagaccttatttggacgtcgccgctatgttcccgatttaaacgctcgcgtgaaaggcaagcgtgaagccgccgaacgcatggcgttcaacatgcctgtacagggcacggcagctgacctcatgaaacttgcaatggtgcgcctttttccacaattgcgtgaagttggtgcccgcatgctcttgcaggtccacgatgaactcttgttagaagcgccaaaagagcgtgcggaagaggtggcagccctcgcgaaagaagttatggaaggcgtgtggcccttagcggtgcctcttgaagtcgaagttggtattggcgaggattggctggctgccaaaggataatga

SEQ ID NO: 3040 - protein, 841 aa, synthetic construct
  REGION 1..841: note = Variant of DNA polymerase I from Thermus sp. strain 2.9
MHHHHHHGGSGVLPVFEPKGRVLLVDGHHLAYRNFFALKGLTTSSGEPVQGVYGFAKSLLKALKEDGDVVIVVFDAKAPSFRHEAYEAYKAGRAPTPEDFPRQLALMKELVDLLGLERLEVPGFEADDVLATLAKKAEREGYEVQILTADRDLFQLLSPRISVLHPEGHRITPEWLWEKYGLRPEQWVDFRALAGDPSDNIPGVKGIGEKTALKLLKEWGSLENLLENLDQVKPESVREKILAHLEDLKLSRELSRVRTDLPLEVDFRRRREPDWEGLKAFLERLEFGSLLHEFGLLESPLPAEEAPWPPPEGAFLGYRLSRPEPMWAELLALAASAQGRVYRAEDPHGALRGLFEVRGLLAKDLAVVALREGLDLPPTDDPMLLAYLLDPSNTTPEGVARRYGGEWTEDAAKRALLAERLHENLLGRLQGEERLLWLYEEVEKPLSRVLAHMEATGVKLDVAYLEALSLEVAAHMRRLEEEVFRLAGHSFRLNSRDQLERVLFDELGLPPIGKTEKTGKRSTSAAVLEALREVHPIVDKILQYRELAKLKGTYIDRLPALVHPKTGRLHTRFNQTATATGRLSSSDPNLQNIPVRTPLGQKIRRAFVAEEGWRLVALDYSQIELRVLAHLSGDENLIRVFQEGKDIHTQTASWMFGLSAEAIDPLMRRAAKTINFGVLYGMSAFRLSQELGIPYEEAAAFIQKYFQSYPKVKAWIEKTLEEGRTRGYVETLFGRRRYVPDLNARVKGKREAAERMAFNMPVQGTAADLMKLAMVRLFPQLREVGARMLLQVHDELLLEAPKERAEEVAALAKEVMEGVWPLAVPLEVEVGIGEDWLAAKG

SEQ ID NO: 3041 - DNA, 2529 bp, synthetic construct
  misc_feature 1..2529: note = Variant of DNA polymerase I from Thermus sp. strain 2.9
  source 1..2529: mol_type = other DNA
atgcaccatcatcatcatcatggcggtagcggcgtgttaccggtgttcgagcctaaaggtcgcgtgcttctggttgatggccatcatctcgcgtatcgtaacttctttgccctgaaaggattaaccaccagcctgggcgagccggtacagggtgtctacggctttgcaaagtcgctcctgaaagctctgaaagaagacggtgatgtggtgattgttgtctttgatgcgaaagcgccaagttttcgccacgaagcgtacgaagcttacaaagccgggcgtgctccaacgccggaagactttcctcgccaattggcgcttatgaaggaattagtggatttgcttggcctcgaacgcttggaagttcccggtttcgaggcagacgacgtattagcgactctcgcaaagaaagccgaacgtgagggctatgaagtccagatcttgacagcagatcgcgatcttttccagcttttatctccgcgcatctcggtgttacacccggaagggcatcgtatcaccccggaatggctctgggagaaatatggtttgcgtcccgaacaatgggtggattttcgcgccttagcaggcgatccgagcgacaatattccgggagttaaaggtatcggcgagaagacggcgctcaagctccttaaagaatgggggtcgttggagaacttgcttgaaaatttagatcaggtcaaaccagagtcagtgcgtgagaagattcttgctcacctcgaagacctcaaattaagccgcgaattgtcccgtgtacgcaccgatttgccgctcgaagttgatttccgtcgccgccgcgaacctgactgggagggtcttaaagcgtttttagagcgtcttgaatttggttcgctcttgcatgaattcggccttttagaaagcccgttactggccgaagaagcaccttggccaccgcccgagggcgcgtttttaggttaccgtttgagtcgcccggaaccgatgtgggccgaattactggctcttgcagcgtctgcccagggacgtgtgtatcgcgcggaagaccctcatggtgcgctccgcggcctcttcgaagtccgtggactccttgccaaagacttagctgttgttgcattgcgcgaaggtcttgatttacctccgactgatgatccaatgcttcttgcgtacctcttggacccgtcaaacacgacgcccgaaggcgtagcccgtcgttacggcggcgagtggaccgaagatgcagcgaaacgcgcgttattggccgaacgtttgcacgaaaatttattaggacgtttgcaaggcgaggaacgtctcctctggctttacgaagaagtggagaaaccattgagtcgcgtgctcgcgcatatggaagctaccggtgtcaaattagacgtggcgtatttggaggctctcagccttgaagttgctgcccacatgcgccgcttggaggaagaagtattccgtttagcaggccattcctttcgccttaattctcgcgatcagttagaacgtgtgttgttcgatgaacttggtctccgtcctatcggcaagacagagaagaccggtaaacgtagcacttcagcggcggttttagaagctcttcgcgaagtccatcccattgtggacaagatcttgcagtaccgcgaactcgcgaaattgaaaggcacctatattgaccgtcttccggcattagtccacccgaaaacgggacgcctccatacccgcttcaaccaaacagccacggcgaccggtcgtttgtcctcctctgatccaaaccttcagaatattccagtacgtaccccattgggccagaagatccgcaaagcgtttgtagctgaggagggttggcgtttagtggccctcgattatcgtcaaattgaattacgtgtccttgcccatctttctggcgatgagaacctcatccgcgtgtttcaggaaggcaaagacattcacactcaaacggcaagctggatgtttggattatcagctgaagcgatcgatcctttgatgcgtcgtgcagcgaagaccatcaatttcggtgttctctacggtatgagtgcctttcgtttgtcgcaggaattaggcattccctatgaggaagctcaagcgttcattcagaaatactttcaaagctatcccaaagttaaagcatggatcgagaagactctcgaagaaggccgcacacgtggttacgtagagaccttatttggacgtcgccgctatgttcccgatttaaacgctcgcgtgaaaggcaagcgtgaagccgccgaacgcatggcgttcaacatgcctgtacagggcacggcagctgacctcatgaaacttgcaatggtgcgcctttttccacaattgcgtgaagttggtgcccgcatgctcttgcaggtccacgatgaactcttgttagaagcgccaaaagagcgtgcggaagaggtggcagccctcgcgaaagaagttatggaaggcgtgtggcccttagcggtgcctcttgaagtcgaagttggtattggcgaggattggctggctgccaaaggataatga

SEQ ID NO: 3042 - protein, 841 aa, synthetic construct
  REGION 1..841: note = Variant of DNA polymerase I from Thermus sp. strain 2.9
MHHHHHHGGSGVLPVFEPKGRVLLVDGHHLAYRNFFALKGLTTSLGEPVQGVYGFAKSLLKALKEDGDVVIVVFDAKAPSFRHEAYEAYKAGRAPTPEDFPRQLALMKELVDLLGLERLEVPGFEADDVLATLAKKAEREGYEVQILTADRDLFQLLSPRISVLHPEGHRITPEWLWEKYGLRPEQWVDFRALAGDPSDNIPGVKGIGEKTALKLLKEWGSLENLLENLDQVKPESVREKILAHLEDLKLSRELSRVRTDLPLEVDFRRRREPDWEGLKAFLERLEFGSLLHEFGLLESPLLAEEAPWPPPEGAFLGYRLSRPEPMWAELLALAASAQGRVYRAEDPHGALRGLFEVRGLLAKDLAVVALREGLDLPPTDDPMLLAYLLDPSNTTPEGVARRYGGEWTEDAAKRALLAERLHENLLGRLQGEERLLWLYEEVEKPLSRVLAHMEATGVKLDVAYLEALSLEVAAHMRRLEEEVFRLAGHSFRLNSRDQLERVLFDELGLRPIGKTEKTGKRSTSAAVLEALREVHPIVDKILQYRELAKLKGTYIDRLPALVHPKTGRLHTRFNQTATATGRLSSSDPNLQNIPVRTPLGQKIRKAFVAEEGWRLVALDYRQIELRVLAHLSGDENLIRVFQEGKDIHTQTASWMFGLSAEAIDPLMRRAAKTINFGVLYGMSAFRLSQELGIPYEEAQAFIQKYFQSYPKVKAWIEKTLEEGRTRGYVETLFGRRRYVPDLNARVKGKREAAERMAFNMPVQGTAADLMKLAMVRLFPQLREVGARMLLQVHDELLLEAPKERAEEVAALAKEVMEGVWPLAVPLEVEVGIGEDWLAAKG

SEQ ID NO: 3043 - DNA, 2529 bp, synthetic construct
  misc_feature 1..2529: note = Variant of DNA polymerase I from Thermus sp. strain 2.9
  source 1..2529: mol_type = other DNA
atgcaccatcatcatcatcatggcggtagcggcgtgttaccggtgttcgagcctaaaggtcgcgtgcttctggttgatggccatcatctcgcgtatcgtaacttctttgccctgaaaggattaaccaccagctcgggcgagccggtacagggtgtctacggctttgcaaagtcgctcctgaaagctctgaaagaagacggtgatgtggtgattgttgtctttgatgcgaaagcgccaagttttcgccacgaagcgtacgaagcttacaaagccgggcgtgctccaacgccggaagactttcctcgccaattggcgcttatgaaggaattagtggatttgcttggcctcgaacgcttggaagttcccggtttcgaggcagacgacgtattagcgactctcgcaaagaaagccgaacgtgagggctatgaagtccagatcttgacagcagatcgcgatcttttccagcttttatctccgcgcatctcggtgttacacccggaagggcatcgtatcaccccggaatggctctgggagaaatatggtttgcgtcccgaacaatgggtggattttcgcgccttagcaggcgatccgagcgacaatattccgggagttaaaggtatcggcgagaagacggcgctcaagctccttaaagaatgggggtcgttggagaacttgcttaagaatttagatcaggtcaaaccagagtcagtgcgtgagaagattcttgctcacctcgaagacctcaaattaagccgcgaattgtcccgtgtacgcaccgatttgccgctcgaagttgatttccgtcgccgccgcgaacctgactgggagggtcttaaagcgtttttagagcgtcttgaatttggttcgctcttgcatgaattcggccttttagaaagcccgttaccagccgaagaagcaccttggccaccgcccgagggcgcgtttttaggttaccgtttgagtcgcccggaaccgatgtgggccgaattatcggctcttgcagcgtctgcccagggacgtgtgtatcgcgcggaagaccctcatggtgcgctccgcggcctcttcgaagtccgtggactccttgccaaagacttagctgttgttgcattgcgcgaaggtcttgatttacctccgactgatgatccaatgcttcttgcgtacctcttggacccgtcaaacacgacgcccgaaggcgtagcccgtcgttacggcggcgagtggaccgaagatgcagcgaaacgcgcgttattggccgaacgtttgcacgaaaatttattaggacgtttgcaaggcgaggaacgtctcctctggctttacgaagaagtggagaaaccattgagtcgcgtgctcgcgcatatggaagctaccggtgtcaaattagacgtggcgtatttggaggctctcagccttgaagttgctgcccacatgcgccgcttggaggaagaagtattccgtttagcaggccattcctttcgccttaattctcgcgatcagttagaacgtgtgttgttcgatgaacttggtctccctcctatcggcaagacagagaagaccggtaaacgtagcacttcagcggcggttttagaagctcttcgcgaagtccatcccattgtggacaagatcttgcagtaccgcgaactcgcgaaattgaaaggcacctatattgaccgtcttccggcattagtccacccgaaaacgggacgcctccatacccgcttcaaccaaacagccacggcgaccggtcgtttgtcctcctctgatccaaaccttcagaatattccagtacgtaccccattgggccagaagatccgccgtgcgtttgtagctgaggagggttggcgtttagtggccctcgattatagccaaattgaattacgtgtccttgcccatctttctggcgatgagaacctcatccgcgtgtttcaggaaggcaaagacattcacactcaaacggcaagctggatgtttggattatcagctgaagcgatcgatcctttgatgcgtcgtgcagcgaagaccatcaatttcggtgttctctacggtatgagtgcctttcgtttgtcgcaggaattaggcattccctatgaagaagctgcggcgttcattcagaaatactttcaaagctatcccaaagttaaagcatggatcgagaagactctcgaagaaggccgcacacgtggttacgtagagaccttatttggacgtcgccgctatgttcccgatttaaacgctcgcgtgaaaggcaagcgtgaagccgccgaacgcatggcgttcaacatgcctgtacagggcacggcagctgacctcatgaaacttgcaatggtgcgcctttttccacaattgcgtgaagttggtgcccgcatgctcttgcaggtccacgatgaactcttgttagaagcgccaaaagagcgtgcggaagaggtggcagccctcgcgaaagaagttatggaaggcgtgtggcccttagcggtgcctcttgaagtcgaagttggtattggcgaggattggctggctgccaaaggataatga

SEQ ID NO: 3044 - protein, 841 aa, synthetic construct
  REGION 1..841: note = Variant of DNA polymerase I from Thermus sp. strain 2.9
MHHHHHHGGSGVLPVFEPKGRVLLVDGHHLAYRNFFALKGLTTSSGEPVQGVYGFAKSLLKALKEDGDVVIVVFDAKAPSFRHEAYEAYKAGRAPTPEDFPRQLALMKELVDLLGLERLEVPGFEADDVLATLAKKAEREGYEVQILTADRDLFQLLSPRISVLHPEGHRITPEWLWEKYGLRPEQWVDFRALAGDPSDNIPGVKGIGEKTALKLLKEWGSLENLLKNLDQVKPESVREKILAHLEDLKLSRELSRVRTDLPLEVDFRRRREPDWEGLKAFLERLEFGSLLHEFGLLESPLPAEEAPWPPPEGAFLGYRLSRPEPMWAELSALAASAQGRVYRAEDPHGALRGLFEVRGLLAKDLAVVALREGLDLPPTDDPMLLAYLLDPSNTTPEGVARRYGGEWTEDAAKRALLAERLHENLLGRLQGEERLLWLYEEVEKPLSRVLAHMEATGVKLDVAYLEALSLEVAAHMRRLEEEVFRLAGHSFRLNSRDQLERVLFDELGLPPIGKTEKTGKRSTSAAVLEALREVHPIVDKILQYRELAKLKGTYIDRLPALVHPKTGRLHTRFNQTATATGRLSSSDPNLQNIPVRTPLGQKIRRAFVAEEGWRLVALDYSQIELRVLAHLSGDENLIRVFQEGKDIHTQTASWMFGLSAEAIDPLMRRAAKTINFGVLYGMSAFRLSQELGIPYEEAAAFIQKYFQSYPKVKAWIEKTLEEGRTRGYVETLFGRRRYVPDLNARVKGKREAAERMAFNMPVQGTAADLMKLAMVRLFPQLREVGARMLLQVHDELLLEAPKERAEEVAALAKEVMEGVWPLAVPLEVEVGIGEDWLAAKG

SEQ ID NO: 3045 - DNA, 2529 bp, synthetic construct
  misc_feature 1..2529: note = Variant of DNA polymerase I from Thermus sp. strain 2.9
  source 1..2529: mol_type = other DNA
atgcaccatcatcatcatcatggcggtagcggcgtgttaccggtgttcgagcctaaaggtcgcgtgcttctggttgatggccatcatctcgcgtatcgtaacttctttgccctgaaaggattaaccaccagcagcggcgagccggtacagggtgtctacggctttgcaaagtcgctcctgaaagctctgaaagaagacggtgatgtggtgattgttgtctttgatgcgaaagcgccaagttttcgccacgaagcgtacgaagcttacaaagccgggcgtgctccaacgccggaagactttcctcgccaattggcgcttatgaaggaattagtggatttgcttggcctcgaacgcttggaagttcccggtttcgaggcagacgacgtattagcgactctcgcaaagaaagccgaacgtgagggctatgaagtccagatcttgacagcagatcgcgatcttttccagcttttatctccgcgcatctcggtgttacacccggaagggcatcgtatcaccccggaatggctctgggagaaatatggtttgcgtcccgaacaatgggtggattttcgcgccttagcaggcgatccgagcgacaatattccgggagttaaaggtatcggcgagaagacggcgctcaagctccttaaagaatgggggtcgttggagaacttgcttaagaatttagatcaggtcaaaccagagtcagtgcgtgagaagattcttgctcacctcgaagacctcaaattaagccgcgaattgtcccgtgtacgcaccgatttgccgctcgaagttgatttccgccgccgccgcgaacctgactgggagggtcttaaagcgtttttagagcgtcttgaatttggttcgctcttgcatgaattcggccttttagaaagcccgttaccagccgaagaagcaccttggccaccgcccgagggcgcgtttttaggttaccgtttgagtcgcccggaaccgatgtgggccgaattactggctcttgcagcgtctgcccagggacgtgtgtatcgcgcggaagaccctcatggtgcgctccgcggcctcttcgaagtccgtggactccttgccaaagacttagctgttgttgcattgcgcgaaggtcttgatttacctccgactgatgatccaatgcttcttgcgtacctcttggacccgtcaaacacgacgcccgaaggcgtagcccgtcgttacggcggcgagtggaccgaagatgcagcgaaacgcgcgttattggccgaacgtttgcacgccaatttattaggacgtttgcaaggcgaggaacgtctcctctggctttacgaagaagtggagaaaccattgagtcgcgtgctcgcgcatatggaagctaccggtgtcaaattagacgtggcgtatttggaggctctcagccttgaagttgctgcccacatgcgccgcttggaggaagaagtattccgtttagcaggccattcctttcgccttaattctcgcgatcagttagaacgtgtgttgttcgatgaacttggtctccgtcctatcggcaagacagagaagaccggtaaacgtagcacttcagcggcggttttagaagctcttcgcgaagtccatcccattgtggacaagatcttgcagtaccgcgaactcgcgaaattgaaaggcacctatattgaccgtcttccggcattagtccacccgaaaacgggacgcctccatacccgcttcaaccaaacagccacggcgaccggtcgtttgtcctcctctgatccaaaccttcagaatattccagtacgtaccccattgggccagaagatccgccgtgcgtttgtagctgaggagggttggcgtttagtggccctcgattatagccaaattgaattacgtgtccttgcccatctttctggcgatgagaacctcatccgcgtgtttcaggaaggcaaagacattcacactcaaacggcaagctggatgtttggattatcagctgaagcgatcgatcctttgatgcgtcgtgcagcgaagaccatcaatttcggtgttctctacggtatgagtgcctttcgtttgtcgcaggaattaggcattccctatgaagaagcttcggcgttcattcagaaatactttcaaagctatcccaaagttaaagcatggatcgagaagactctcgaagaaggccgcacacgtggttacgtagagaccttatttggacgtcgccgctatgttcccgatttaaacgctcgcgtgaaaggcaagcgtgaagccgccgaacgcatggcgttcaacatgcctgtacagggcacggcagctgacctcatgaaacttgcaatggtgcgcctttttccacaattgcgtgaagttggtgcccgcatgctcttgcaggtccacgatgaactcttgttagaagcgccaaaagagcgtgcggaagaggtggcagccctcgcgaaaaccgttatggaaggcgtgtggcccttagcggtgcctcttgaagtcgaagttggtattggcgaggattggctggctgccaaaggataatga

SEQ ID NO: 3046 - protein, 841 aa, synthetic construct
  REGION 1..841: note = Variant of DNA polymerase I from Thermus sp. strain 2.9
MHHHHHHGGSGVLPVFEPKGRVLLVDGHHLAYRNFFALKGLTTSSGEPVQGVYGFAKSLLKALKEDGDVVIVVFDAKAPSFRHEAYEAYKAGRAPTPEDFPRQLALMKELVDLLGLERLEVPGFEADDVLATLAKKAEREGYEVQILTADRDLFQLLSPRISVLHPEGHRITPEWLWEKYGLRPEQWVDFRALAGDPSDNIPGVKGIGEKTALKLLKEWGSLENLLKNLDQVKPESVREKILAHLEDLKLSRELSRVRTDLPLEVDFRRRREPDWEGLKAFLERLEFGSLLHEFGLLESPLPAEEAPWPPPEGAFLGYRLSRPEPMWAELLALAASAQGRVYRAEDPHGALRGLFEVRGLLAKDLAVVALREGLDLPPTDDPMLLAYLLDPSNTTPEGVARRYGGEWTEDAAKRALLAERLHANLLGRLQGEERLLWLYEEVEKPLSRVLAHMEATGVKLDVAYLEALSLEVAAHMRRLEEEVFRLAGHSFRLNSRDQLERVLFDELGLRPIGKTEKTGKRSTSAAVLEALREVHPIVDKILQYRELAKLKGTYIDRLPALVHPKTGRLHTRFNQTATATGRLSSSDPNLQNIPVRTPLGQKIRRAFVAEEGWRLVALDYSQIELRVLAHLSGDENLIRVFQEGKDIHTQTASWMFGLSAEAIDPLMRRAAKTINFGVLYGMSAFRLSQELGIPYEEASAFIQKYFQSYPKVKAWIEKTLEEGRTRGYVETLFGRRRYVPDLNARVKGKREAAERMAFNMPVQGTAADLMKLAMVRLFPQLREVGARMLLQVHDELLLEAPKERAEEVAALAKTVMEGVWPLAVPLEVEVGIGEDWLAAKG

SEQ ID NO: 3047 - DNA, 2529 bp, synthetic construct
  misc_feature 1..2529: note = Variant of DNA polymerase I from Thermus sp. strain 2.9
  source 1..2529: mol_type = other DNA
atgcaccatcatcatcatcatggcggtagcggcgtgttaccggtgttcgagcctaaaggtcgcgtgcttctggttgatggccatcatctcgcgtatcgtaacttctttgccctgaaaggattaaccaccagctcgggcgagccggtacagggtgtctacggctttgcaaagtcgctcctgaaagctctgaaagaagacggtgatgtggtgattgttgtctttgatgcgaaagcgccaagttttcgccacgaagcgtacgaagcttacaaagccgggcgtgctccaacgccggaagactttcctcgccaattggcgcttatgaaggaattagtggatttgcttggcctcgaacgcttggaagttcccggtttcgaggcagacgacgtattagcgactctcgcaaagaaagccgaacgtgagggctatgaagtccagatcttgacagcagatcgcgatcttttccagcttttatctccgcgcatctcggtgttacacccggaagggcatcgtatcaccccggaatggctctgggagaaatatggtttgcgtcccgaacaatgggtggattttcgcgccttagcaggcgatccgagcgacaatattccgggagttaaaggtatcggcgagaagacggcgctcaagctccttaaagaatgggggtcgttggagaacttgcttaagaatttagatcaggtcaaaccagagtcagtgcgtgagaagattcttgctcacctcgaagacctcaaattaagccgcgaattgtcccgtgtacgcaccgatttgccgctcgaagttgatttccgtcgccgccgcgaacctgactgggagggtcttaaagcgtttttagagcgtcttgaatttggttcgctcttgcatgaattcggccttttagaaagcccgttaccagccgaagaagcaccttggccaccgccccaaggcgcgtttttaggttaccgtttgagtcgcccggaaccgatgtgggccgaattactggctcttgcagcgtctgcccagggacgtgtgtatcgcgcggaagaccctcatggtgcgctccgcggcctcttcgaagtccgtggactccttgccaaagacttagctgttgttgcattgcgcgaaggtcttgatttacctccgactgatgatccaatgcttcttgcgtacctcttggacccgtcaaacacgacgcccgaaggcgtagcccgtcgttacggcggcgagtggaccgaagatgcagcgaaacgcgcgttattggccgaacgtttgcacgaaaatttattaggacgtttgcaaggcgaggaacgtctcctctggctttacgaagaagtggagaaaccattgagtcgcgtgctcgcgcatatggaagctaccggtgtcaaattagacgtggcgtatttggaggctctcagccttgaagttgctgcccacatgcgccgcttggaggaagaagtattccgtttagcaggccattcctttcgccttaattctcgcgatcagttagaacgtgtgttgttcgatgaacttggtctccctcctatcggcaagacagagaagaccggtaaacgtagcacttcagcggcggttttagaagctcttcgcgaagtccatcccattgtggacaagatcttgcagtaccgcgaactcgcgaaattgaaaggcacctatattgaccgtcttccggcattagtccacccgaaaacgggacgcctccatacccgcttcaaccaaacagccacggcgaccggtcgtttgtcctcctctgatccaaaccttcagaatattccagtacgtaccccattgggccagaagatccgccgtgcgtttgtagctgaggagggttggcgtttagtggccctcgattatcgtcaaattgaattacgtgtccttgcccatctttctggcgatgagaacctcatccgcgtgtttcaggaaggcaaagacattcacactcaaacggcaagctggatgtttggattatcagctgaagcgatcgatcctttgatgcgtcgtgcagcgaagaccatcaatttcggtgttctctacggtatgagtgcctttcgtttgtcgcaggaattaggcattccctatgaagaagctgcggcgttcattcagaaatactttcaaagctatcccaaagttaaagcatggatcgagaagactctcgaagaaggccgcacacgtggttacgtagagaccttatttggacgtcgccgctatgttcccgatttaaacgctcgcgtgaaaggcaagcgtgaagccgccgaacgcatggcgttcaacatgcctgtacagggcacggcagctgacctcatgaaacttgcaatggtgcgcctttttccacaattgcgtgaagttggtgcccgcatgctcttgcaggtccacgatgaactcttgttagaagcgccaaaagagcgtgcggaagaggtggcagccctcgcgaaagaagttatggaaggcgtgtggcccttagcggtgcctcttgaagtcgaagttggtattggcgaggattggctggctgccaaaggataatga

SEQ ID NO: 3048 - protein, 841 aa, synthetic construct
  REGION 1..841: note = Variant of DNA polymerase I from Thermus sp. strain 2.9
MHHHHHHGGSGVLPVFEPKGRVLLVDGHHLAYRNFFALKGLTTSSGEPVQGVYGFAKSLLKALKEDGDVVIVVFDAKAPSFRHEAYEAYKAGRAPTPEDFPRQLALMKELVDLLGLERLEVPGFEADDVLATLAKKAEREGYEVQILTADRDLFQLLSPRISVLHPEGHRITPEWLWEKYGLRPEQWVDFRALAGDPSDNIPGVKGIGEKTALKLLKEWGSLENLLKNLDQVKPESVREKILAHLEDLKLSRELSRVRTDLPLEVDFRRRREPDWEGLKAFLERLEFGSLLHEFGLLESPLPAEEAPWPPPQGAFLGYRLSRPEPMWAELLALAASAQGRVYRAEDPHGALRGLFEVRGLLAKDLAVVALREGLDLPPTDDPMLLAYLLDPSNTTPEGVARRYGGEWTEDAAKRALLAERLHENLLGRLQGEERLLWLYEEVEKPLSRVLAHMEATGVKLDVAYLEALSLEVAAHMRRLEEEVFRLAGHSFRLNSRDQLERVLFDELGLPPIGKTEKTGKRSTSAAVLEALREVHPIVDKILQYRELAKLKGTYIDRLPALVHPKTGRLHTRFNQTATATGRLSSSDPNLQNIPVRTPLGQKIRRAFVAEEGWRLVALDYRQIELRVLAHLSGDENLIRVFQEGKDIHTQTASWMFGLSAEAIDPLMRRAAKTINFGVLYGMSAFRLSQELGIPYEEAAAFIQKYFQSYPKVKAWIEKTLEEGRTRGYVETLFGRRRYVPDLNARVKGKREAAERMAFNMPVQGTAADLMKLAMVRLFPQLREVGARMLLQVHDELLLEAPKERAEEVAALAKEVMEGVWPLAVPLEVEVGIGEDWLAAKG

SEQ ID NO: 3049 - DNA, 2529 bp, synthetic construct
  misc_feature 1..2529: note = Variant of DNA polymerase I from Thermus sp. strain 2.9
  source 1..2529: mol_type = other DNA
atgcaccatcatcatcatcatggcggtagcggcgtgttaccggtgttcgagcctaaaggtcgcgtgcttctggttgatggccatcatctcgcgtatcgtaacttctttgccctgaaaggattaaccaccagcctgggcgagccggtacagggtgtctacggctttgcaaagtcgctcctgaaagctctgaaagaagacggtgatgtggtgattgttgtctttgatgcgaaagcgccaagttttcgccacgaagcgtacgaagcttacaaagccgggcgtgctccaacgccggaagactttcctcgccaattggcgcttatgaaggaattagtggatttgcttggcctcgaacgcttggaagttcccggtttcgaggcagacgacgtattagcgactctcgcaaagaaagccgaacgtgagggctatgaagtccagatcttgacagcagatcgcgatcttttccagcttttatctccgcgcatctcggtgttacacccggaagggcatcgtatcaccccggaatggctctgggagaaatatggtttgcgtcccgaacaatgggtggattttcgcgccttagcaggcgatccgagcgacaatattccgggagttaaaggtatcggcgagaagacggcgctcaagctccttaaagaatgggggtcgttggagaacttgcttaagaatttagatcaggtcaaaccagagtcagtgcgtgagaagattcttgctcacctcgaagacctcaaattaagccgcgaattgtcccgtgtacgcaccgatttgccgctcgaagttgatttccagcgccgccgcgaacctgactgggagggtcttaaagcgtttttagagcgtcttgaatttggttcgctcttgcatgaattcggccttttagaaagcccgttactggccgaagaagcaccttggccaccgcccgagggcgcgtttttaggttaccgtttgagtcgcccggaaccgatgtgggccgaattactggctcttgcagcgtctgcccagggacgtgtgtatcgcgcggaagaccctcatggtgcgctccgcggcctcttcgaagtccgtggactccttgccaaagacttagctgttgttgcattgcgcgaaggtcttgatttacctccgactgatgatccaatgcttcttgcgtacctcttggacccgtcaaacacgacgcccgaaggcgtagcccgtcgttacggcggcgagtggaccgaagatgcagcgaaacgcgcgttattggccgaacgtttgcacgaaaatttattaggacgtttgcaaggcgaggaacgtctcctctggctttacgaagaagtggagaaaccattgagtcgcgtgctcgcgcatatggaagctaccggtgtcaaattagacgtggcgtatttggaggctctcagccttgaagttgctgcccacatgcgccgcttggaggaagaagtattccgtttagcaggccactcctttcgccttagctctcgcgatcagttagaacgtgtgttgttcgatgaacttggtctccctcctatcggcaagacagagaagaccggtaaacgtagcacttcagccgcggttttagaagctcttcgcgaagtccatcccattgtggacaagatcttgcagtaccgcgaactcgcgaaattgaaaggcacctatattgaccgtcttccggcattagtccacccgaaaacgggacgcctccatacccgcttcaaccaaacagccacggcgaccggtcgtttgtcctcctctgatccaaaccttcagaatattccagtacgtaccccattgggccagaagatccgccgtgcgtttgtagctgaggagggttggcgtttagtggccctcgattatcgtcaaattgaattacgtgtccttgcccatctttctggcgatgagaacctcatccgcgtgtttcaggaaggcaaagacattcacactcaaacggcaagctggatgtttggattaagcgctgaagcgatcgatcctttgatgcgtcgtgcagcgaagaccatcaatttcggtgttctctacggtatgagtgcctttcgtttgtcgcaggaattaggcattccctatgaggaagcttcggcgttcattcagaaatactttcaaagctatcccaaagttaaagcatggatcgagaagactctcgaagaaggccgcacacgtggttacgtagagaccttatttggacgtcgccgctatgttcccgatttaaacgctcgcgtgaaaggcaagcgtgaagccgccgaacgcatggcgttcaacatgcctgtacagggcacggcagctgacctcatgaaacttgcaatggtgcgcctttttccacaattgcgtgaagttggtgcccgcatgctcttgcaggtccacgatgaactcttgttagaagcgccaaaagagcgtgcggaagaggtggcagccctcgcgaaagaagttatggaaggcgtgtggcccttagcggtgcctcttgaagtcgaagttggtattggcgaggattggctggctgccaaaggataatga

SEQ ID NO: 3050 - protein, 841 aa, synthetic construct
  REGION 1..841: note = Variant of DNA polymerase I from Thermus sp. strain 2.9
MHHHHHHGGSGVLPVFEPKGRVLLVDGHHLAYRNFFALKGLTTSLGEPVQGVYGFAKSLLKALKEDGDVVIVVFDAKAPSFRHEAYEAYKAGRAPTPEDFPRQLALMKELVDLLGLERLEVPGFEADDVLATLAKKAEREGYEVQILTADRDLFQLLSPRISVLHPEGHRITPEWLWEKYGLRPEQWVDFRALAGDPSDNIPGVKGIGEKTALKLLKEWGSLENLLKNLDQVKPESVREKILAHLEDLKLSRELSRVRTDLPLEVDFQRRREPDWEGLKAFLERLEFGSLLHEFGLLESPLLAEEAPWPPPEGAFLGYRLSRPEPMWAELLALAASAQGRVYRAEDPHGALRGLFEVRGLLAKDLAVVALREGLDLPPTDDPMLLAYLLDPSNTTPEGVARRYGGEWTEDAAKRALLAERLHENLLGRLQGEERLLWLYEEVEKPLSRVLAHMEATGVKLDVAYLEALSLEVAAHMRRLEEEVFRLAGHSFRLSSRDQLERVLFDELGLPPIGKTEKTGKRSTSAAVLEALREVHPIVDKILQYRELAKLKGTYIDRLPALVHPKTGRLHTRFNQTATATGRLSSSDPNLQNIPVRTPLGQKIRRAFVAEEGWRLVALDYRQIELRVLAHLSGDENLIRVFQEGKDIHTQTASWMFGLSAEAIDPLMRRAAKTINFGVLYGMSAFRLSQELGIPYEEASAFIQKYFQSYPKVKAWIEKTLEEGRTRGYVETLFGRRRYVPDLNARVKGKREAAERMAFNMPVQGTAADLMKLAMVRLFPQLREVGARMLLQVHDELLLEAPKERAEEVAALAKEVMEGVWPLAVPLEVEVGIGEDWLAAKG

SEQ ID NO: 3051 - DNA, 2529 bp, synthetic construct
  misc_feature 1..2529: note = Variant of DNA polymerase I from Thermus sp. strain 2.9
  source 1..2529: mol_type = other DNA
atgcaccatcatcatcatcatggcggtagcggcgtgttaccggtgttcgagcctaaaggtcgcgtgcttctggttgatggccatcatctcgcgtatcgtaacttctttgccctgaaaggattaaccaccagctcgggcgagccggtacagggtgtctacggctttgcaaagtcgctcctgaaagctctgaaagaagacggtgatgtggtgattgttgtctttgatgcgaaagcgccaagttttcgccacgaagcgtacgaagcttacaaagccgggcgtgctccaacgccggaagactttcctcgccaattggcgcttatgaaggaattagtggatttgcttggcctcgaacgcttggaagttcccggtttcgaggcagacgacgtattagcgactctcgcaaagaaagccgaacgtgagggctatgaagtccagatcttgacagcagatcgcgatcttttccagcttttatctccgcgcatctcggtgttacacccggaagggcatcgtatcaccccggaatggctctgggagaaatatggtttgcgtcccgaacaatgggtggattttcgcgccttagcaggcgatccgagcgacaatattccgggagttaaaggtatcggcgagaagacggcgctcaagctccttaaagaatgggggtcgttggagaacttgcttaagaatttagatcaggtcaaaccagagtcagtgcgtgagaagattcttgctcacctcgaagacctcaaattaagccgcgaattgtcccgtgtacgcaccgatttgccgctcgaagttgatttccgtcgccgccgcgaacctgactgggagggtcttaaagcgtttttagagcgtcttgaatttggttcgctcttgcatgaattcggccttttagaaagcccgttaccggccgaagaagcaccttggccaccgcccgagggcgcgtttttaggttaccgtttgagtcgcccggaaccgatgtgggccgaattactggctcttgcagcgtctgcccagggacgtgtgtatcgcgcggaagaccctcatggtgcgctccgcggcctcttcgaagtccgtggactccttgccaaagacttagctgttgttgcattgcgcgaaggtcttgatttacctccgactgatgatccaatgcttcttgcgtacctcttggacccgtcaaacacgacgcccgaaggcgtagcccgtcgttacggcggcgagtggaccgaagatgcagcgaaacgcgcgttattggccgaacgtttgcacgaaaatttattaggacgtttgcaaggcgaggaacgtctcctctggctttacgaagaagtggagaaaccattgagtcgcgtgctcgcgcatatggaagctaccggtgtcaaattagacgtggcgtatttggaggctctcagccttgaagttgctgcccacatgcgccgcttggaggaagaagtattccgtttagcaggccactcctttcgccttagctctcgcgatcagttagaacgtgtgttgttcgatgaacttggtctccctcctatcggcaagacagagaagaccggtaaacgtagcacttcagcggcggttttagaagctcttcgcgaagtccatcccattgtggacaagatcttgcaataccgcgaactcgcgaaattgaaaggcacctatattgaccgtcttccggcattagtccacccgaaaacgggacgcctccatacccgcttcaaccaaacagccacggcgaccggtcgtttgtcctcctctgatccaaaccttcagaatattccagtacgtaccccattgggccagaagatccgccgtgcgtttgtagctgaggagggttggcgtttagtggccctcgattatagccaaattgaattacgtgtccttgcccatctttctggcgatgagaacctcatccgcgtgtttcaggaaggcaaagacattcacactcaaacggcaagctggatgtttggattatcagctgaagcgatcgatcctttgatgcgtcgtgcagcgaagaccatcaatttcggtgttctctacggtatgagtgcctttcgtttgtcgcaggaattaggcattccctatgaagaagctgcggcgttcattcagaaatactttcaaagctatcccaaagttaaagcatggatcgagaagactctcgaagaaggccgcacacgtggttacgtagagaccttatttggacgtcgccgctatgttcccgatttaaacgctcgcgtgaaaggcaagcgtgaagccgccgaacgcatggcgttcaacatgcctgtacagggcacggcagctgacctcatgaaacttgcaatggtgcgcctttttccacaattgcgtgaagttggtgcccgcatgctcttgcaggtccacgatgaactcttgttagaagcgccaaaagagcgtgcggaagaggtggcagccctcgcgaaagaagttatggaaggcgtgtggcccttagcggtgcctcttgaagtcgaagttggtattggcgaggattggctggctgccaaaggataatga

SEQ ID NO: 3052 - protein, 841 aa, synthetic construct
  REGION 1..841: note = Variant of DNA polymerase I from Thermus sp. strain 2.9
MHHHHHHGGSGVLPVFEPKGRVLLVDGHHLAYRNFFALKGLTTSSGEPVQGVYGFAKSLLKALKEDGDVVIVVFDAKAPSFRHEAYEAYKAGRAPTPEDFPRQLALMKELVDLLGLERLEVPGFEADDVLATLAKKAEREGYEVQILTADRDLFQLLSPRISVLHPEGHRITPEWLWEKYGLRPEQWVDFRALAGDPSDNIPGVKGIGEKTALKLLKEWGSLENLLKNLDQVKPESVREKILAHLEDLKLSRELSRVRTDLPLEVDFRRRREPDWEGLKAFLERLEFGSLLHEFGLLESPLPAEEAPWPPPEGAFLGYRLSRPEPMWAELLALAASAQGRVYRAEDPHGALRGLFEVRGLLAKDLAVVALREGLDLPPTDDPMLLAYLLDPSNTTPEGVARRYGGEWTEDAAKRALLAERLHENLLGRLQGEERLLWLYEEVEKPLSRVLAHMEATGVKLDVAYLEALSLEVAAHMRRLEEEVFRLAGHSFRLSSRDQLERVLFDELGLPPIGKTEKTGKRSTSAAVLEALREVHPIVDKILQYRELAKLKGTYIDRLPALVHPKTGRLHTRFNQTATATGRLSSSDPNLQNIPVRTPLGQKIRRAFVAEEGWRLVALDYSQIELRVLAHLSGDENLIRVFQEGKDIHTQTASWMFGLSAEAIDPLMRRAAKTINFGVLYGMSAFRLSQELGIPYEEAAAFIQKYFQSYPKVKAWIEKTLEEGRTRGYVETLFGRRRYVPDLNARVKGKREAAERMAFNMPVQGTAADLMKLAMVRLFPQLREVGARMLLQVHDELLLEAPKERAEEVAALAKEVMEGVWPLAVPLEVEVGIGEDWLAAKG

SEQ ID NO: 3053 - DNA, 2529 bp, synthetic construct
  misc_feature 1..2529: note = Variant of DNA polymerase I from Thermus sp. strain 2.9
  source 1..2529: mol_type = other DNA
atgcaccatcatcatcatcatggcggtagcggcgtgttaccggtgttcgagcctaaaggtcgcgtgcttctggttgatggccatcatctcgcgtatcgtaacttctttgccctgaaaggattaaccaccagctcgggcgagccggtacagggtgtctacggctttgcaaagtcgctcctgaaagctctgaaagaagacggtgatgtggtgattgttgtctttgatgcgaaagcgccaagttttcgccacgaagcgtacgaagcttacaaagccgggcgtgctccaacgccggaagactttcctcgccaattggcgcttatgaaggaattagtggatttgcttggcctcgaacgcttggaagttcccggtttcgaggcagacgacgtattagcgactctcgcaaagaaagccgaacgtgagggctatgaagtccagatcttgacagcagatcgcgatcttttccagcttttatctccgcgcatctcggtgttacacccggaagggcatcgtatcaccccggaatggctctgggagaaatatggtttgcgtcccgaacaatgggtggattttcgcgccttagcaggcgatccgagcgacaatattccgggagttaaaggtatcggcgagaagacggcgctcaagctccttaaagaatgggggtcgttggagaacttgcttgaaaatttagatcaggtcaaaccagagtcagtgcgtgagaagattcttgctcacctcgaagacctcaaattaagccgcgaattgtcccgtgtacgcaccgatttgccgctcgaagttgatttcggtcgccgccgcgaacctgactgggagggtcttaaagcgtttttagagcgtcttgaatttggttcgctcttgcatgaattcggccttttagaaagcccgttaccagccgaagaagcaccttggccaccgcccgagggcgcgtttttaggttaccgtttgagtcgcccggaaccgatgtgggccgaattactggctcttgcagcgtctgcccagggacgtgtgtatcgcgcggaagaccctcatggtgcgctccgcggcctcttcgaagtccgtggactccttgccaaagacttagctgttgttgcattgcgcgaaggtcttgatttacctccgactgatgatccaatgcttcttgcgtacctcttggacccgtcaaacacgacgcccgaaggcgtagcccgtcgttacggcggcgagtggaccgaagatgcagcgaaacgcgcgttattggccgaacgtttgcacgaaaatttattaggacgtttgcaaggcgaggaacgtctcctctggctttacgaagaagtggagaaaccattgagtcgcgtgctcgcgcatatggaagctaccggtgtcaaattagacgtggcgtatttggaggctctcagccttgaagttgctgcccacatgcgccgcttggaggaagaagtattccgtttagcaggccattcctttcgccttaattctcgcgatcagttagaacgtgtgttgttcgatgaacttggtctccctcctatcggcaagacagagaagaccggtaaacgtagcacttcagcggcggttttagaagctcttcgcgaagtccatcccattgtggacaagatcttgcaataccgcgaactcgcgaaattgaaaggcacctatattgaccgtcttccggcattagtccacccgaaaacgggacgcctccatacccgcttcaaccaaacagccacggcgaccggtcgtttgtcctcctctgatccaaaccttcagaatattccagtacgtaccccattgggccagaagatccgccgtgcgtttgtagctgaggagggttggcgtttagtggccctcgattatcgtcaaattgaattacgtgtccttgcccatctttctggcgatgagaacctcatccgcgtgtttcaggaaggcaaagacattcacactcaaacggcaagctggatgtttggattatcagctgaagcgatcgatcctttgatgcgtcgtgcagcgaagaccatcaatttcggtgttctctacggtatgagtgcctttcgtttgtcgcaggaattaggcattccctatgaagaagctgcggcgttcattcagaaatactttcaaagctatcccaaagttaaagcatggatcgagaagactctcgaagaaggccgcacacgtggttacgtagagaccttatttggacgtcgccgctatgttcccgatttaaacgctcgcgtgaaaggcaagcgtgaagccgccgaacgcatggcgttcaacatgcctgtacagggcacggcagctgacctcatgaaacttgcaatggtgcgcctttttccacaattgcgtgaagttggtgcccgcatgctcttgcaggtccacgatgaactcttgttagaagcgccaaaagagcgtgcggaagaggtggcagccctcgcgaaagaagttatggaaggcgtgtggcccttagcggtgcctcttgaagtcgaagttggtattggcgaggattggctggctgccaaaggataatga

SEQ ID NO: 3054 - protein, 841 aa, synthetic construct
  REGION 1..841: note = Variant of DNA polymerase I from Thermus sp. strain 2.9
MHHHHHHGGSGVLPVFEPKGRVLLVDGHHLAYRNFFALKGLTTSSGEPVQGVYGFAKSLLKALKEDGDVVIVVFDAKAPSFRHEAYEAYKAGRAPTPEDFPRQLALMKELVDLLGLERLEVPGFEADDVLATLAKKAEREGYEVQILTADRDLFQLLSPRISVLHPEGHRITPEWLWEKYGLRPEQWVDFRALAGDPSDNIPGVKGIGEKTALKLLKEWGSLENLLENLDQVKPESVREKILAHLEDLKLSRELSRVRTDLPLEVDFGRRREPDWEGLKAFLERLEFGSLLHEFGLLESPLPAEEAPWPPPEGAFLGYRLSRPEPMWAELLALAASAQGRVYRAEDPHGALRGLFEVRGLLAKDLAVVALREGLDLPPTDDPMLLAYLLDPSNTTPEGVARRYGGEWTEDAAKRALLAERLHENLLGRLQGEERLLWLYEEVEKPLSRVLAHMEATGVKLDVAYLEALSLEVAAHMRRLEEEVFRLAGHSFRLNSRDQLERVLFDELGLPPIGKTEKTGKRSTSAAVLEALREVHPIVDKILQYRELAKLKGTYIDRLPALVHPKTGRLHTRFNQTATATGRLSSSDPNLQNIPVRTPLGQKIRRAFVAEEGWRLVALDYRQIELRVLAHLSGDENLIRVFQEGKDIHTQTASWMFGLSAEAIDPLMRRAAKTINFGVLYGMSAFRLSQELGIPYEEAAAFIQKYFQSYPKVKAWIEKTLEEGRTRGYVETLFGRRRYVPDLNARVKGKREAAERMAFNMPVQGTAADLMKLAMVRLFPQLREVGARMLLQVHDELLLEAPKERAEEVAALAKEVMEGVWPLAVPLEVEVGIGEDWLAAKG

SEQ ID NO: 3055 - DNA, 2529 bp, synthetic construct
  misc_feature 1..2529: note = Variant of DNA polymerase I from Thermus sp. strain 2.9
  source 1..2529: mol_type = other DNA
atgcaccatcatcatcatcatggcggtagcggcgtgttaccggtgttcgagcctaaaggtcgcgtgcttctggttgatggccatcatctcgcgtatcgtaacttctttgccctgaaaggattaaccaccagcagcggcgagccggtacagggtgtctacggctttgcaaagtcgctcctgaaagctctgaaagaagacggtgatgtggtgattgttgtctttgatgcgaaagcgccaagttttcgccacgaagcgtacgaagcttacaaagccgggcgtgctccaacgccggaagactttcctcgccaattggcgcttatgaaggaattagtggatttgcttggcctcgaacgcttggaagttcccggtttcgaggcagacgacgtattagcgactctcgcaaagaaagccgaacgtgagggctatgaagtccagatcttgacagcagatcgcgatcttttccagcttttatctccgcgcatctcggtgttacacccggaagggcatcgtatcaccccggaatggctctgggagaaatatggtttgcgtcccgaacaatgggtggattttcgcgccttagcaggcgatccgagcgacaatattccgggagttaaaggtatcggcgagaagacggcgctcaagctccttaaagaatgggggtcgttggagaacttgcttaagaatttagatcaggtcaaaccagagtcagtgcgtgagaagattcttgctcacctcgaagacctcaaattaagccgcgaattgtcccgtgtacgcaccgatttgccgctcgaagttgatttccgtcgccgccgcgaacctgactgggagggtcttaaagcgtttttagagcgtcttgaatttggttcgctcttgcatgaattcggccttttagaaagcccgttactggccgaagaagcaccttggccaccgcccgagggcgcgtttttaggttaccgtttgagtcgcccggaaccgatgtgggccgaattactggctcttgcagcgtctgcccagggacgtgtgtatcgcgcggaagaccctcatggtgcgctccgcggcctcttcgaagtccgcggactccttgccaaagacttagctgttgttgcattgcgcgaaggtcttgatttacctccgactgatgatccaatgcttcttgcgtacctcttggacccgtcaaacacgacgcccgaaggcgtagcccgtcgttacggcggcgagtggaccgaagatgcagcgaaacgcgcgttattggccgaacgtttgcacgaaaatttattaggacgtttgcaaggcgaggaacgtctcctctggctttacgaagaagtggagaaaccattgagtcgcgtgctcgcgcatatggaagctaccggtgtcaaattagacgtggcgtatttggaggctctcagccttgaagttgctgcccacatgcgccgcttggaggaagaagtattccgtttagcaggccattcctttcgccttaattctcgcgatcagttagaacgtgtgttgttcgatgaacttggtctccctcctatcggcaagacagagaagaccggtaaacgtagcacttcagcggcggttttagaagctcttcgcgaagtccatcccattgtggacaagatcttgcagtaccgcgaactcgcgaaattgaaaggcacctatattgaccgtcttccggcattagtccacccgaaaacgggacgcctccatacccgcttcaaccaaacagccacggcgaccggtcgtttgtcctcctctgatccaaaccttcagaatattccagtacgtaccccattgggccagaagatccgcaaagcgtttgtagctgaggagggttggcgtttagtggccctcgattatcgtcaaattgaattacgtgtccttgcccatctttctggcgatgagaacctcatccgcgtgtttcaggaaggcaaagacattcacactcaaacggcaagctggatgtttggattatcagctgaagcgatcgatcctttgatgcgtcgtgcagcgaagaccatcaatttcggtgttctctacggtatgagtgcctttcgtttgtcgcaggaattaggcattccctatgaagaagctgcggcgttcattcagaaatactttcaaagctatcccaaagttaaagcatggatcgagaagactctcgaagaaggccgcacacgtggttacgtagagaccttatttggacgtcgccgctatgttcccgatttaaacgctcgcgtgaaaggcaagcgtgaagccgccgaacgcatggcgttcaacatgcctgtacagggcacggcagctgacctcatgaaacttgcaatggtgcgcctttttccacaattgcgtgaagttggtgcccgcatgctcttgcaggtccacgatgaactcttgttagaagcgccaaaagagcgtgcggaagaggtggcagccctcgcgaaagaagttatggaaggcgtgtggcccttagcggtgcctcttgaagtcgaagttggtattggcgaggattggctggctgccaaaggataatga

SEQ ID NO: 3056 - protein, 841 aa, synthetic construct
  REGION 1..841: note = Variant of DNA polymerase I from Thermus sp. strain 2.9
MHHHHHHGGSGVLPVFEPKGRVLLVDGHHLAYRNFFALKGLTTSSGEPVQGVYGFAKSLLKALKEDGDVVIVVFDAKAPSFRHEAYEAYKAGRAPTPEDFPRQLALMKELVDLLGLERLEVPGFEADDVLATLAKKAEREGYEVQILTADRDLFQLLSPRISVLHPEGHRITPEWLWEKYGLRPEQWVDFRALAGDPSDNIPGVKGIGEKTALKLLKEWGSLENLLKNLDQVKPESVREKILAHLEDLKLSRELSRVRTDLPLEVDFRRRREPDWEGLKAFLERLEFGSLLHEFGLLESPLLAEEAPWPPPEGAFLGYRLSRPEPMWAELLALAASAQGRVYRAEDPHGALRGLFEVRGLLAKDLAVVALREGLDLPPTDDPMLLAYLLDPSNTTPEGVARRYGGEWTEDAAKRALLAERLHENLLGRLQGEERLLWLYEEVEKPLSRVLAHMEATGVKLDVAYLEALSLEVAAHMRRLEEEVFRLAGHSFRLNSRDQLERVLFDELGLPPIGKTEKTGKRSTSAAVLEALREVHPIVDKILQYRELAKLKGTYIDRLPALVHPKTGRLHTRFNQTATATGRLSSSDPNLQNIPVRTPLGQKIRKAFVAEEGWRLVALDYRQIELRVLAHLSGDENLIRVFQEGKDIHTQTASWMFGLSAEAIDPLMRRAAKTINFGVLYGMSAFRLSQELGIPYEEAAAFIQKYFQSYPKVKAWIEKTLEEGRTRGYVETLFGRRRYVPDLNARVKGKREAAERMAFNMPVQGTAADLMKLAMVRLFPQLREVGARMLLQVHDELLLEAPKERAEEVAALAKEVMEGVWPLAVPLEVEVGIGEDWLAAKG

SEQ ID NO: 3057 - DNA, 2529 bp, synthetic construct
  misc_feature 1..2529: note = Variant of DNA polymerase I from Thermus sp. strain 2.9
  source 1..2529: mol_type = other DNA
atgcaccatcatcatcatcatggcggtagcggcgtgttaccggtgttcgagcctaaaggtcgcgtgcttctggttgatggccatcatctcgcgtatcgtaacttctttgccctgaaaggattaaccaccagcagcggcgagccggtacagggtgtctacggctttgcaaagtcgctcctgaaagctctgaaagaagacggtgatgtggtgattgttgtctttgatgcgaaagcgccaagttttcgccacgaagcgtacgaagcttacaaagccgggcgtgctccaacgccggaagactttcctcgccaattggcgcttatgaaggaattagtggatttgcttggcctcgaacgcttggaagttcccggtttcgaggcagacgacgtattagcgactctcgcaaagaaagccgaacgtgagggctatgaagtccagatcttgacagcagatcgcgatcttttccagcttttatctccgcgcatctcggtgttacacccggaagggcatcgtatcaccccggaatggctctgggagaaatatggtttgcgtcccgaacaatgggtggattttcgcgccttagcaggcgatccgagcgacaatattccgggagttaaaggtatcggcgagaagacggcgctcaagctccttaaagaatgggggtcgttggagaacttgcttaagaatttagatcaggtcaaaccagagtcagtgcgtgagaagattcttgctcacctcgaagacctcaaattaagccgcgaattgtcccgtgtacgcaccgatttgccgctcgaagttgatttccgtcgccgccgcgaacctgactgggagggtcttaaagcgtttttagagcgtcttgaatttggttcgctcttgcatgaattcggccttttagaaagcccgttaccagccgaagaagcaccttggccaccgcccgagggcgcgtttttaggttaccgtttgagtcgcccggaaccgatgtgggccgaattactggctcttgcagcgtctgcccagggacgtgtgtatcgcgcggaagaccctcatggtgcgctccgcggcctcttcgaagtccgtggactccttgccaaagacttagctgttgttgcattgcgcgaaggtcttgatttacctccgactgatgatccaatgcttcttgcgtacctcttggacccgtcaaacacgacgcccgaaggcgtagcccgtcgttacggcggcgagtggaccgaagatgcagcgaaacgcgcgttattggccgaacgtttgcacgccaatttattaggacgtttgcaaggcgaggaacgtctcctctggctttacgaagaagtggagaaaccattgagtcgcgtgctcgggcatatggaagctaccggtgtcaaattagacgtggcgtatttggaggctctcagccttgaagttgctgcccacatgcgccgcttggaggaagaagtattccgtttagcaggccattcctttcgccttaattctcgcgatcagttagaacgtgtgttgttcgatgaacttggtctccgtcctatcggcaagacagagaagaccggtaaacgtagcacttcagcggcggttttagaagctcttcgcgaagtccatcccattgtggacaagatcttgcagtaccgcgaactcgcgaaattgaaaggcacctatattgaccgtcttccggcattagtccacccgaaaacgggacgcctccatacccgcttcaaccaaacagccacggcgaccggtcgtttgtcctcctctgatccaaaccttcagaatattccagtacgtaccccattgggccagaagatccgccgtgcgtttgtagctgaggagggttggcgtttagtggccctcgattatagccaaattgaattacgtgtccttgcccatctttctggcgatgagaacctcatccgcgtgtttcaggaaggcaaagacattcacactcaaacggcaagctggatgtttggattatcagctgaagcgatcgatcctttgatgcgtcgtgcagcgaagaccatcaatttcggtgttctctacggtatgagtgcctttcgtttgtcgcaggaattaggcattccctatgaagaagctgcggcgttcattcagaaatactttcaaagctatcccaaagttaaagcatggatcgagaagactctcgaagaaggccgcacacgtggttacgtagagaccttatttggacgtcgccgctatgttcccgatttaaacgctcgcgtgaaaggcaagcgtgaagccgccgaacgcatggcgttcaacatgcctgtacagggcacggcagctgacctcatgaaacttgcaatggtgcgcctttttccacaattgcgtgaagttggtgcccgcatgctcttgcaggtccacgatgaactcttgttagaagcgccaaaagagcgtgcggaagaggtggcagccctcgcgaaagaagttatggaaggcgtgtggcccttagcggtgcctcttgaagtcgaagttggtattggcgaggattggctggctgccaaaggataatga

SEQ ID NO: 3058 - protein, 841 aa, synthetic construct
  REGION 1..841: note = Variant of DNA polymerase I from Thermus sp. strain 2.9
MHHHHHHGGSGVLPVFEPKGRVLLVDGHHLAYRNFFALKGLTTSSGEPVQGVYGFAKSLLKALKEDGDVVIVVFDAKAPSFRHEAYEAYKAGRAPTPEDFPRQLALMKELVDLLGLERLEVPGFEADDVLATLAKKAEREGYEVQILTADRDLFQLLSPRISVLHPEGHRITPEWLWEKYGLRPEQWVDFRALAGDPSDNIPGVKGIGEKTALKLLKEWGSLENLLKNLDQVKPESVREKILAHLEDLKLSRELSRVRTDLPLEVDFRRRREPDWEGLKAFLERLEFGSLLHEFGLLESPLPAEEAPWPPPEGAFLGYRLSRPEPMWAELLALAASAQGRVYRAEDPHGALRGLFEVRGLLAKDLAVVALREGLDLPPTDDPMLLAYLLDPSNTTPEGVARRYGGEWTEDAAKRALLAERLHANLLGRLQGEERLLWLYEEVEKPLSRVLGHMEATGVKLDVAYLEALSLEVAAHMRRLEEEVFRLAGHSFRLNSRDQLERVLFDELGLRPIGKTEKTGKRSTSAAVLEALREVHPIVDKILQYRELAKLKGTYIDRLPALVHPKTGRLHTRFNQTATATGRLSSSDPNLQNIPVRTPLGQKIRRAFVAEEGWRLVALDYSQIELRVLAHLSGDENLIRVFQEGKDIHTQTASWMFGLSAEAIDPLMRRAAKTINFGVLYGMSAFRLSQELGIPYEEAAAFIQKYFQSYPKVKAWIEKTLEEGRTRGYVETLFGRRRYVPDLNARVKGKREAAERMAFNMPVQGTAADLMKLAMVRLFPQLREVGARMLLQVHDELLLEAPKERAEEVAALAKEVMEGVWPLAVPLEVEVGIGEDWLAAKG

SEQ ID NO: 3059 - DNA, 2529 bp, synthetic construct
  misc_feature 1..2529: note = Variant of DNA polymerase I from Thermus sp. strain 2.9
  source 1..2529: mol_type = other DNA
atgcaccatcatcatcatcatggcggtagcggcgtgttaccggtgttcgagcctaaaggtcgcgtgcttctggttgatggccatcatctcgcgtatcgtaacttctttgccctgaaaggattaaccaccagctcgggcgagccggtacagggtgtctacggctttgcaaagtcgctcctgaaagctctgaaagaagacggtgatgtggtgattgttgtctttgatgcgaaagcgccaagttttcgccacgaagcgtacgaagcttacaaagccgggcgtgctccaacgccggaagactttcctcgccaattggcgcttatgaaggaattagtggatttgcttggcctcgaacgcttggaagttcccggtttcgaggcagacgacgtattagcgactctcgcaaagaaagccgaacgtgagggctatgaagtccagatcttgacagcagatcgcgatcttttccagcttttatctccgcgcatctcggtgttacacccggaagggcatcgtatcaccccggaatggctctgggagaaatatggtttgcgtcccgaacaatgggtggattttcgcgccttagcaggcgatccgagcgacaatattccgggagttaaaggtatcggcgagaagacggcgctcaagctccttaaagaatgggggtcgttggagaacttgcttaagaatttagatcaggtcaaaccagagtcagtgcgtgagaagattcttgctcacctcgaagacctcaaattaagccgcgaattgtcccgtgtacgcaccgatttgccgctcgaagttgatttcggtcgccgccgcgaacctgactgggagggtcttaaagcgtttttagagcgtcttgaatttggttcgctcttgcatgaattcggccttttagaaagcccgttaccagccgaagaagcaccttggccaccgcccgagggcgcgtttttaggttaccgtttgagtcgcccggaaccgatgtgggccgaattactggctcttgcagcgtctgcccagggacgtgtgtatcgcgcggaagaccctcatggtgcgctccgcggcctcttcgaagtccgtggactccttgccaaagacttagctgttgttgcattgcgcgaaggtcttgatttacctccgactgatgatccaatgcttcttgcgtacctcttggacccgtcaaacacgacgcccgaaggcgtagcccgtcgttacggcggcgagtggaccgaagatgcagcgaaacgcgcgttattggccgaacgtttgcacgaaaatttattaggacgtttgcaaggcgaggaacgtctcctctggctttacgaagaagtggagaaaccattgagtcgcgtgctcgcgcatatggaagctaccggtgtcaaattagacgtggcgtatttggaggctctcagccttgaagttgctgcccacatgcgccgcttggaggaagaagtattccgtttagcaggccattcctttcgccttaattctcgcgatcagttagaacgtgtgttgttcgatgaacttggtctccgtcctatcggcaagacagagaagaccggtaaacgtagcacttcagcggcggttttagaagctcttcgcgaagtccatcccattgtggacaagatcttgcagtaccgcgaactcgcgaaattgaaaggcacctatattgaccgtcttccggcattagtccacccgaaaacgggacgcctccatacccgcttcaaccaaacagccacggcgaccggtcgtttgtcctcctctgatccaaaccttcagaatattccagtacgtaccccattgggccagaagatccgcaaagcgtttgtagctgaggagggttggcgtttagtggccctcgattatagtcaaattgaattacgtgtccttgcccatctttctggcgatgagaacctcatccgcgtgtttcaggaaggcaaagacattcacactcaaacggcaagctggatgtttggattatcagctgaagcgatcgatcctttgatgcgtcgtgcagcgaagaccatcaatttcggtgttctctacggtatgagtgcctttcgtttgtcgcaggaattaggcattccctatgaagaagctgcggcgttcattcagaaatactttcaaagctatcccaaagttaaagcatggatcgagaagactctcgaagaaggccgcacacgtggttacgtagagaccttatttggacgtcgccgctatgttcccgatttaaacgctcgcgtgaaaggcaagcgtgaagccgccgaacgcatggcgttcaacatgcctgtacagggcacggcagctgacctcatgaaacttgcaatggtgcgcctttttccacaattgcgtgaagttggtgcccgcatgctcttgcaggtccacgatgaactcttgttagaagcgccaaaagagcgtgcggaagaggtggcagccctcgcgaaagaagttatggaaggcgtgtggcccttagcggtgcctcttgaagtcgaagttggtattggcgaggattggctggctgccaaaggataatga

SEQ ID NO: 3060 - protein, 841 aa, synthetic construct
  REGION 1..841: note = Variant of DNA polymerase I from Thermus sp. strain 2.9
MHHHHHHGGSGVLPVFEPKGRVLLVDGHHLAYRNFFALKGLTTSSGEPVQGVYGFAKSLLKALKEDGDVVIVVFDAKAPSFRHEAYEAYKAGRAPTPEDFPRQLALMKELVDLLGLERLEVPGFEADDVLATLAKKAEREGYEVQILTADRDLFQLLSPRISVLHPEGHRITPEWLWEKYGLRPEQWVDFRALAGDPSDNIPGVKGIGEKTALKLLKEWGSLENLLKNLDQVKPESVREKILAHLEDLKLSRELSRVRTDLPLEVDFGRRREPDWEGLKAFLERLEFGSLLHEFGLLESPLPAEEAPWPPPEGAFLGYRLSRPEPMWAELLALAASAQGRVYRAEDPHGALRGLFEVRGLLAKDLAVVALREGLDLPPTDDPMLLAYLLDPSNTTPEGVARRYGGEWTEDAAKRALLAERLHENLLGRLQGEERLLWLYEEVEKPLSRVLAHMEATGVKLDVAYLEALSLEVAAHMRRLEEEVFRLAGHSFRLNSRDQLERVLFDELGLRPIGKTEKTGKRSTSAAVLEALREVHPIVDKILQYRELAKLKGTYIDRLPALVHPKTGRLHTRFNQTATATGRLSSSDPNLQNIPVRTPLGQKIRKAFVAEEGWRLVALDYSQIELRVLAHLSGDENLIRVFQEGKDIHTQTASWMFGLSAEAIDPLMRRAAKTINFGVLYGMSAFRLSQELGIPYEEAAAFIQKYFQSYPKVKAWIEKTLEEGRTRGYVETLFGRRRYVPDLNARVKGKREAAERMAFNMPVQGTAADLMKLAMVRLFPQLREVGARMLLQVHDELLLEAPKERAEEVAALAKEVMEGVWPLAVPLEVEVGIGEDWLAAKG

SEQ ID NO: 3061 - DNA, 2529 bp, synthetic construct
  misc_feature 1..2529: note = Variant of DNA polymerase I from Thermus sp. strain 2.9
  source 1..2529: mol_type = other DNA
atgcaccatcatcatcatcatggcggtagcggcgtgttaccggtgttcgagcctaaaggtcgcgtgcttctggttgatggccatcatctcgcgtatcgtaacttctttgccctgaaaggattaaccaccagcagcggcgagccggtacagggtgtctacggctttgcaaagtcgctcctgaaagctctgaaagaagacggtgatgtggtgattgttgtctttgatgcgaaagcgccaagttttcgccacgaagcgtacgaagcttacaaagccgggcgtgctccaacgccggaagactttcctcgccaattggcgcttatgaaggaattagtggatttgcttggcctcgaacgcttggaagttcccggtttcgaggcagacgacgtattagcgactctcgcaaagaaagccgaacgtgagggctatgaagtccagatcttgacagcagatcgcgatcttttccagcttttatctccgcgcatctcggtgttacacccggaagggcatcgtatcaccccggaatggctctgggagaaatatggtttgcgtcccgaacaatgggtggattttcgcgccttagcaggcgatccgagcgacaatattccgggagttaaaggtatcggcgagaagacggcgctcaagctccttaaagaatgggggtcgttggagaacttgcttaagaatttagatcaggtcaaaccagagtcagtgcgtgagaagattcttgctcacctcgaagacctcaaattaagccgcgaattgtcccgtgtacgcaccgatttgccgctcgaagttgatttccgtcgccgccgcgaacctgactgggagggtcttaaagcgtttttagagcgtcttgaatttggttcgctcttgcatgaattcggccttttagaaagcccgttaccagccgaagaagcaccttggccaccgcccgagggcgcgtttttaggttaccgtttgagtcgcccggaaccgatgtgggccgaattactggctcttgcagcgtctgcccagggacgtgtgtatcgcgcggaagaccctcatggtgcgctccgcggcctcttcgaagtccgtggactccttgccaaagacttagctgttgttgcattgcgcgaaggtcttgatttacctccgactgatgatccaatgcttcttgcgtacctcttggacccgtcaaacacgacgcccgaaggcgtagcccgtcgttacggcggcgagtggaccgaagatgcagcgaaacgcgcgttattggccgaacgtttgcacgaaaatttattaggacgtttgcaaggcgaggaacgtctcctctggctttacgaagaagtggagaaaccattgagtcgcgtgctcgcgcatatggaagctaccggtgtcaaattagacgtggcgtatttggaggctctcagccttgaagttgctgcccacatgcgccgcttggaggaagaagtattccgtttagcaggccgctcctttcgccttagctctcgcgatcagttagaacgtgtgttgttcgatgaacttggtctccctcctatcggcaagacagagaagaccggtaaacgtagcacttcagcggcggttttagatgctcttcgcgaagtccatcccattgtggacaagatcttgcagtaccgcgaactcgcgaaattgaaaggcacctatattgaccgtcttccggcattagtccacccgaaaacgggacgcctccatacccgcttcaaccaaacagccacggcgaccggtcgtttgtcctcctctgatccaaaccttcagaatattccagtacgtaccccattgggccagaagatccgcaaagcgtttgtagctgaggagggttggcgtttagtggccctcgattatcgtcaaattgaattacgtgtccttgcccatctttctggcgatgagaacctcatccgcgtgtttcaggaaggcaaagacattcacactcaaacggcaagctggatgtttggattaagcgctgaagcgatcgatcctttgatgcgtcgtgcagcgaagaccatcaatttcggtgttctctacggtatgagtgcctttcgtttgtcgcaggaattaggcattccctatcaggaagctcaagcgttcattcagaaatactttcaaagctatcccaaagttaaagcatggatcgagaagactctcgaagaaggccgcacacgtggttacgtagagaccttatttggacgtcgccgctatgttcccgatttaaacgctcgcgtgaaaggcaagcgtgaagccgccgaacgcatggcgttcaacatgcctgtacagggcacggcagctgacctcatgaaacttgcaatggtgcgcctttttccacaattgcgtgaagttggtgcccgcatgctcttgcaggtccacgatgaactcttgttagaagcgccaaaagagcgtgcggaagaggtggcagccctcgcgaaagaagttatggaaggcgtgtggcccttagcggtgcctcttgaagtcgaagttggtattggcgaggattggctggctgccaaaggataatga

SEQ ID NO: 3062 - protein, 841 aa, synthetic construct
  REGION 1..841: note = Variant of DNA polymerase I from Thermus sp. strain 2.9
MHHHHHHGGSGVLPVFEPKGRVLLVDGHHLAYRNFFALKGLTTSSGEPVQGVYGFAKSLLKALKEDGDVVIVVFDAKAPSFRHEAYEAYKAGRAPTPEDFPRQLALMKELVDLLGLERLEVPGFEADDVLATLAKKAEREGYEVQILTADRDLFQLLSPRISVLHPEGHRITPEWLWEKYGLRPEQWVDFRALAGDPSDNIPGVKGIGEKTALKLLKEWGSLENLLKNLDQVKPESVREKILAHLEDLKLSRELSRVRTDLPLEVDFRRRREPDWEGLKAFLERLEFGSLLHEFGLLESPLPAEEAPWPPPEGAFLGYRLSRPEPMWAELLALAASAQGRVYRAEDPHGALRGLFEVRGLLAKDLAVVALREGLDLPPTDDPMLLAYLLDPSNTTPEGVARRYGGEWTEDAAKRALLAERLHENLLGRLQGEERLLWLYEEVEKPLSRVLAHMEATGVKLDVAYLEALSLEVAAHMRRLEEEVFRLAGRSFRLSSRDQLERVLFDELGLPPIGKTEKTGKRSTSAAVLDALREVHPIVDKILQYRELAKLKGTYIDRLPALVHPKTGRLHTRFNQTATATGRLSSSDPNLQNIPVRTPLGQKIRKAFVAEEGWRLVALDYRQIELRVLAHLSGDENLIRVFQEGKDIHTQTASWMFGLSAEAIDPLMRRAAKTINFGVLYGMSAFRLSQELGIPYQEAQAFIQKYFQSYPKVKAWIEKTLEEGRTRGYVETLFGRRRYVPDLNARVKGKREAAERMAFNMPVQGTAADLMKLAMVRLFPQLREVGARMLLQVHDELLLEAPKERAEEVAALAKEVMEGVWPLAVPLEVEVGIGEDWLAAKG

SEQ ID NO: 3063 - DNA, 2529 bp, synthetic construct
  misc_feature 1..2529: note = Variant of DNA polymerase I from Thermus sp. strain 2.9
  source 1..2529: mol_type = other DNA
atgcaccatcatcatcatcatggcggtagcggcgtgttaccggtgttcgagcctaaaggtcgcgtgcttctggttgatggccatcatctcgcgtatcgtaacttctttgccctgaaaggattaaccaccagcagcggcgagccggtacagggtgtctacggctttgcaaagtcgctcctgaaagctctgaaagaagacggtgatgtggtgattgttgtctttgatgcgaaagcgccaagttttcgccacgaagcgtacgaagcttacaaagccgggcgtgctccaacgccggaagactttcctcgccaattggcgcttatgaaggaattagtggatttgcttggcctcgaacgcttggaagttcccggtttcgaggcagacgacgtattagcgactctcgcaaagaaagccgaacgtgagggctatgaagtccagatcttgacagcagatcgcgatcttttccagcttttatctccgcgcatctcggtgttacacccggaagggcatcgtatcaccccggaatggctctgggagaaatatggtttgcgtcccgaacaatgggtggattttcgcgccttagcaggcgatccgagcgacaatattccgggagttaaaggtatcggcgagaagacggcgctcaagctccttaaagaatgggggtcgttggagaacttgcttaaaaatttagatcaggtcaaaccagagtcagtgcgtgagaagattcttgctcacctcgaagacctcaaattaagccgcgaattgtcccgtgtacgcaccgatttgccgctcgaagttgatttccagcgccgccgcgaacctgactgggagggtcttaaagcgtttttagagcgtcttgaatttggttcgctcttgcatgaattcggccttttagaaagcccgttaccggccgaagaagcaccttggccaccgcccgagggcgcgtttttaggttaccgtttgagtcgcccggaaccgatgtgggccgaattactggctcttgcagcgtctgcccagggaaccgtgtatcgcgcggaagaccctcatggtgcgctccgcggcctcttcgaagtccgtggactccttgccaaagacttagctgttgttgcattgcgcgaaggtcttgatttacctccgactgatgatccaatgcttcttgcgtacctcttggacccgtcaaacacgacgcccgaaggcgtagcccgtcgttacggcggcgagtggaccgaagatgcagcgaaacgcgcgttattggccgaacgtttgcacgaaaatttattaggacgtttgcaaggcgaggaacgtctcctctggctttacgaagaagtggacaaaccattgagtcgcgtgctcgcgcatatggaagctaccggtgtcaaattagacgtggcgtatttggaggctctcagccttgaagttgctgcccacatgcgccgcttggaggaagaagtattccgtttagcaggccattcctttcgccttaattctcgcgatcagttagaacgtgtgttgttcgatgaacttggtctccctcctatcggcaagacagagaagaccggtaaacgtagcacttcacgcgcggttttagaagctcttcgcgaagtccatcccattgtggacaagatcttgcagtaccgcgaactcgcgaaattgaaaggcacctatattgaccgtcttccggcattagtccacccgaaaacgggacgcctccatacccgcttcaaccaaacagccacggcgaccggtcgtttgtcctcctctgatccaaaccttcagaatattccagtacgtaccccattgggccagaagatccgccgcgcgtttgtagctgaggagggttggcgtttagtggccctcgattatcgtcaaattgaattacgtgtccttgcccatctttctggcgatgagaacctcatccgcgtgtttcaggaaggcaaagacattcacactcaaacggcaagctggatgtttggattaggcgctgaagcgatcgatcctttgatgcgtcgtgcagcgaagaccatcaatttcggtgttctctacggtatgagtgcctttcgtttgtcgcaggaattaggcattccctatgaagaagctgcggcgttcattcagaaatactttcaaagctatcccaaagttaaagcatggatcgagaagactctcgaagaaggccgcacacgtggttacgtagagaccttatttggacgtcgccgctatgttcccgatttaaacgctcgcgtgaaaggcaagcgtgaagccgccgaacgcatggcgttcaacatgcctgtacagggcacggcagctgacctcatgaaacttgcaatggtgcgcctttttccacaattgcgtgaagttggtgcccgcatgctcttgcaggtccacgatgaactcttgttagaagcgccaaaagagcgtgcggaagaggtggcagccctcgcgaaagaagttatggaaggcgtgtggcccttagcggtgcctcttgaagtcgaagttggtattggcgaggattggctggctgccaaaggataatga

SEQ ID NO: 3064 - protein, 841 aa, synthetic construct
  REGION 1..841: note = Variant of DNA polymerase I from Thermus sp. strain 2.9
MHHHHHHGGSGVLPVFEPKGRVLLVDGHHLAYRNFFALKGLTTSSGEPVQGVYGFAKSLLKALKEDGDVVIVVFDAKAPSFRHEAYEAYKAGRAPTPEDFPRQLALMKELVDLLGLERLEVPGFEADDVLATLAKKAEREGYEVQILTADRDLFQLLSPRISVLHPEGHRITPEWLWEKYGLRPEQWVDFRALAGDPSDNIPGVKGIGEKTALKLLKEWGSLENLLKNLDQVKPESVREKILAHLEDLKLSRELSRVRTDLPLEVDFQRRREPDWEGLKAFLERLEFGSLLHEFGLLESPLPAEEAPWPPPEGAFLGYRLSRPEPMWAELLALAASAQGTVYRAEDPHGALRGLFEVRGLLAKDLAVVALREGLDLPPTDDPMLLAYLLDPSNTTPEGVARRYGGEWTEDAAKRALLAERLHENLLGRLQGEERLLWLYEEVDKPLSRVLAHMEATGVKLDVAYLEALSLEVAAHMRRLEEEVFRLAGHSFRLNSRDQLERVLFDELGLPPIGKTEKTGKRSTSRAVLEALREVHPIVDKILQYRELAKLKGTYIDRLPALVHPKTGRLHTRFNQTATATGRLSSSDPNLQNIPVRTPLGQKIRRAFVAEEGWRLVALDYRQIELRVLAHLSGDENLIRVFQEGKDIHTQTASWMFGLGAEAIDPLMRRAAKTINFGVLYGMSAFRLSQELGIPYEEAAAFIQKYFQSYPKVKAWIEKTLEEGRTRGYVETLFGRRRYVPDLNARVKGKREAAERMAFNMPVQGTAADLMKLAMVRLFPQLREVGARMLLQVHDELLLEAPKERAEEVAALAKEVMEGVWPLAVPLEVEVGIGEDWLAAKG

SEQ ID NO: 3065 - DNA, 2529 bp, synthetic construct
  misc_feature 1..2529: note = Variant of DNA polymerase I from Thermus sp. strain 2.9
  source 1..2529: mol_type = other DNA
atgcaccatcatcatcatcatggcggtagcggcgtgttaccggtgttcgagcctaaaggtcgcgtgcttctggttgatggccatcatctcgcgtatcgtaacttctttgccctgaaaggattaaccaccagcagcggcgagccggtacagggtgtctacggctttgcaaagtcgctcctgaaagctctgaaagaagacggtgatgtggtgattgttgtctttgatgcgaaagcgccaagttttcgccacgaagcgtacgaagcttacaaagccgggcgtgctccaacgccggaagactttcctcgccaattggcgcttatgaaggaattagtggatttgcttggcctcgaacgcttggaagttcccggtttcgaggcagacgacgtattagcgactctcgcaaagaaagccgaacgtgagggctatgaagtccagatcttgacagcagatcgcgatcttttccagcttttatctccgcgcatctcggtgttacacccggaagggcatcgtatcaccccggaatggctctgggagaaatatggtttgcgtcccgaacaatgggtggattttcgcgccttagcaggcgatccgagcgacaatattccgggagttaaaggtatcggcgagaagacggcgctcaagctccttaaagaatgggggtcgttggagaacttgcttaagaatttagatcaggtcaaaccagagtcagtgcgtgagaagattcttgctcacctcgaagacctcaaattaagccgcgaattgtcccgtgtacgcaccgatttgccgctcgaagttgatttccagcgccgccgcgaacctgactgggagggtcttaaagcgtttttagagcgtcttgaatttggttcgctcttgcatgaattcggccttttagaaagcccgttaccagccgaagaagcaccttggccaccgcccgagggcgcgtttttaggttaccgtttgagtcgcccggaaccgatgtgggccgaattactggctcttgcagcgtctgcccagggacgtgtgtatcgcgcggaagaccctcatggtgcgctccgcggcctcttcgaagtccgtggactccttgccaaagacttagctgttgttgcattgcgcgaaggtcttgatttacctccgactgatgatccaatgcttcttgcgtacctcttggacccgtcaaacacgacgcccgaaggcgtagcccgtcgttacggcggcgagtggaccgaagatgcagcgaaacgcgcgttattggccgaacgtttgcacgccaatttattaggacgtttgcaaggcgaggaacgtctcctctggctttacgaagaagtggagaaaccattgagtcgcgtgctcgcgcatatggaagctaccggtgtcaaattagacgtggcgtatttggaggctctcagccttgaagttgctgcccacatgcgccgcttggaggaagaagtattccgtttagcaggccgttcctttcgccttagctctcgcgatcagttagaacgtgtgttgttcgatgaacttggtctccctcctatcggcaagacagagaagaccggtaaacgtagcacttcagcggcggttttagaagctcttcgcgaagtccatcccattgtggacaagatcttgcagtaccgcgaactcgcgaaattgaaaggcacctatattgaccgtcttccggcattagtccacccgaaaacgggacgcctccatacccgcttcaaccaaacagccacggcgaccggtcgtttgtcctcctctgatccaaaccttcagaatattccagtacgtaccccattgggccagaagatccgcaaagcgtttgtagctgaggagggttggcgtttagtggccctcgattatagccaaattgaattacgtgtccttgcccatctttctggcgatgagaacctcatccgcgtgtttcaggaaggcaaagacattcacactcaaacggcaagctggatgtttggattaagtgctgaagcgatcgatcctttgatgcgtcgtgcagcgaagaccatcaatttcggtgttctctacggtatgagtgcctttcgtttgtcgcaggaattaggcattccctatgaagaagctcaggcgttcattcagaaatactttcaaagctatcccaaagttaaagcatggatcgagaagactctcgaagaaggccgcacacgtggttacgtagagaccttatttggacgtcgccgctatgttcccgatttaaacgctcgcgtgaaaggcaagcgtgaagccgccgaacgcatggcgttcaacatgcctgtacagggcacggcagctgacctcatgaaacttgcaatggtgcgcctttttccacaattgcgtgaagttggtgcccgcatgctcttgcaggtccacgatgaactcttgttagaagcgccaaaagagcgtgcggaagaggtggcagccctcgcgaaagaagttatggaaggcgtgtggcccttagcggtgcctcttgaagtcgaagttggtattggcgaggattggctggctgccaaaggataatga

SEQ ID NO: 3066 - protein, 841 aa, synthetic construct
  REGION 1..841: note = Variant of DNA polymerase I from Thermus sp. strain 2.9
MHHHHHHGGSGVLPVFEPKGRVLLVDGHHLAYRNFFALKGLTTSSGEPVQGVYGFAKSLLKALKEDGDVVIVVFDAKAPSFRHEAYEAYKAGRAPTPEDFPRQLALMKELVDLLGLERLEVPGFEADDVLATLAKKAEREGYEVQILTADRDLFQLLSPRISVLHPEGHRITPEWLWEKYGLRPEQWVDFRALAGDPSDNIPGVKGIGEKTALKLLKEWGSLENLLKNLDQVKPESVREKILAHLEDLKLSRELSRVRTDLPLEVDFQRRREPDWEGLKAFLERLEFGSLLHEFGLLESPLPAEEAPWPPPEGAFLGYRLSRPEPMWAELLALAASAQGRVYRAEDPHGALRGLFEVRGLLAKDLAVVALREGLDLPPTDDPMLLAYLLDPSNTTPEGVARRYGGEWTEDAAKRALLAERLHANLLGRLQGEERLLWLYEEVEKPLSRVLAHMEATGVKLDVAYLEALSLEVAAHMRRLEEEVFRLAGRSFRLSSRDQLERVLFDELGLPPIGKTEKTGKRSTSAAVLEALREVHPIVDKILQYRELAKLKGTYIDRLPALVHPKTGRLHTRFNQTATATGRLSSSDPNLQNIPVRTPLGQKIRKAFVAEEGWRLVALDYSQIELRVLAHLSGDENLIRVFQEGKDIHTQTASWMFGLSAEAIDPLMRRAAKTINFGVLYGMSAFRLSQELGIPYEEAQAFIQKYFQSYPKVKAWIEKTLEEGRTRGYVETLFGRRRYVPDLNARVKGKREAAERMAFNMPVQGTAADLMKLAMVRLFPQLREVGARMLLQVHDELLLEAPKERAEEVAALAKEVMEGVWPLAVPLEVEVGIGEDWLAAKG

SEQ ID NO: 3067 - DNA, 2529 bp, synthetic construct
  misc_feature 1..2529: note = Variant of DNA polymerase I from Thermus sp. strain 2.9
  source 1..2529: mol_type = other DNA
atgcaccatcatcatcatcatggcggtagcggcgtgttaccggtgttcgagcctaaaggtcgcgtgcttctggttgatggccatcatctcgcgtatcgtaacttctttgccctgaaaggattaaccaccagcagcggcgagccggtacagggtgtctacggctttgcaaagtcgctcctgaaagctctgaaagaagacggtgatgtggtgattgttgtctttgatgcgaaagcgccaagttttcgccacgaagcgtacgaagcttacaaagccgggcgtgctccaacgccggaagactttcctcgccaattggcgcttatgaaggaattagtggatttgcttggcctcgaacgcttggaagttcccggtttcgaggcagacgacgtattagcgactctcgcaaagaaagccgaacgtgagggctatgaagtccagatcttgacagcagatcgcgatcttttccagcttttatctccgcgcatctcggtgttacacccggaagggcatcgtatcaccccggaatggctctgggagaaatatggtttgcgtcccgaacaatgggtggattttcgcgccttagcaggcgatccgagcgacaatattccgggagttaaaggtatcggcgagaagacggcgctcaagctccttaaagaatgggggtcgttggagaacttgcttaagaatttagatcaggtcaaaccagagtcagtgcgtgagaagattcttgctcacctcgaagacctcaaattaagccgcgaattgtcccgtgtacgcaccgatttgccgctcgaagttgatttccgtcgccgccgcgaacctgactgggagggtcttaaagcgtttttagagcgtcttgaatttggttcgctcttgcatgaattcggccttttagaaagcccgttaccagccgaagaagcaccttggccaccgcccgagggcgcgtttttaggttaccgtttgagtcgcccggaaccgatgtgggccgaattactggctcttgcagcgtctgcccagggacgtgtgtatcgcgcggaagaccctcatggtgcgctccgcggcctcttcgaagtccgtggactccttgccaaagacttagctgttgttgcattgcgcgaaggtcttgatttacctccgactgatgatccaatgcttcttgcgtacctcttggacccgtcaaacacgacgcccgaaggcgtagcccgtcgttacggcggcgagtggaccgaagatgcagcgaaacgcgcgttattggccgaacgtttgcacgccaatttattaggacgtttgcaaggcgaggaacgtctcctctggctttacgaagaagtggagaaaccattgagtcgcgtgctcgcgcatatggaagctaccggtgtcaaattagacgtggcgtatttggaggctctcagccttgaagttgctgcccacatgcgccgcttggaggaagaagtattccgtttagcaggccattcctttcgccttaattctcgcgatcagttagaacgtgtgttgttcgatgaacttggtctccctcctatcggcaagacagagaagaccggtaaacgtagcacttcagcggcggttttagaagctgttcgcgaagtccatcccattgtggacaagatcttgcagtaccgcgaactcgcgaaattgaaaggcacctatattgaccgtcttccggcattagtccacccgaaaacgggacgcctccatacccgcttcaaccaaacagccacggcgaccggtcgtttgtcctcctctgatccaaaccttcagaatattccagtacgtaccccattgggccagaagatccgccgtgcgtttgtagctgaggagggttggcgtttagtggccctcgattatagccaaattgaattacgtgtccttgcccatctttctggcgatgagaacctcatccgcgtgtttcaggaaggcaaagacattcacactcaaacggcaagctggatgtttggattatcagctgaagcgatcgatcctttgatgcgtcgtgcagcgaagaccatcaatttcggtgttctctacggtatgagtgcctttcgtttgtcgcaggaattaggcattccctatgaagaagctgcggcgttcattcagaaatactttcaaagctatcccaaagttaaagcatggatcgagaagactctcgaagaaggccgcacacgtggttacgtagagaccttatttggacgtcgccgctatgttcccgatttaaacgctcgcgtgaaaggcaagcgtgaagccgccgaacgcatggcgttcaacatgcctgtacagggcacggcagctgacctcatgaaacttgcaatggtgcgcctttttccacaattgcgtgaagttggtgcccgcatgctcttgcaggtccacgatgaactcttgttagaagcgccaaaagagcgtgcggaagaggtggcagccctcgcgaaagaagttatggaaggcgtgtggcccttagcggtgcctcttgaagtcgaagttggtattggcgaggattggctggctgccaaaggataatga

SEQ ID NO: 3068 - protein, 841 aa, synthetic construct
  REGION 1..841: note = Variant of DNA polymerase I from Thermus sp. strain 2.9
MHHHHHHGGSGVLPVFEPKGRVLLVDGHHLAYRNFFALKGLTTSSGEPVQGVYGFAKSLLKALKEDGDVVIVVFDAKAPSFRHEAYEAYKAGRAPTPEDFPRQLALMKELVDLLGLERLEVPGFEADDVLATLAKKAEREGYEVQILTADRDLFQLLSPRISVLHPEGHRITPEWLWEKYGLRPEQWVDFRALAGDPSDNIPGVKGIGEKTALKLLKEWGSLENLLKNLDQVKPESVREKILAHLEDLKLSRELSRVRTDLPLEVDFRRRREPDWEGLKAFLERLEFGSLLHEFGLLESPLPAEEAPWPPPEGAFLGYRLSRPEPMWAELLALAASAQGRVYRAEDPHGALRGLFEVRGLLAKDLAVVALREGLDLPPTDDPMLLAYLLDPSNTTPEGVARRYGGEWTEDAAKRALLAERLHANLLGRLQGEERLLWLYEEVEKPLSRVLAHMEATGVKLDVAYLEALSLEVAAHMRRLEEEVFRLAGHSFRLNSRDQLERVLFDELGLPPIGKTEKTGKRSTSAAVLEAVREVHPIVDKILQYRELAKLKGTYIDRLPALVHPKTGRLHTRFNQTATATGRLSSSDPNLQNIPVRTPLGQKIRRAFVAEEGWRLVALDYSQIELRVLAHLSGDENLIRVFQEGKDIHTQTASWMFGLSAEAIDPLMRRAAKTINFGVLYGMSAFRLSQELGIPYEEAAAFIQKYFQSYPKVKAWIEKTLEEGRTRGYVETLFGRRRYVPDLNARVKGKREAAERMAFNMPVQGTAADLMKLAMVRLFPQLREVGARMLLQVHDELLLEAPKERAEEVAALAKEVMEGVWPLAVPLEVEVGIGEDWLAAKG

SEQ ID NO: 3069 - DNA, 2529 bp, synthetic construct
  misc_feature 1..2529: note = Variant of DNA polymerase I from Thermus sp. strain 2.9
  source 1..2529: mol_type = other DNA
atgcaccatcatcatcatcatggcggtagcggcgtgttaccggtgttcgagcctaaaggtcgcgtgcttctggttgatggccatcatctcgcgtatcgtaacttctttgccctgaaaggattaaccaccagcagcggcgagccggtacagggtgtctacggctttgcaaagtcgctcctgaaagctctgaaagaagacggtgatgtggtgattgttgtctttgatgcgaaagcgccaagttttcgccacgaagcgtacgaagcttacaaagccgggcgtgctccaacgccggaagactttcctcgccaattggcgcttatgaaggaattagtggatttgcttggcctcgaacgcttggaagttcccggtttcgaggcagacgacgtattagcgactctcgcaaagaaagccgaacgtgagggctatgaagtccagatcttgacagcagatcgcgatcttttccagcttttatctccgcgcatctcggtgttacacccggaagggcatcgtatcaccccggaatggctctgggagaaatatggtttgcgtcccgaacaatgggtggattttcgcgccttagcaggcgatccgagcgacaatattccgggagttaaaggtatcggcgagaagacggcgctcaagctccttaaagaatgggggtcgttggagaacttgcttaagaatttagatcaggtcaaaccagagtcagtgcgtgagaagattcttgctcacctcgaagacctcaaattaagccgcgaattgtcccgtgtacgcaccgatttgccgctcgaagttgatttccaacgccgccgcgaacctgactgggagggtcttaaagcgtttttagagcgtcttgaatttggttcgctcttgcatgaattcggccttttagaaagcccgttaccagccgaagaagcaccttggccaccgcccgagggcgcgtttttaggttaccgtttgagtcgcccggaaccgatgtgggccgaattactggctcttgcagcgtctgcccagggacgtgtgtatcgcgcggaagaccctcatggtgcgctccgcggcctcttcgaagtccgtggactccttgccaaagacttagctgttgttgcattgcgcgaaggtcttgatttacctccgactgatgatccaatgcttcttgcgtacctcttggacccgtcaaacacgacgcccgaaggcgtagcccgtcgttacggcggcgagtggaccgaagatgcagcgaaacgcgcgttattggccgaacgtttgcacgccaatttattaggacgtttgcaaggcgaggaacgtctcctctggctttacgaagaagtggagaaaccattgagtcgcgtgctcgcgcatatggaagctaccggtgtcaaattagacgtggcgtatttggaggcactcagccttgaagttgctgcccacatgcgccgcttggaggaagaagtattccgtttagcaggccattcctttcgccttaattctcgcgatcagttagaacgtgtgttgttcgatgaacttggtctccctcctatcggcaagacagagaagaccggtaaacgtagcacttcagcggcggttttagaagctcttcgcgaagtccatcccattgtggacaagatcttgcaataccgcgaactcgcgaaattgaaaggcacctatattgaccgtcttccggcattagtccacccgaaaacgggacgcctccatacccgcttcaaccaaacagccacggcgaccggtcgtttgtcctcctctgatccaaaccttcagaatattccagtacgtaccccattgggccagaagatccgccgtgcgtttgtagctgaggagggttggcgtttagtggccctcgattatagccaaattgaattacgtgtccttgcccatctttctggcgatgagaacctcatccgcgtgtttcaggaaggcaaagacattcacactcaaacggcaagctggatgtttggattatcagctgaagcgatcgatcctttgatgcgtcgtgcagcgaagaccatcaatttcggtgttctctacggtatgagtgcctttcgtttgtcgcaggaattaggcattccctatgaagaagcttcggcgttcattcagaaatactttcaaagctatcccaaagttaaagcatggatcgagaagactctcgaagaaggccgcacacgtggttacgtagagaccttatttggacgtcgccgctatgttcccgatttaaacgctcgcgtgaaaggcaagcgtgaagccgccgaacgcatggcgttcaacatgcctgtacagggcacggcagctgacctcatgaaacttgcaatggtgcgcctttttccacaattgcgtgaagttggtgcccgcatgctcttgcaggtccacgatgaactcttgttagaagcgccaaaagagcgtgcggaagaggtggcagccctcgcgaaagaagttatggaaggcgtgtggcccttagcggtgcctcttgaagtcgaagttggtattggcgaggattggctggctgccaaaggataatga

SEQ ID NO: 3070 - protein, 841 aa, synthetic construct
  REGION 1..841: note = Variant of DNA polymerase I from Thermus sp. strain 2.9
MHHHHHHGGSGVLPVFEPKGRVLLVDGHHLAYRNFFALKGLTTSSGEPVQGVYGFAKSLLKALKEDGDVVIVVFDAKAPSFRHEAYEAYKAGRAPTPEDFPRQLALMKELVDLLGLERLEVPGFEADDVLATLAKKAEREGYEVQILTADRDLFQLLSPRISVLHPEGHRITPEWLWEKYGLRPEQWVDFRALAGDPSDNIPGVKGIGEKTALKLLKEWGSLENLLKNLDQVKPESVREKILAHLEDLKLSRELSRVRTDLPLEVDFQRRREPDWEGLKAFLERLEFGSLLHEFGLLESPLPAEEAPWPPPEGAFLGYRLSRPEPMWAELLALAASAQGRVYRAEDPHGALRGLFEVRGLLAKDLAVVALREGLDLPPTDDPMLLAYLLDPSNTTPEGVARRYGGEWTEDAAKRALLAERLHANLLGRLQGEERLLWLYEEVEKPLSRVLAHMEATGVKLDVAYLEALSLEVAAHMRRLEEEVFRLAGHSFRLNSRDQLERVLFDELGLPPIGKTEKTGKRSTSAAVLEALREVHPIVDKILQYRELAKLKGTYIDRLPALVHPKTGRLHTRFNQTATATGRLSSSDPNLQNIPVRTPLGQKIRRAFVAEEGWRLVALDYSQIELRVLAHLSGDENLIRVFQEGKDIHTQTASWMFGLSAEAIDPLMRRAAKTINFGVLYGMSAFRLSQELGIPYEEASAFIQKYFQSYPKVKAWIEKTLEEGRTRGYVETLFGRRRYVPDLNARVKGKREAAERMAFNMPVQGTAADLMKLAMVRLFPQLREVGARMLLQVHDELLLEAPKERAEEVAALAKEVMEGVWPLAVPLEVEVGIGEDWLAAKG

SEQ ID NO: 3071 - DNA, 2529 bp, synthetic construct
  misc_feature 1..2529: note = Variant of DNA polymerase I from Thermus sp. strain 2.9
  source 1..2529: mol_type = other DNA
atgcaccatcatcatcatcatggcggtagcggcgtgttaccggtgttcgagcctaaaggtcgcgtgcttctggttgatggccatcatctcgcgtatcgtaacttctttgccctgaaaggattaaccaccagcagcggcgagccggtacagggtgtctacggctttgcaaagtcgctcctgaaagctctgaaagaagacggtgatgtggtgattgttgtctttgatgcgaaagcgccaagttttcgccacgaagcgtacgaagcttacaaagccgggcgtgctccaacgccggaagactttcctcgccaattggcgcttatgaaggaattagtggatttgcttggcctcgaacgcttggaagttcccggtttcgaggcagacgacgtattagcgactctcgcaaagaaagccgaacgtgagggctatgaagtccagatcttgacagcagatcgcgatcttttccagcttttatctccgcgcatctcggtgttacacccggaagggcatcgtatcaccccggaatggctctgggagaaatatggtttgcgtcccgaacaatgggtggattttcgcgccttagcaggcgatccgagcgacaatattccgggagttaaaggtatcggcgagaagacggcgctcaagctccttaaagaatgggggtcgttggagaacttgcttgaaaatttagatcaggtcaaaccagagtcagtgcgtgagaagattcttgctcacctcgaagacctcaaattaagccgcgaattgtcccgtgtacgcaccgatttgccgctcgaagttgatttccgtcgccgccgcgaacctgactgggagggtcttaaagcgtttttagagcgtcttgaatttggttcgctcttgcatgaattcggccttttagaaagcccgttaccagccgaagaagcaccttggccaccgcccgagggcgcgtttttaggttaccgtttgagtcgcccggaaccgatgtgggccgaattatcggctcttgcagcgtctgcccagggacgtgtgtatcgcgcggaagaccctcatggtgcgctccgcggcctcttcgaagtccgtggactccttgccaaagacttagctgttgttgcattgcgcgaaggtcttgatttacctccgactgatgatccaatgcttcttgcgtacctcttggacccgtcaaacacgacgcccgaaggcgtagcccgtcgttacggcggcgagtggaccgaagatgcagcgaaacgcgcgttattggccgaacgtttgcacgccaatttattaggacgtttgcaaggcgaggaacgtctcctctggctttacgaagaagtggagaaaccattgagtcgcgtgctcgcgcatatggaagctaccggtgtcaaattagacgtggcgtatttggaggctctcagccttgaagttgctgcccacatgcgccgcttggaggaagaagtattccgtttagcaggccattcctttcgccttaattctcgcgatcagttagaacgtgtgttgttcgatgaacttggtctccctcctatcggcaagacagagaagaccggtaaacgtagcacttcagcggcggttttagaagctcttcgcgaagtccatcccattgtggacaagatcttgcagtaccgcgaactcgcgaaattgaaaggcacctatattgaccgtcttccggcattagtccacccgaaaacgggacgcctccatacccgcttcaaccaaacagccacggcgaccggtcgtttgtcctcctctgatccaaaccttcagaatattccagtacgtaccccattgggccagaagatccgccgtgcgtttgtagctgaggagggttggcgtttagtggccctcgattatagtcaaattgaattacgtgtccttgcccatctttctggcgatgagaacctcatccgcgtgtttcaggaaggcaaagacattcacactcaaacggcaagctggatgtttggattatcagctgaagcgatcgatcctttgatgcgtcgtgcagcgaagaccatcaatttcggtgttctctacggtatgagtgcctttcgtttgtcgcaggaattaggcattccctatgaagaagctgcggcgttcattcagaaatactttcaaagctatcccaaagttaaagcatggatcgagaagactctcgaagaaggccgcacacgtggttacgtagagaccttatttggacgtcgccgctatgttcccgatttaaacgctcgcgtgaaaggcaagcgtgaagccgccgaacgcatggcgttcaacatgcctgtacagggcacggcagctgacctcatgaaacttgcaatggtgcgcctttttccacaattgcgtgaagttggtgcccgcatgctcttgcaggtccacgatgaactcttgttagaagcgccaaaagagcgtgcggaagaggtggcagccctcgcgaaagaagttatggaaggcgtgtggcccttagcggtgcctcttgaagtcgaagttggtattggcgaggattggctggctgccaaaggataatga

SEQ ID NO: 3072 - protein, 841 aa, synthetic construct
  REGION 1..841: note = Variant of DNA polymerase I from Thermus sp. strain 2.9
MHHHHHHGGSGVLPVFEPKGRVLLVDGHHLAYRNFFALKGLTTSSGEPVQGVYGFAKSLLKALKEDGDVVIVVFDAKAPSFRHEAYEAYKAGRAPTPEDFPRQLALMKELVDLLGLERLEVPGFEADDVLATLAKKAEREGYEVQILTADRDLFQLLSPRISVLHPEGHRITPEWLWEKYGLRPEQWVDFRALAGDPSDNIPGVKGIGEKTALKLLKEWGSLENLLENLDQVKPESVREKILAHLEDLKLSRELSRVRTDLPLEVDFRRRREPDWEGLKAFLERLEFGSLLHEFGLLESPLPAEEAPWPPPEGAFLGYRLSRPEPMWAELSALAASAQGRVYRAEDPHGALRGLFEVRGLLAKDLAVVALREGLDLPPTDDPMLLAYLLDPSNTTPEGVARRYGGEWTEDAAKRALLAERLHANLLGRLQGEERLLWLYEEVEKPLSRVLAHMEATGVKLDVAYLEALSLEVAAHMRRLEEEVFRLAGHSFRLNSRDQLERVLFDELGLPPIGKTEKTGKRSTSAAVLEALREVHPIVDKILQYRELAKLKGTYIDRLPALVHPKTGRLHTRFNQTATATGRLSSSDPNLQNIPVRTPLGQKIRRAFVAEEGWRLVALDYSQIELRVLAHLSGDENLIRVFQEGKDIHTQTASWMFGLSAEAIDPLMRRAAKTINFGVLYGMSAFRLSQELGIPYEEAAAFIQKYFQSYPKVKAWIEKTLEEGRTRGYVETLFGRRRYVPDLNARVKGKREAAERMAFNMPVQGTAADLMKLAMVRLFPQLREVGARMLLQVHDELLLEAPKERAEEVAALAKEVMEGVWPLAVPLEVEVGIGEDWLAAKG

SEQ ID NO: 3073 - DNA, 2529 bp, synthetic construct
  misc_feature 1..2529: note = Variant of DNA polymerase I from Thermus sp. strain 2.9
  source 1..2529: mol_type = other DNA
atgcaccatcatcatcatcatggcggtagcggcgtgttaccggtgttcgagcctaaaggtcgcgtgcttctggttgatggccatcatctcgcgtatcgtaacttctttgccctgaaaggattaaccaccagctcgggcgagccggtacagggtgtctacggctttgcaaagtcgctcctgaaagctctgaaagaagacggtgatgtggtgattgttgtctttgatgcgaaagcgccaagttttcgccacgaagcgtacgaagcttacaaagccgggcgtgctccaacgccggaagactttcctcgccaattggcgcttatgaaggaattagtggatttgcttggcctcgaacgcttggaagttcccggtttcgaggcagacgacgtattagcgactctcgcaaagaaagccgaacgtgagggctatgaagtccagatcttgacagcagatcgcgatcttttccagcttttatctccgcgcatctcggtgttacacccggaagggcatcgtatcaccccggaatggctctgggagaaatatggtttgcgtcccgaacaatgggtggattttcgcgccttagcaggcgatccgagcgacaatattccgggagttaaaggtatcggcgagaagacggcgctcaagctccttaaagaatgggggtcgttggagaacttgcttgaaaatttagatcaggtcaaaccagagtcagtgcgtgagaagattcttgctcacctcgaagacctcaaattaagccgcgaattgtcccgtgtacgcaccgatttgccgctcgaagttgatttccgtcgccgccgcgaacctgactgggagggtcttaaagcgtttttagagcgtcttgaatttggttcgctcttgcatgaattcggccttttagaaagcccgttaccggccgaagaagcaccttggccaccgcccgagggcgcgtttttaggttaccgtttgagtcgcccggaaccgatgtgggccgaattactggctcttgcagcgtctgcccagggacgtgtgtatcgcgcggaagaccctcatggtgcgctccgcggcctcttcgaagtccgtggactccttgccaaagacttagctgttgttgcattgcgcgaaggtcttgatttacctccgactgatgatccaatgcttcttgcgtacctcttggacccgtcaaacacgacgcccgaaggcgtagcccgtcgttacggcggcgagtggaccgaagatgcagcgaaacgcgcgttattggccgaacgtttgcacgccaatttattaggacgtttgcaaggcgaggaacgtctcctctggctttacgaagaagtggagaaaccattgagtcgcgtgctcgcgcatatggaagctaccggtgtcaaattagacgtggcgtatttggaggctctcagccttgaagttgctgcccacatgcgccgcttggaggaagaagtattccgtttagcaggccattcctttcgccttaattctcgcgatcagttagaacgtgtgttgttcgatgaacttggtctccctcctatcggcaagacagagaagaccggtaaacgtagcacttcagcggcggttttagaagctcttcgcgaagtccatcccattgtggacaagatcttgcaataccgcgaactcgcgaaattgaaaggcacctatattgaccgtcttccggcattagtccacccgaaaacgggacgcctccatacccgcttcaaccaaacagccacggcgaccggtcgtttgtcctcctctgatccaaaccttcagaatattccagtacgtaccccattgggccagaagatccgccgtgcgtttgtagctgaggagggttggcgtttagtggccctcgattatagccaaattgaattacgtgtccttgcccatctttctggcgatgagaacctcatccgcgtgtttcaggaaggcaaagacattcacactcaaacggcaagctggatgtttggattatcagctgaagcgatcgatcctttgatgcgtcgtgcagcgaagaccatcaatttcggtgttctctacggtatgagtgcctttcgtttgtcgcaggaattaggcattccctatgaagaagcttcggcgttcattcagaaatactttcaaagctatcccaaagttaaagcatggatcgagaagactctcgaagaaggccgcacacgtggttacgtagagaccttatttggacgtcgccgctatgttcccgatttaaacgctcgcgtgaaaggcaagcgtgaagccgccgaacgcatggcgttcaacatgcctgtacagggcacggcagctgacctcatgaaacttgcaatggtgcgcctttttccacaattgcgtgaagttggtgcccgcatgctcttgcaggtccacgatgaactcttgttagaagcgccaaaagagcgtgcggaagaggtggcagccctcgcgaaagaagttatggaaggcgtgtggcccttagcggtgcctcttgaagtcgaagttggtattggcgaggattggctggctgccaaaggataatga

SEQ ID NO: 3074 - protein, 841 aa, synthetic construct
  REGION 1..841: note = Variant of DNA polymerase I from Thermus sp. strain 2.9
MHHHHHHGGSGVLPVFEPKGRVLLVDGHHLAYRNFFALKGLTTSSGEPVQGVYGFAKSLLKALKEDGDVVIVVFDAKAPSFRHEAYEAYKAGRAPTPEDFPRQLALMKELVDLLGLERLEVPGFEADDVLATLAKKAEREGYEVQILTADRDLFQLLSPRISVLHPEGHRITPEWLWEKYGLRPEQWVDFRALAGDPSDNIPGVKGIGEKTALKLLKEWGSLENLLENLDQVKPESVREKILAHLEDLKLSRELSRVRTDLPLEVDFRRRREPDWEGLKAFLERLEFGSLLHEFGLLESPLPAEEAPWPPPEGAFLGYRLSRPEPMWAELLALAASAQGRVYRAEDPHGALRGLFEVRGLLAKDLAVVALREGLDLPPTDDPMLLAYLLDPSNTTPEGVARRYGGEWTEDAAKRALLAERLHANLLGRLQGEERLLWLYEEVEKPLSRVLAHMEATGVKLDVAYLEALSLEVAAHMRRLEEEVFRLAGHSFRLNSRDQLERVLFDELGLPPIGKTEKTGKRSTSAAVLEALREVHPIVDKILQYRELAKLKGTYIDRLPALVHPKTGRLHTRFNQTATATGRLSSSDPNLQNIPVRTPLGQKIRRAFVAEEGWRLVALDYSQIELRVLAHLSGDENLIRVFQEGKDIHTQTASWMFGLSAEAIDPLMRRAAKTINFGVLYGMSAFRLSQELGIPYEEASAFIQKYFQSYPKVKAWIEKTLEEGRTRGYVETLFGRRRYVPDLNARVKGKREAAERMAFNMPVQGTAADLMKLAMVRLFPQLREVGARMLLQVHDELLLEAPKERAEEVAALAKEVMEGVWPLAVPLEVEVGIGEDWLAAKG

SEQ ID NO: 3075 - DNA, 2529 bp, synthetic construct
  misc_feature 1..2529: note = Variant of DNA polymerase I from Thermus sp. strain 2.9
  source 1..2529: mol_type = other DNA
atgcaccatcatcatcatcatggcggtagcggcgtgttaccggtgttcgagcctaaaggtcgcgtgcttctggttgatggccatcatctcgcgtatcgtaacttctttgccctgaaaggattaaccaccagcagcggcgagccggtacagggtgtctacggctttgcaaagtcgctcctgaaagctctgaaagaagacggtgatgtggtgattgttgtctttgatgcgaaagcgccaagttttcgccacgaagcgtacgaagcttacaaagccgggcgtgctccaacgccggaagactttcctcgccaattggcgcttatgaaggaattagtggatttgcttggcctcgaacgcttggaagttcccggtttcgaggcagacgacgtattagcgactctcgcaaagaaagccgaacgtgagggctatgaagtccagatcttgacagcagatcgcgatcttttccagcttttatctccgcgcatctcggtgttacacccggaagggcatcgtatcaccccggaatggctctgggagaaatatggtttgcgtcccgaacaatgggtggattttcgcgccttagcaggcgatccgagcgacaatattccgggagttaaaggtatcggcgagaagacggcgctcaagctccttaaagaatgggggtcgttggagaacttgcttaagaatttagatcaggtcaaaccagagtcagtgcgtgagaagattcttgctcacctcgaagacctcaaattaagccgcgaattgtcccgtgtacgcaccgatttgccgctcgaagttgatttccgtcgccgccgcgaacctgactgggagggtcttaaagcgtttttagagcgtcttgaatttggttcgctcttgcatgaattcggccttttagaaagcccgttaccagccgaagaagcaccttggccaccgcccgagggcgcgtttttaggttaccgtttgagtcgcccggaaccgatgtgggccgaattactggctcttgcagcgtctgcccagggacgtgtgtatcgcgcggaagaccctcatggtgcgctccgcggcctcttcgaagtccgtggactccttgccaaagacttagctgttgttgcattgcgcgaaggtcttgatttacctccgactgatgatccaatgcttcttgcgtacctcttggacccgtcaaacacgacgcccgaaggcgtagcccgtcgttacggcggcgagtggaccgaagatgcagcgaaacgcgcgttattggccgaacgtttgcacgccaatttattaggacgtttgcaaggcgaggaacgtctcctctggctttacgaagaagtggagaaaccattgagtcgcgtgctcgcgcatatggaagctaccggtgtcaaattagacgtggcgtatttggaggctctcagccttgaagttgctgcccacatgcgccgcttggaggaagaagtattccgtttagcaggccattcctttcgccttaattctcgcgatcagttagaacgtgtgattttcgatgaacttggtctccctcctatcggcaagacagagaagaccggtaaacgtagcacttcagcggcggttttagaagctcttcgcgaagtccatcccattgtggacaagatcttgcagtaccgcgaactcgcgaaattgaaaggcacctatattgaccgtcttccggcattagtccacccgaaaacgggacgcctccatacccgcttcaaccaaacagccacggcgaccggtcgtttgtcctcctctgatccaaaccttcagaatattccagtacgtaccccattgggccagaagatccgccgtgcgtttgtagctgaggagggttggcgtttagtggccctcgattatagccaaattgaattacgtgtccttgcccatctttctggcgatgagaacctcatccgcgtgtttcaggaaggcaaagacattcacactcaaacggcaagctggatgtttggattatcagctgaagcgatcgatcctttgatgcgtcgtgcagcgaagaccatcaatttcggtgttctctacggtatgagtgcctttcgtttgtcgcaggaattaggcattccctatgaagaagctgcggcgttcattcagaaatactttcaaagctatcccaaagttaaagcatggatcgagaagactctcgaagaaggccgcacacgtggttacgtagagaccttatttggacgtcgccgctatgttcccgatttaaacgctcgcgtgaaaggcaagcgtgaagccgccgaacgcatggcgttcaacatgcctgtacagggcacggcagctgacctcatgaaacttgcaatggtgcgcctttttccacaattgcgtgaagttggtgcccgcatgctcttgcaggtccacgatgaactcttgttagaagcgccaaaagagcgtgcggaagaggtggcagccctcgcgaaagaagttatggaaggcgtgtggcccttagcggtgcctcttgaagtcgaagttggtattggcgaggattggctggctgccaaaggataatga

SEQ ID NO: 3076 - protein, 841 aa, synthetic construct
  REGION 1..841: note = Variant of DNA polymerase I from Thermus sp. strain 2.9
MHHHHHHGGSGVLPVFEPKGRVLLVDGHHLAYRNFFALKGLTTSSGEPVQGVYGFAKSLLKALKEDGDVVIVVFDAKAPSFRHEAYEAYKAGRAPTPEDFPRQLALMKELVDLLGLERLEVPGFEADDVLATLAKKAEREGYEVQILTADRDLFQLLSPRISVLHPEGHRITPEWLWEKYGLRPEQWVDFRALAGDPSDNIPGVKGIGEKTALKLLKEWGSLENLLKNLDQVKPESVREKILAHLEDLKLSRELSRVRTDLPLEVDFRRRREPDWEGLKAFLERLEFGSLLHEFGLLESPLPAEEAPWPPPEGAFLGYRLSRPEPMWAELLALAASAQGRVYRAEDPHGALRGLFEVRGLLAKDLAVVALREGLDLPPTDDPMLLAYLLDPSNTTPEGVARRYGGEWTEDAAKRALLAERLHANLLGRLQGEERLLWLYEEVEKPLSRVLAHMEATGVKLDVAYLEALSLEVAAHMRRLEEEVFRLAGHSFRLNSRDQLERVIFDELGLPPIGKTEKTGKRSTSAAVLEALREVHPIVDKILQYRELAKLKGTYIDRLPALVHPKTGRLHTRFNQTATATGRLSSSDPNLQNIPVRTPLGQKIRRAFVAEEGWRLVALDYSQIELRVLAHLSGDENLIRVFQEGKDIHTQTASWMFGLSAEAIDPLMRRAAKTINFGVLYGMSAFRLSQELGIPYEEAAAFIQKYFQSYPKVKAWIEKTLEEGRTRGYVETLFGRRRYVPDLNARVKGKREAAERMAFNMPVQGTAADLMKLAMVRLFPQLREVGARMLLQVHDELLLEAPKERAEEVAALAKEVMEGVWPLAVPLEVEVGIGEDWLAAKG

SEQ ID NO: 3077 - DNA, 2529 bp, synthetic construct
  misc_feature 1..2529: note = Variant of DNA polymerase I from Thermus sp. strain 2.9
  source 1..2529: mol_type = other DNA
atgcaccatcatcatcatcatggcggtagcggcgtgttaccggtgttcgagcctaaaggtcgcgtgcttctggttgatggccatcatctcgcgtatcgtaacttctttgccctgaaaggattaaccaccagcagcggcgagccggtacagggtgtctacggctttgcaaagtcgctcctgaaagctctgaaagaagacggtgatgtggtgattgttgtctttgatgcgaaagcgccaagttttcgccacgaagcgtacgaagcttacaaagccgggcgtgctccaacgccggaagactttcctcgccaattggcgcttatgaaggaattagtggatttgcttggcctcgaacgcttggaagttcccggtttcgaggcagacgacgtattagcgactctcgcaaagaaagccgaacgtgagggctatgaagtccagatcttgacagcagatcgcgatcttttccagcttttatctccgcgcatctcggtgttacacccggaagggcatcgtatcaccccggaatggctctgggagaaatatggtttgcgtcccgaacaatgggtggattttcgcgccttagcaggcgatccgagcgacaatattccgggagttaaaggtatcggcgagaagacggcgctcaagctccttaaagaatgggggtcgttggagaacttgcttaagaatttagatcaggtcaaaccagagtcagtgcgtgagaagattcttgctcacctcgaagacctcaaattaagccgcgaattgtcccgtgtacgcaccgatttgccgctcgaagttgatttccgtcgccgccgcgaacctgactgggagggtcttaaagcgtttttagagcgtcttgaatttggttcgctcttgcatgaattcggccttttagaaagcccgttaccagccgaagaagcaccttggccaccgcccgagggcgcgtttttaggttaccgtttgagtcgcccggaaccgatgtgggccgaattactggctcttgcagcgtctgcccagggacgtgtgtatcgcgcggaagaccctcatggtgcgctccgcggcctcttcgaagtccgtggactccttgccaaagacttagctgttgttgcattgcgcgaaggtcttgatttacctccgactgatgatccaatgcttcttgcgtacctcttggacccgtcaaacacgacgcccgaaggcgtagcccgtcgttacggcggcgagtggaccgaagatgcagcgaaacgcgcgttattggccgaacgtttgcacgccaatttattaggacgtttgcaaggcgaggaacgtctcctctggctttacgaagaagtggagaaaccattgagtcgcgtgctcgcgcatatggaagctaccggtgtcaaattagacgtggcgtatttggaggctctcagccttgaagttgctgcccacatgcgccgcttggaggaagaagtattccgtttagcaggccattcctttcgccttaattctcgcgatcagttagaacgtgtgttgttcgatgaacttggtctccctcctatcggcaagacagagaagaccggtaaacgtagcacttcagcggcggttttagaagctcttcgcgaagtccatcccattgtggacaagatcttgcagtaccgcgaactcgcgaaattgaaaggcacctatattgaccgtcttccggcattagtccacccgaaaacgggacgcctccatacccgcttcaaccaaacagccacggcgaccggtcgtttgtcctcctctgatccaaaccttcagaatattccagtacgtaccccattgggccagaagatccgccgtgcgtttgtagctgaggagggttggcgtttagtggccctcgattatagccaaattgaattacgtgtccttgcccatctttctggcgatgagaacctcatccgcgtgtttcaggaaggcaaagacattcacactcaaacggcaagctggatgtttggattatcagctgaagcgatcgatcctttgatgcgtcgtgcagcgaagaccatcaatttcggtgttctctacggtatgagtccgtttcgtttgtcgcaggaattaggcattccctatgaagaagctgcggcgttcattcagaaatactttcaaagctatcccaaagttaaagcatggatcgagaagactctcgaagaaggccgcacacgtggttacgtagagaccttatttggacgtcgccgctatgttcccgatttaaacgctcgcgtgaaaggcaagcgtgaagccgccgaacgcatggcgttcaacatgcctgtacagggcacggcagctgacctcatgaaacttgcaatggtgcgcctttttccacaattgcgtgaagttggtgcccgcatgctcttgcaggtccacgatgaactcttgttagaagcgccaaaagagcgtgcggaagaggtggcagccctcgcgaaagaagttatggaaggcgtgtggcccttagcggtgcctcttgaagtcgaagttggtattggcgaggattggctggctgccaaaggataatga

SEQ ID NO: 3078 - protein, 841 aa, synthetic construct
  REGION 1..841: note = Variant of DNA polymerase I from Thermus sp. strain 2.9
MHHHHHHGGSGVLPVFEPKGRVLLVDGHHLAYRNFFALKGLTTSSGEPVQGVYGFAKSLLKALKEDGDVVIVVFDAKAPSFRHEAYEAYKAGRAPTPEDFPRQLALMKELVDLLGLERLEVPGFEADDVLATLAKKAEREGYEVQILTADRDLFQLLSPRISVLHPEGHRITPEWLWEKYGLRPEQWVDFRALAGDPSDNIPGVKGIGEKTALKLLKEWGSLENLLKNLDQVKPESVREKILAHLEDLKLSRELSRVRTDLPLEVDFRRRREPDWEGLKAFLERLEFGSLLHEFGLLESPLPAEEAPWPPPEGAFLGYRLSRPEPMWAELLALAASAQGRVYRAEDPHGALRGLFEVRGLLAKDLAVVALREGLDLPPTDDPMLLAYLLDPSNTTPEGVARRYGGEWTEDAAKRALLAERLHANLLGRLQGEERLLWLYEEVEKPLSRVLAHMEATGVKLDVAYLEALSLEVAAHMRRLEEEVFRLAGHSFRLNSRDQLERVLFDELGLPPIGKTEKTGKRSTSAAVLEALREVHPIVDKILQYRELAKLKGTYIDRLPALVHPKTGRLHTRFNQTATATGRLSSSDPNLQNIPVRTPLGQKIRRAFVAEEGWRLVALDYSQIELRVLAHLSGDENLIRVFQEGKDIHTQTASWMFGLSAEAIDPLMRRAAKTINFGVLYGMSPFRLSQELGIPYEEAAAFIQKYFQSYPKVKAWIEKTLEEGRTRGYVETLFGRRRYVPDLNARVKGKREAAERMAFNMPVQGTAADLMKLAMVRLFPQLREVGARMLLQVHDELLLEAPKERAEEVAALAKEVMEGVWPLAVPLEVEVGIGEDWLAAKG

SEQ ID NO: 3079 - DNA, 2529 bp, synthetic construct
  misc_feature 1..2529: note = Variant of DNA polymerase I from Thermus sp. strain 2.9
  source 1..2529: mol_type = other DNA
atgcaccatcatcatcatcatggcggtagcggcgtgttaccggtgttcgagcctaaaggtcgcgtgcttctggttgatggccatcatctcgcgtatcgtaacttctttgccctgaaaggattaaccaccagcagcggcgagccggtacagggtgtctacggctttgcaaagtcgctcctgaaagctctgaaagaagacggtgatgtggtgattgttgtctttgatgcgaaagcgccaagttttcgccacgaagcgtacgaagcttacaaagccgggcgtgctccaacgccggaagactttcctcgccaattggcgcttatgaaggaattagtggatttgcttggcctcgaacgcttggaagttcccggtttcgaggcagacgacgtattagcgactctcgcaaagaaagccgaacgtgagggctatgaagtccagatcttgacagcagatcgcgatcttttccagcttttatctccgcgcatctcggtgttacacccggaagggcatcgtatcaccccggaatggctctgggagaaatatggtttgcgtcccgaacaatgggtggattttcgcgccttagcaggcgatccgagcgacaatattccgggagttaaaggtatcggcgagaagacggcgctcaagctccttaaagaatgggggtcgttggagaacttgcttgaaaatttagatcaggtcaaaccagagtcagtgcgtgagaagattcttgctcacctcgaagacctcaaattaagccgcgaattgtcccgtgtacgcaccgatttgccgctcgaagttgatttccgtcgccgccgcgaacctgactgggagggtcttaaagcgtttttagagcgtcttgaatttggttcgctcttgcatgaattcggccttttagaaagcccgttaccagccgaagaagcaccttggccaccgccccaaggcgcgtttttaggttaccgtttgagtcgcccggaaccgatgtgggccgaattactggctcttgcagcgtctgcccagggacgtgtgtatcgcgcggaagaccctcatggtgcgctccgcggcctcttcgaagtccgtggactccttgccaaagacttagctgttgttgcattgcgcgaaggtcttgatttacctccgactgatgatccaatgcttcttgcgtacctcttggacccgtcaaacacgacgcccgaaggcgtagcccgtcgttacggcggcgagtggaccgaagatgcagcgaaacgcgcgttattggccgaacgtttgcacgccaatttattaggacgtttgcaaggcgaggaacgtctcctctggctttacgaagaagtggagaaaccattgagtcgcgtgctcgcgcatatggaagctaccggtgtcaaattagacgtggcgtatttggaggctctcagccttgaagttgctgcccacatgcgccgcttggaggaagaagtattccgtttagcaggccgctcctttcgccttagctctcgcgatcagttagaacgtgtgttgttcgatgaacttggtctccctcctatcggcaagacagagaagaccggtaaacgtagcacttcagcggcggttttagaagctcttcgcgaagtccatcccattgtggacaagatcttgcagtaccgcgaactcgcgaaattgaaaggcacctatattgaccgtcttccggcattagtccacccgaaaacgggacgcctccatacccgcttcaaccaaacagccacggcgaccggtcgtttgtcctcctctgatccaaaccttcagaatattccagtacgtaccccattgggccagaagatccgccgcgcgtttgtagctgaggagggttggcgtttagtggccctcgattatcgtcaaattgaattacgtgtccttgcccatctttctggcgatgagaacctcatccgcgtgtttcaggaaggcaaagacattcacactcaaacggcaagctggatgtttggattatcagctgaagcgatcgatcctttgatgcgtcgtgcagcgaagaccatcaatttcggtgttctctacggtatgagtgcctttcgtttgtcgcaggaattaggcattccctatgaagaagctgcggcgttcattcagaaatactttcaaagctatcccaaagttaaagcatggatcgagaagactctcgaagaaggccgcacacgtggttacgtagagaccttatttggacgtcgccgctatgttcccgatttaaacgctcgcgtgaaaggcaagcgtgaagccgccgaacgcatggcgttcaacatgcctgtacagggcacggcagctgacctcatgaaacttgcaatggtgcgcctttttccacaattgcgtgaagttggtgcccgcatgctcttgcaggtccacgatgaactcttgttagaagcgccaaaagagcgtgcggaagaggtggcagccctcgcgaaagaagttatggaaggcgtgtggcccttagcggtgcctcttgaagtcgaagttggtattggcgaggattggctggctgccaaaggataatga

SEQ ID NO: 3080 - protein, 841 aa, synthetic construct
  REGION 1..841: note = Variant of DNA polymerase I from Thermus sp. strain 2.9
MHHHHHHGGSGVLPVFEPKGRVLLVDGHHLAYRNFFALKGLTTSSGEPVQGVYGFAKSLLKALKEDGDVVIVVFDAKAPSFRHEAYEAYKAGRAPTPEDFPRQLALMKELVDLLGLERLEVPGFEADDVLATLAKKAEREGYEVQILTADRDLFQLLSPRISVLHPEGHRITPEWLWEKYGLRPEQWVDFRALAGDPSDNIPGVKGIGEKTALKLLKEWGSLENLLENLDQVKPESVREKILAHLEDLKLSRELSRVRTDLPLEVDFRRRREPDWEGLKAFLERLEFGSLLHEFGLLESPLPAEEAPWPPPQGAFLGYRLSRPEPMWAELLALAASAQGRVYRAEDPHGALRGLFEVRGLLAKDLAVVALREGLDLPPTDDPMLLAYLLDPSNTTPEGVARRYGGEWTEDAAKRALLAERLHANLLGRLQGEERLLWLYEEVEKPLSRVLAHMEATGVKLDVAYLEALSLEVAAHMRRLEEEVFRLAGRSFRLSSRDQLERVLFDELGLPPIGKTEKTGKRSTSAAVLEALREVHPIVDKILQYRELAKLKGTYIDRLPALVHPKTGRLHTRFNQTATATGRLSSSDPNLQNIPVRTPLGQKIRRAFVAEEGWRLVALDYRQIELRVLAHLSGDENLIRVFQEGKDIHTQTASWMFGLSAEAIDPLMRRAAKTINFGVLYGMSAFRLSQELGIPYEEAAAFIQKYFQSYPKVKAWIEKTLEEGRTRGYVETLFGRRRYVPDLNARVKGKREAAERMAFNMPVQGTAADLMKLAMVRLFPQLREVGARMLLQVHDELLLEAPKERAEEVAALAKEVMEGVWPLAVPLEVEVGIGEDWLAAKG

SEQ ID NO: 3081 - DNA, 2529 bp, synthetic construct
  misc_feature 1..2529: note = Variant of DNA polymerase I from Thermus sp. strain 2.9
  source 1..2529: mol_type = other DNA
atgcaccatcatcatcatcatggcggtagcggcgtgttaccggtgttcgagcctaaaggtcgcgtgcttctggttgatggccatcatctcgcgtatcgtaacttctttgccctgaaaggattaaccaccagctcgggcgagccggtacagggtgtctacggctttgcaaagtcgctcctgaaagctctgaaagaagacggtgatgtggtgattgttgtctttgatgcgaaagcgccaagttttcgccacgaagcgtacgaagcttacaaagccgggcgtgctccaacgccggaagactttcctcgccaattggcgcttatgaaggaattagtggatttgcttggcctcgaacgcttggaagttcccggtttcgaggcagacgacgtattagcgactctcgcaaagaaagccgaacgtgagggctatgaagtccagatcttgacagcagatcgcgatcttttccagcttttatctccgcgcatctcggtgttacacccggaagggcatcgtatcaccccggaatggctctgggagaaatatggtttgcgtcccgaacaatgggtggattttcgcgccttagcaggcgatccgagcgacaatattccgggagttaaaggtatcggcgagaagacggcgctcaagctccttaaagaatgggggtcgttggagaacttgcttgaaaatttagatcaggtcaaaccagagtcagtgcgtgagaagattcttgctcacctcgaagacctcaaattaagccgcgaattgtcccgtgtacgcaccgatttgccgctcgaagttgatttccgtcgccgccgcgaacctgactgggagggtcttaaagcgtttttagagcgtcttgaatttggttcgctcttgcatgaattcggccttttagaaagcccgttaccagccgaagaagcaccttggccaccgcccgaaggcgcgtttttaggttaccgtttgagtcgcccggaaccgatgtgggccgaattatcggctcttgcagcgtctgcccagggacgtgtgtatcgcgcggaagaccctcatggtgcgctccgcggcctcttcgaagtccgtggactccttgccaaagacttagctgttgttgcattgcgcgaaggtcttgatttacctccgactgatgatccaatgcttcttgcgtacctcttggacccgtcaaacacgacgcccgaaggcgtagcccgtcgttacggcggcgagtggaccgaagatgcagcgaaacgcgcgttattggccgaacgtttgcacgccaatttattaggacgtttgcaaggcgaggaacgtctcctctggctttacgaagaagtggagaaaccattgagtcgcgtgctcgcgcatatggaagctaccggtgtcaaattagacgtggcgtatttggaggctctcagccttgaagttgctgcccacatgcgccgcttggaggaagaagtattccgtttagcaggccattcctttcgccttaattctcgcgatcagttagaacgtgtgttgttcgatgaacttggtctccctcctatcggcaagacagagaagaccggtaaacgtagcacttcagccgcggttttagaagctcttcgcgaagtccatcccattgtggacaagatcttgcagtaccgcgaactcgcgaaattgaaaggcacctatattgaccgtcttccggcattagtccacccgaaaacgggacgcctccatacccgcttcaaccaaacagccacggcgaccggtcgtttgtcctcctctgatccaaaccttcagaatattccagtacgtaccccattgggccagaagatccgcaaagcgtttgtagctgaggagggttggcgtttagtggccctcgattatagtcaaattgaattacgtgtccttgcccatctttctggcgatgagaacctcatccgcgtgtttcaggaaggcaaagacattcacactcaaacggcaagctggatgtttggattaggcgctgaagcgatcgatcctttgatgcgtcgtgcagcgaagaccatcaatttcggtgttctctacggtatgagtgcctttcgtttgtcgcaggaattaggcattccctatgaagaagctgcggcgttcattcagaaatactttcaaagctatcccaaagttaaagcatggatcgagaagactctcgaagaaggccgcacacgtggttacgtagagaccttatttggacgtcgccgctatgttcccgatttaaacgctcgcgtgaaaggcaagcgtgaagccgccgaacgcatggcgttcaacatgcctgtacagggcacggcagctgacctcatgaaacttgcaatggtgcgcctttttccacaattgcgtgaagttggtgcccgcatgctcttgcaggtccacgatgaactcttgttagaagcgccaaaagagcgtgcggaagaggtggcagccctcgcgaaagaagttatggaaggcgtgtggcccttagcggtgcctcttgaagtcgaagttggtattggcgaggattggctggctgccaaaggataatga

SEQ ID NO: 3082 - protein, 841 aa, synthetic construct
  REGION 1..841: note = Variant of DNA polymerase I from Thermus sp. strain 2.9
MHHHHHHGGSGVLPVFEPKGRVLLVDGHHLAYRNFFALKGLTTSSGEPVQGVYGFAKSLLKALKEDGDVVIVVFDAKAPSFRHEAYEAYKAGRAPTPEDFPRQLALMKELVDLLGLERLEVPGFEADDVLATLAKKAEREGYEVQILTADRDLFQLLSPRISVLHPEGHRITPEWLWEKYGLRPEQWVDFRALAGDPSDNIPGVKGIGEKTALKLLKEWGSLENLLENLDQVKPESVREKILAHLEDLKLSRELSRVRTDLPLEVDFRRRREPDWEGLKAFLERLEFGSLLHEFGLLESPLPAEEAPWPPPEGAFLGYRLSRPEPMWAELSALAASAQGRVYRAEDPHGALRGLFEVRGLLAKDLAVVALREGLDLPPTDDPMLLAYLLDPSNTTPEGVARRYGGEWTEDAAKRALLAERLHANLLGRLQGEERLLWLYEEVEKPLSRVLAHMEATGVKLDVAYLEALSLEVAAHMRRLEEEVFRLAGHSFRLNSRDQLERVLFDELGLPPIGKTEKTGKRSTSAAVLEALREVHPIVDKILQYRELAKLKGTYIDRLPALVHPKTGRLHTRFNQTATATGRLSSSDPNLQNIPVRTPLGQKIRKAFVAEEGWRLVALDYSQIELRVLAHLSGDENLIRVFQEGKDIHTQTASWMFGLGAEAIDPLMRRAAKTINFGVLYGMSAFRLSQELGIPYEEAAAFIQKYFQSYPKVKAWIEKTLEEGRTRGYVETLFGRRRYVPDLNARVKGKREAAERMAFNMPVQGTAADLMKLAMVRLFPQLREVGARMLLQVHDELLLEAPKERAEEVAALAKEVMEGVWPLAVPLEVEVGIGEDWLAAKG

SEQ ID NO: 3083 - DNA, 2529 bp, synthetic construct
  misc_feature 1..2529: note = Variant of DNA polymerase I from Thermus sp. strain 2.9
  source 1..2529: mol_type = other DNA
atgcaccatcatcatcatcatggcggtagcggcgtgttaccggtgttcgagcctaaaggtcgcgtgcttctggttgatggccatcatctcgcgtatcgtaacttctttgccctgaaaggattaaccaccagcctgggcgagccggtacagggtgtctacggctttgcaaagtcgctcctgaaagctctgaaagaagacggtgatgtggtgattgttgtctttgatgcgaaagcgccaagttttcgccacgaagcgtacgaagcttacaaagccgggcgtgctccaacgccggaagactttcctcgccaattggcgcttatgaaggaattagtggatttgcttggcctcgaacgcttggaagttcccggtttcgaggcagacgacgtattagcgactctcgcaaagaaagccgaacgtgagggctatgaagtccagatcttgacagcagatcgcgatcttttccagcttttatctccgcgcatctcggtgttacacccggaagggcatcgtatcaccccggaatggctctgggagaaatatggtttgcgtcccgaacaatgggtggattttcgcgccttagcaggcgatccgagcgacaatattccgggagttaaaggtatcggcgagaagacggcgctcaagctccttaaagaatgggggtcgttggagaacttgcttaagaatttagatcaggtcaaaccagagtcagtgcgtgagaagattcttgctcacctcgaagacctcaaattaagccgcgaattgtcccgtgtacgcaccgatttgccgctcgaagttgatttccgtcgccgccgcgaacctgactgggagggtcttaaagcgtttttagagcgtcttgaatttggttcgctcttgcatgaattcggccttttagaaagcccgttaccggccgaagaagcaccttggccaccgcccgagggcgcgtttttaggttaccgtttgagtcgcccggaaccgatgtgggccgaattactggctcttgcagcgtctgcccagggacgtgtgtatcgcgcggaagaccctcatggtgcgctccgcggcctcttcgaagtccgtggactccttgccaaagacttagctgttgttgcattgcgcgaaggtcttgatttacctccgactgatgatccaatgcttcttgcgtacctcttggacccgtcaaacacgacgcccgaaggcgtagcccgtcgttacggcggcgagtggaccgaagatgcagcgaaacgcgcgttattggccgaacgtttgcacgcaaatttattaggacgtttgcaaggcgaggaacgtctcctctggctttacgaagaagtggagaaaccattgagtcgcgtgctcgcgcatatggaagctaccggtgtcaaattagacgtggcgtatttggaggctctcagccttgaagttgctgcccacatgcgccgcttggaggaagaagtattccgtttagcaggccactcctttcgccttgtgtctcgcgatcagttagaacgtgtgttgttcgatgaacttggtctccctcctatcggcaagacagagaagaccggtaaacgtagcacttcacgcgcggttttagaagctcttcgcgaagtccatcccattgtggacaagatcttgcagtaccgcgaactcgcgaaattgaaaggcacctatattgaccgtcttccggcattagtccacccgaaaacgggacgcctccatacccgcttcaaccaaacagccacggcgaccggtcgtttgtcctcctctgatccaaaccttcagaatattccagtacgtaccccattgggccagaagatccgccgcgcgtttgtagctgaggagggttggcgtttagtggccctcgattatcgtcaaattgaattacgtgtccttgcccatctttctggcgatgagaacctcatccgcgtgtttcaggaaggcaaagacattcacactcaaacggcaagctggatgtttggattatcagctgaagcgatcgatcctttgatgcgtcgtgcagcgaagaccatcaatttcggtgttctctacggtatgagtgcctttcgtttgtcgcaggaattaggcattccctatcaggaagctcaagcgttcattcagaaatactttcaaagctatcccaaagttaaagcatggatcgagaagactctcgaagaaggccgcacacgtggttacgtagagaccttatttggacgtcgccgctatgttcccgatttaaacgctcgcgtgaaaggcaagcgtgaagccgccgaacgcatggcgttcaacatgcctgtacagggcacggcagctgacctcatgaaacttgcaatggtgcgcctttttccacaattgcgtgaagttggtgcccgcatgctcttgcaggtccacgatgaactcttgttagaagcgccaaaagagcgtgcggaagaggtggcagccctcgcgaaagaagttatggaaggcgtgtggcccttagcggtgcctcttgaagtcgaagttggtattggcgaggattggctggctgccaaaggataatga

SEQ ID NO: 3084 - protein, 841 aa, synthetic construct
  REGION 1..841: note = Variant of DNA polymerase I from Thermus sp. strain 2.9
MHHHHHHGGSGVLPVFEPKGRVLLVDGHHLAYRNFFALKGLTTSLGEPVQGVYGFAKSLLKALKEDGDVVIVVFDAKAPSFRHEAYEAYKAGRAPTPEDFPRQLALMKELVDLLGLERLEVPGFEADDVLATLAKKAEREGYEVQILTADRDLFQLLSPRISVLHPEGHRITPEWLWEKYGLRPEQWVDFRALAGDPSDNIPGVKGIGEKTALKLLKEWGSLENLLKNLDQVKPESVREKILAHLEDLKLSRELSRVRTDLPLEVDFRRRREPDWEGLKAFLERLEFGSLLHEFGLLESPLPAEEAPWPPPEGAFLGYRLSRPEPMWAELLALAASAQGRVYRAEDPHGALRGLFEVRGLLAKDLAVVALREGLDLPPTDDPMLLAYLLDPSNTTPEGVARRYGGEWTEDAAKRALLAERLHANLLGRLQGEERLLWLYEEVEKPLSRVLAHMEATGVKLDVAYLEALSLEVAAHMRRLEEEVFRLAGHSFRLVSRDQLERVLFDELGLPPIGKTEKTGKRSTSRAVLEALREVHPIVDKILQYRELAKLKGTYIDRLPALVHPKTGRLHTRFNQTATATGRLSSSDPNLQNIPVRTPLGQKIRRAFVAEEGWRLVALDYRQIELRVLAHLSGDENLIRVFQEGKDIHTQTASWMFGLSAEAIDPLMRRAAKTINFGVLYGMSAFRLSQELGIPYQEAQAFIQKYFQSYPKVKAWIEKTLEEGRTRGYVETLFGRRRYVPDLNARVKGKREAAERMAFNMPVQGTAADLMKLAMVRLFPQLREVGARMLLQVHDELLLEAPKERAEEVAALAKEVMEGVWPLAVPLEVEVGIGEDWLAAKG

SEQ ID NO: 3085 - DNA, 2529 bp, synthetic construct
  misc_feature 1..2529: note = Variant of DNA polymerase I from Thermus sp. strain 2.9
  source 1..2529: mol_type = other DNA
atgcaccatcatcatcatcatggcggtagcggcgtgttaccggtgttcgagcctaaaggtcgcgtgcttctggttgatggccatcatctcgcgtatcgtaacttctttgccctgaaaggattaaccaccagcagcggcgagccggtacagggtgtctacggctttgcaaagtcgctcctgaaagctctgaaagaagacggtgatgtggtgattgttgtctttgatgcgaaagcgccaagttttcgccacgaagcgtacgaagcttacaaagccgggcgtgctccaacgccggaagactttcctcgccaattggcgcttatgaaggaattagtggatttgcttggcctcgaacgcttggaagttcccggtttcgaggcagacgacgtattagcgactctcgcaaagaaagccgaacgtgagggctatgaagtccagatcttgacagcagatcgcgatcttttccagcttttatctccgcgcatctcggtgttacacccggaagggcatcgtatcaccccggaatggctctgggagaaatatggtttgcgtcccgaacaatgggtggattttcgcgccttagcaggcgatccgagcgacaatattccgggagttaaaggtatcggcgagaagacggcgctcaagctccttaaagaatgggggtcgttggagaacttgcttaagaatttagatcaggtcaaaccagagtcagtgcgtgagaagattcttgctcacctcgaagacctcaaattaagccgcgaattgtcccgtgtacgcaccgatttgccgctcgaagttgatttccgccgccgccgcgaacctgactgggagggtcttaaagcgtttttagagcgtcttgaatttggttcgctcttgcatgaattcggccttttagaaagcccgttaccagccgaagaagcaccttggccaccgcccgagggcgcgtttttaggttaccgtttgagtcgcccggaaccgatgtgggccgaattactggctcttgcagcgtctgcccagggacgtgtgtatcgcgcggaagaccctcatggtgcgctccgcggcctcttcgaagtccgtggactccttgccaaagacttagctgttgttgcattgcgcgaaggtcttgatttacctccgactgatgatccaatgcttcttgcgtacctcttggacccgtcaaacacgacgcccgaaggcgtagcccgtcgttacggcggcgagtggaccgaagatgcagcgaaacgcgcgttattggccgaacgtttgcacgccaatttattaggacgtttgcaaggcgaggaacgtctcctctggctttacgaagaagtggagaaaccattgagtcgcgtgctcgcgcatatggaagctaccggtgtcaaattagacgtggcgtatttggagaatctcagccttgaagttgctgcccacatgcgccgcttggaggaagaagtattccgtttagcaggccgttcctttcgccttaattctcgcgatcagttagaacgtgtgttgttcgatgaacttggtctccctcctatcggcaagacagagaagaccggtaaacgtagcacttcagcggcggttttagaagctcttcgcgaagtccatcccattgtggacaagatcttgcagtaccgcgaactcgcgaaattgaaaggcacctatattgaccgtcttccggcattagtccacccgaaaacgggacgcctccatacccgcttcaaccaaacagccacggcgaccggtcgtttgtcctcctctgatccaaaccttcagaatattccagtacgtaccccattgggccagaagatccgccgtgcgtttgtagctgaggagggttggcgtttagtggccctcgattatagccaaattgaattacgtgtccttgcccatctttctggcgatgagaacctcatccgcgtgtttcaggaaggcaaagacattcacactcaaacggcaagctggatgtttggattatcagctgaagcgatcgatcctttgatgcgtcgtgcagcgaagaccatcaatttcggtgttctctacggtatgagtgcctttcgtttgtcgcaggaattaggcattccctatgaagaagctgcggcgttcattcagaaatactttcaaagctatcccaaagttaaagcatggatcgagaagactctcgaagaaggccgcacacgtggttacgtagagaccttatttggacgtcgccgctatgttcccgatttaaacgctcgcgtgaaaggcaagcgtgaagccgccgaacgcatggcgttcaacatgcctgtacagggcacggcagctgacctcatgaaacttgcaatggtgcgcctttttccacaattgcgtgaagttggtgcccgcatgctcttgcaggtccacgatgaactcttgttagaagcgccaaaagagcgtgcggaagaggtggcagccctcgcgaaagaagttatggaaggcgtgtggcccttagcggtgcctcttgaagtcgaagttggtattggcgaggattggctggctgccaaaggataatga

SEQ ID NO: 3086 - protein, 841 aa, synthetic construct
  REGION 1..841: note = Variant of DNA polymerase I from Thermus sp. strain 2.9
MHHHHHHGGSGVLPVFEPKGRVLLVDGHHLAYRNFFALKGLTTSSGEPVQGVYGFAKSLLKALKEDGDVVIVVFDAKAPSFRHEAYEAYKAGRAPTPEDFPRQLALMKELVDLLGLERLEVPGFEADDVLATLAKKAEREGYEVQILTADRDLFQLLSPRISVLHPEGHRITPEWLWEKYGLRPEQWVDFRALAGDPSDNIPGVKGIGEKTALKLLKEWGSLENLLKNLDQVKPESVREKILAHLEDLKLSRELSRVRTDLPLEVDFRRRREPDWEGLKAFLERLEFGSLLHEFGLLESPLPAEEAPWPPPEGAFLGYRLSRPEPMWAELLALAASAQGRVYRAEDPHGALRGLFEVRGLLAKDLAVVALREGLDLPPTDDPMLLAYLLDPSNTTPEGVARRYGGEWTEDAAKRALLAERLHANLLGRLQGEERLLWLYEEVEKPLSRVLAHMEATGVKLDVAYLENLSLEVAAHMRRLEEEVFRLAGRSFRLNSRDQLERVLFDELGLPPIGKTEKTGKRSTSAAVLEALREVHPIVDKILQYRELAKLKGTYIDRLPALVHPKTGRLHTRFNQTATATGRLSSSDPNLQNIPVRTPLGQKIRRAFVAEEGWRLVALDYSQIELRVLAHLSGDENLIRVFQEGKDIHTQTASWMFGLSAEAIDPLMRRAAKTINFGVLYGMSAFRLSQELGIPYEEAAAFIQKYFQSYPKVKAWIEKTLEEGRTRGYVETLFGRRRYVPDLNARVKGKREAAERMAFNMPVQGTAADLMKLAMVRLFPQLREVGARMLLQVHDELLLEAPKERAEEVAALAKEVMEGVWPLAVPLEVEVGIGEDWLAAKG

SEQ ID NO: 3087 - DNA, 2529 bp, synthetic construct
  misc_feature 1..2529: note = Variant of DNA polymerase I from Thermus sp. strain 2.9
  source 1..2529: mol_type = other DNA
atgcaccatcatcatcatcatggcggtagcggcgtgttaccggtgttcgagcctaaaggtcgcgtgcttctggttgatggccatcatctcgcgtatcgtaacttctttgccctgaaaggattaaccaccagctcgggcgagccggtacagggtgtctacggctttgcaaagtcgctcctgaaagctctgaaagaagacggtgatgtggtgattgttgtctttgatgcgaaagcgccaagttttcgccacgaagcgtacgaagcttacaaagccgggcgtgctccaacgccggaagactttcctcgccaattggcgcttatgaaggaattagtggatttgcttggcctcgaacgcttggaagttcccggtttcgaggcagacgacgtattagcgactctcgcaaagaaagccgaacgtgagggctatgaagtccagatcttgacagcagatcgcgatcttttccagcttttatctccgcgcatctcggtgttacacccggaagggcatcgtatcaccccggaatggctctgggagaaatatggtttgcgtcccgaacaatgggtggattttcgcgccttagcaggcgatccgagcgacaatattccgggagttaaaggtatcggcgagaagacggcgctcaagctccttaaagaatgggggtcgttggagaacttgcttgaaaatttagatcaggtcaaaccagagtcagtgcgtgagaagattcttgctcacctcgaagacctcaaattaagccgcgaattgtcccgtgtacgcaccgatttgccgctcgaagttgatttccgtcgccgccgcgaacctgactgggagggtcttaaagcgtttttagagcgtcttgaatttggttcgctcttgcatgaattcggccttttagaaagcccgttaccagccgaagaagcaccttggccaccgcccgagggcgcgtttttaggttaccgtttgagtcgcccggaaccgatgtgggccgaattactggctcttgcagcgtctgcccagggaaccgtgtatcgcgcggaagaccctcatggtgcgctccgcggcctcttcgaagtccgtggactccttgccaaagacttagctgttgttgcattgcgcgaaggtcttgatttacctccgactgatgatccaatgcttcttgcgtacctcttggacccgtcaaacacgacgcccgaaggcgtagcccgtcgttacggcggcgagtggaccgaagatgcagcgaaacgcgcgttattggccgaacgtttgcacgccaatttattaggacgtttgcaaggcgaggaacgtctcctctggctttacgaagaagtggagaaaccattgagtcgcgtgctcgcgcatatggaagctaccggtgtcaaattagacgtggcgtatttggaggctctcagccttgaagttgctgcccacatgcgccgcttggaggaagaagtattccgtttagcaggccattcctttcgccttaattctcgcgatcagttagaacgtgtgttgttcgatgaacttggtctccctcctatcggcaagacagagaagaccggtaaacgtagcacttcagcggcggttttagaagctcttcgcgaagtccatcccattgtggacaagatcttgcagtaccgcgaactcgcgaaattgaaaggcacctatattgaccgtcttccggcattagtccacccgaaaacgggacgcctccatacccgcttcaaccaaacagccacggcgaccggtcgtttgtcctcctctgatccaaaccttcagaatattccagtacgtaccccattgggccagaagatccgccgtgcgtttgtagctgaggagggttggcgtttagtggccctcgattatcgtcaaattgaattacgtgtccttgcccatctttctggcgatgagaacctcatccgcgtgtttcaggaaggcaaagacattcacactcaaacggcaagctggatgtttggattatcagctgaagcgatcgatcctttgatgcgtcgtgcagcgaagaccatcaatttcggtgttctctacggtatgagtgcctttcgtttgtcgcaggaattaggcattccctatgaagaagctgcggcgttcattcagaaatactttcaaagctatcccaaagttaaagcatggatcgagaagactctcgaagaaggccgcacacgtggttacgtagagaccttatttggacgtcgccgctatgttcccgatttaaacgctcgcgtgaaaggcaagcgtgaagccgccgaacgcatggcgttcaacatgcctgtacagggcacggcagctgacctcatgaaacttgcaatggtgcgcctttttccacaattgcgtgaagttggtgcccgcatgctcttgcaggtccacgatgaactcttgttagaagcgccaaaagagcgtgcggaagaggtggcagccctcgcgaaagaagttatggaaggcgtgtggcccttagcggtgcctcttgaagtcgaagttggtattggcgaggattggctggctgccaaaggataatga

SEQ ID NO: 3088 - protein, 841 aa, synthetic construct
  REGION 1..841: note = Variant of DNA polymerase I from Thermus sp. strain 2.9
MHHHHHHGGSGVLPVFEPKGRVLLVDGHHLAYRNFFALKGLTTSSGEPVQGVYGFAKSLLKALKEDGDVVIVVFDAKAPSFRHEAYEAYKAGRAPTPEDFPRQLALMKELVDLLGLERLEVPGFEADDVLATLAKKAEREGYEVQILTADRDLFQLLSPRISVLHPEGHRITPEWLWEKYGLRPEQWVDFRALAGDPSDNIPGVKGIGEKTALKLLKEWGSLENLLENLDQVKPESVREKILAHLEDLKLSRELSRVRTDLPLEVDFRRRREPDWEGLKAFLERLEFGSLLHEFGLLESPLPAEEAPWPPPEGAFLGYRLSRPEPMWAELLALAASAQGTVYRAEDPHGALRGLFEVRGLLAKDLAVVALREGLDLPPTDDPMLLAYLLDPSNTTPEGVARRYGGEWTEDAAKRALLAERLHANLLGRLQGEERLLWLYEEVEKPLSRVLAHMEATGVKLDVAYLEALSLEVAAHMRRLEEEVFRLAGHSFRLNSRDQLERVLFDELGLPPIGKTEKTGKRSTSAAVLEALREVHPIVDKILQYRELAKLKGTYIDRLPALVHPKTGRLHTRFNQTATATGRLSSSDPNLQNIPVRTPLGQKIRRAFVAEEGWRLVALDYRQIELRVLAHLSGDENLIRVFQEGKDIHTQTASWMFGLSAEAIDPLMRRAAKTINFGVLYGMSAFRLSQELGIPYEEAAAFIQKYFQSYPKVKAWIEKTLEEGRTRGYVETLFGRRRYVPDLNARVKGKREAAERMAFNMPVQGTAADLMKLAMVRLFPQLREVGARMLLQVHDELLLEAPKERAEEVAALAKEVMEGVWPLAVPLEVEVGIGEDWLAAKG

SEQ ID NO: 3089 - DNA, 2529 bp, synthetic construct
  misc_feature 1..2529: note = Variant of DNA polymerase I from Thermus sp. strain 2.9
  source 1..2529: mol_type = other DNA
atgcaccatcatcatcatcatggcggtagcggcgtgttaccggtgttcgagcctaaaggtcgcgtgcttctggttgatggccatcatctcgcgtatcgtaacttctttgccctgaaaggattaaccaccagcagcggcgagccggtacagggtgtctacggctttgcaaagtcgctcctgaaagctctgaaagaagacggtgatgtggtgattgttgtctttgatgcgaaagcgccaagttttcgccacgaagcgtacgaagcttacaaagccgggcgtgctccaacgccggaagactttcctcgccaattggcgcttatgaaggaattagtggatttgcttggcctcgaacgcttggaagttcccggtttcgaggcagacgacgtattagcgactctcgcaaagaaagccgaacgtgagggctatgaagtccagatcttgacagcagatcgcgatcttttccagcttttatctccgcgcatctcggtgttacacccggaagggcatcgtatcaccccggaatggctctgggagaaatatggtttgcgtcccgaacaatgggtggattttcgcgccttagcaggcgatccgagcgacaatattccgggagttaaaggtatcggcgagaagacggcgctcaagctccttaaagaatgggggtcgttggagaacttgcttaagaatttagatcaggtcaaaccagagtcagtgcgtgagaagattcttgctcacctcgaagacctcaaattaagccgcgaattgtcccgtgtacgcaccgatttgccgctcgaagttgatttccgtcgccgccgcgaacctgactgggagggtcttaaagcgtttttagagcgtcttgaatttggttcgctcttgcatgaattcggccttttagaaagcccgttaccagccgaagaagcaccttggccaccgcccgagggcgcgtttttaggttaccgtttgagtcgcccggaaccgatgtgggccgaattactggctcttgcagcgtctgcccagggacgtgtgtatcgcgcggaagaccctcatggtgcgctccgcggcctcttcgaagtccgtggactccttgccaaagacttagctgttgttgcattgcgcgaaggtcttgatttacctccgactgatgatccaatgcttcttgcgtacctcttggacccgtcaaacacgacgcccgaaggcgtagcccgtcgttacggcggcgagtggaccgaagatgcagcgaaacgcgcgttattggccgaacgtttgcacgccaatttattaggacgtttgcaaggcgaggaacgtctcctctggctttacgaagaagtggagaaaccattgagtcgcgtgctcgcgcatatggaagctaccggtgtcaaattagacgtggcgtatttggaggctctcagccttgaagttgctgcccacatgcgccgcttggaggaagaagtattccgtttagcaggccattcctttcgccttaattctcgcgatcagttagaacgtgtgttgttcgatgaacttggtctccctcctatcggcaagacagagaagaccggtaaacgtagcacttcagcggcgcgcttagaagctcttcgcgaagtccatcccattgtggacaagatcttgcagtaccgcgaactcgcgaaattgaaaggcacctatattgaccgtcttccggcattagtccacccgaaaacgggacgcctccatacccgcttcaaccaaacagccacggcgaccggtcgtttgtcctcctctgatccaaaccttcagaatattccagtacgtaccccattgggccagaagatccgccgtgcgtttgtagctgaggagggttggcgtttagtggccctcgattatagccaaattgaattacgtgtccttgcccatctttctggcgatgagaacctcatccgcgtgtttcaggaaggcaaagacattcacactcaaacggcaagctggatgtttggattatcagctgaagcgatcgatcctttgatgcgtcgtgcagcgaagaccatcaatttcggtgttctctacggtatgagtgcctttcgtttgtcgcaggaattaggcattccctatgaagaagctgcggcgttcattcagaaatactttcaaagctatcccaaagttaaagcatggatcgagaagactctcgaagaaggccgcacacgtggttacgtagagaccttatttggacgtcgccgctatgttcccgatttaaacgctcgcgtgaaaggcaagcgtgaagccgccgaacgcatggcgttcaacatgcctgtacagggcacggcagctgacctcatgaaacttgcaatggtgcgcctttttccacaattgcgtgaagttggtgcccgcatgctcttgcaggtccacgatgaactcttgttagaagcgccaaaagagcgtgcggaagaggtggcagccctcgcgaaagaagttatggaaggcgtgtggcccttagcggtgcctcttgaagtcgaagttggtattggcgaggattggctggctgccaaaggataatga

SEQ ID NO: 3090 - protein, 841 aa, synthetic construct
  REGION 1..841: note = Variant of DNA polymerase I from Thermus sp. strain 2.9
MHHHHHHGGSGVLPVFEPKGRVLLVDGHHLAYRNFFALKGLTTSSGEPVQGVYGFAKSLLKALKEDGDVVIVVFDAKAPSFRHEAYEAYKAGRAPTPEDFPRQLALMKELVDLLGLERLEVPGFEADDVLATLAKKAEREGYEVQILTADRDLFQLLSPRISVLHPEGHRITPEWLWEKYGLRPEQWVDFRALAGDPSDNIPGVKGIGEKTALKLLKEWGSLENLLKNLDQVKPESVREKILAHLEDLKLSRELSRVRTDLPLEVDFRRRREPDWEGLKAFLERLEFGSLLHEFGLLESPLPAEEAPWPPPEGAFLGYRLSRPEPMWAELLALAASAQGRVYRAEDPHGALRGLFEVRGLLAKDLAVVALREGLDLPPTDDPMLLAYLLDPSNTTPEGVARRYGGEWTEDAAKRALLAERLHANLLGRLQGEERLLWLYEEVEKPLSRVLAHMEATGVKLDVAYLEALSLEVAAHMRRLEEEVFRLAGHSFRLNSRDQLERVLFDELGLPPIGKTEKTGKRSTSAARLEALREVHPIVDKILQYRELAKLKGTYIDRLPALVHPKTGRLHTRFNQTATATGRLSSSDPNLQNIPVRTPLGQKIRRAFVAEEGWRLVALDYSQIELRVLAHLSGDENLIRVFQEGKDIHTQTASWMFGLSAEAIDPLMRRAAKTINFGVLYGMSAFRLSQELGIPYEEAAAFIQKYFQSYPKVKAWIEKTLEEGRTRGYVETLFGRRRYVPDLNARVKGKREAAERMAFNMPVQGTAADLMKLAMVRLFPQLREVGARMLLQVHDELLLEAPKERAEEVAALAKEVMEGVWPLAVPLEVEVGIGEDWLAAKG

SEQ ID NO: 3091 - DNA, 2529 bp, synthetic construct
  misc_feature 1..2529: note = Variant of DNA polymerase I from Thermus sp. strain 2.9
  source 1..2529: mol_type = other DNA
atgcaccatcatcatcatcatggcggtagcggcgtgttaccggtgttcgagcctaaaggtcgcgtgcttctggttgatggccatcatctcgcgtatcgtaacttctttgccctgaaaggattaaccaccagcagcggcgagccggtacagggtgtctacggctttgcaaagtcgctcctgaaagctctgaaagaagacggtgatgtggtgattgttgtctttgatgcgaaagcgccaagttttcgccacgaagcgtacgaagcttacaaagccgggcgtgctccaacgccggaagactttcctcgccaattggcgcttatgaaggaattagtggatttgcttggcctcgaacgcttggaagttcccggtttcgaggcagacgacgtattagcgactctcgcaaagaaagccgaacgtgagggctatgaagtccagatcttgacagcagatcgcgatcttttccagcttttatctccgcgcatctcggtgttacacccggaagggcatcgtatcaccccggaatggctctgggagaaatatggtttgcgtcccgaacaatgggtggattttcgcgccttagcaggcgatccgagcgacaatattccgggagttaaaggtatcggcgagaagacggcgctcaagctccttaaagaatgggggtcgttggagaacttgcttaagaatttagatcaggtcaaaccagagtcagtgcgtgagaagattcttgctcacctcgaagacctcaaattaagccgcgaattgtcccgtgtacgcaccgatttgccgctcgaagttgatttccgccgccgccgcgaacctgactgggagggtcttaaagcgtttttagagcgtcttgaatttggttcgctcttgcatgaattcggccttttagaaagcccgttaccagccgaagaagcaccttggccaccgcccgagggcgcgtttttaggttaccgtttgagtcgcccggaaccgatgtgggccgaattactggctcttgcagcgtctgcccagggacgtgtgtatcgcgcggaagaccctcatggtgcgctccgcggcctcttcgaagtccgtggactccttgccaaagacttagctgttgttgcattgcgcgaaggtcttgatttacctccgactgatgatccaatgcttcttgcgtacctcttggacccgtcaaacacgacgcccgaaggcgtagcccgtcgttacggcggcgagtggaccgaagatgcagcgaaacgcgcgttattggccgaacgtttgcacgccaatttattaggacgtttgcaaggcgaggaacgtctcctctggctttacgaagaagtggagaaaccattgagtcgcgtgctcgcgcatatggaagctaccggtgtcaaattagacgtggcgtatttggaggcactcagccttgaagttgctgcccacatgcgccgcttggaggaagaagtattccgtttagcaggccgttcctttcgccttaattctcgcgatcagttagaacgtgtgttgttcgatgaacttggtctccctcctatcggcaagacagagaagaccggtaaacgtagcacttcagcggcggttttagaagctcttcgcgaagtccatcccattgtggacaagatcttgcagtaccgcgaactcgcgaaattgaaaggcacctatattgaccgtcttccggcattagtccacccgaaaacgggacgcctccatacccgcttcaaccaaacagccacggcgaccggtcgtttgtcctcctctgatccaaaccttcagaatattccagtacgtaccccattgggccagaagatccgccgtgcgtttgtagctgaggagggttggcgtttagtggccctcgattatagccaaattgaattacgtgtccttgcccatctttctggcgatgagaacctcatccgcgtgtttcaggaaggcaaagacattcacactcaaacggcaagctggatgtttggattatcagctgaagcgatcgatcctttgatgcgtcgtgcagcgaagaccatcaatttcggtgttctctacggtatgagtgcctttcgtttgtcgcaggaattaggcattccctatgaagaagcttcggcgttcattcagaaatactttcaaagctatcccaaagttaaagcatggatcgagaagactctcgaagaaggccgcacacgtggttacgtagagaccttatttggacgtcgccgctatgttcccgatttaaacgctcgcgtgaaaggcaagcgtgaagccgccgaacgcatggcgttcaacatgcctgtacagggcacggcagctgacctcatgaaacttgcaatggtgcgcctttttccacaattgcgtgaagttggtgcccgcatgctcttgcaggtccacgatgaactcttgttagaagcgccaaaagagcgtgcggaagaggtggcagccctcgcgaaagaagttatggaaggcgtgtggcccttagcggtgcctcttgaagtcgaagttggtattggcgaggattggctggctgccaaaggataatga

SEQ ID NO: 3092 - protein, 841 aa, synthetic construct
  REGION 1..841: note = Variant of DNA polymerase I from Thermus sp. strain 2.9
MHHHHHHGGSGVLPVFEPKGRVLLVDGHHLAYRNFFALKGLTTSSGEPVQGVYGFAKSLLKALKEDGDVVIVVFDAKAPSFRHEAYEAYKAGRAPTPEDFPRQLALMKELVDLLGLERLEVPGFEADDVLATLAKKAEREGYEVQILTADRDLFQLLSPRISVLHPEGHRITPEWLWEKYGLRPEQWVDFRALAGDPSDNIPGVKGIGEKTALKLLKEWGSLENLLKNLDQVKPESVREKILAHLEDLKLSRELSRVRTDLPLEVDFRRRREPDWEGLKAFLERLEFGSLLHEFGLLESPLPAEEAPWPPPEGAFLGYRLSRPEPMWAELLALAASAQGRVYRAEDPHGALRGLFEVRGLLAKDLAVVALREGLDLPPTDDPMLLAYLLDPSNTTPEGVARRYGGEWTEDAAKRALLAERLHANLLGRLQGEERLLWLYEEVEKPLSRVLAHMEATGVKLDVAYLEALSLEVAAHMRRLEEEVFRLAGRSFRLNSRDQLERVLFDELGLPPIGKTEKTGKRSTSAAVLEALREVHPIVDKILQYRELAKLKGTYIDRLPALVHPKTGRLHTRFNQTATATGRLSSSDPNLQNIPVRTPLGQKIRRAFVAEEGWRLVALDYSQIELRVLAHLSGDENLIRVFQEGKDIHTQTASWMFGLSAEAIDPLMRRAAKTINFGVLYGMSAFRLSQELGIPYEEASAFIQKYFQSYPKVKAWIEKTLEEGRTRGYVETLFGRRRYVPDLNARVKGKREAAERMAFNMPVQGTAADLMKLAMVRLFPQLREVGARMLLQVHDELLLEAPKERAEEVAALAKEVMEGVWPLAVPLEVEVGIGEDWLAAKG

SEQ ID NO: 3093 - DNA, 2529 bp, synthetic construct
  misc_feature 1..2529: note = Variant of DNA polymerase I from Thermus sp. strain 2.9
  source 1..2529: mol_type = other DNA
atgcaccatcatcatcatcatggcggtagcggcgtgttaccggtgttcgagcctaaaggtcgcgtgcttctggttgatggccatcatctcgcgtatcgtaacttctttgccctgaaaggattaaccaccagctcgggcgagccggtacagggtgtctacggctttgcaaagtcgctcctgaaagctctgaaagaagacggtgatgtggtgattgttgtctttgatgcgaaagcgccaagttttcgccacgaagcgtacgaagcttacaaagccgggcgtgctccaacgccggaagactttcctcgccaattggcgcttatgaaggaattagtggatttgcttggcctcgaacgcttggaagttcccggtttcgaggcagacgacgtattagcgactctcgcaaagaaagccgaacgtgagggctatgaagtccagatcttgacagcagatcgcgatcttttccagcttttatctccgcgcatctcggtgttacacccggaagggcatcgtatcaccccggaatggctctgggagaaatatggtttgcgtcccgaacaatgggtggattttcgcgccttagcaggcgatccgagcgacaatattccgggagttaaaggtatcggcgagaagacggcgctcaagctccttaaagaatgggggtcgttggagaacttgcttgaaaatttagatcaggtcaaaccagagtcagtgcgtgagaagattcttgctcacctcgaagacctcaaattaagccgcgaattgtcccgtgtacgcaccgatttgccgctcgaagttgatttccgtcgccgccgcgaacctgactgggagggtcttaaagcgtttttagagcgtcttgaatttggttcgctcttgcatgaattcggccttttagaaagcccgttaccggccgaagaagcaccttggccaccgcccgagggcgcgtttttaggttaccgtttgagtcgcccggaaccgatgtgggccgaattactggctcttgcagcgtctgcccagggacgtgtgtatcgcgcggaagaccctcatggtgcgctccgcggcctcttcgaagtccgtggactccttgccaaagacttagctgttgttgcattgcgcgaaggtcttgatttacctccgactgatgatccaatgcttcttgcgtacctcttggacccgtcaaacacgacgcccgaaggcgtagcccgtcgttacggcggcgagtggaccgaagatgcagcgaaacgcgcgttattggccgaacgtttgcacgcaaatttattaggacgtttgcaaggcgaggaacgtctcctctggctttacgaagaagtggagaaaccattgagtcgcgtgctcgcgcatatggaagctaccggtgtcaaattagacgtggcgtatttggaggctctcagccttgaagttgctgcccacatgcgccgcttggaggaagaagtattccgtttagcaggccattcctttcgccttaattctcgcgatcagttagaacgtgtgttgttcgatgaacttggtctccctcctatcggcaagacagagaagaccggtaaacgtagcacttcagcggcggttttagaagctcttcgcgaagtccatcccattgtggacaagatcttgcaataccgcgaactcgcgaaattgaaaggcacctatattgaccgtcttccggcattagtccacccgaaaacgggacgcctccatacccgcttcaaccaaacagccacggcgaccggtcgtttgtcctcctctgatccaaaccttcagaatattccagtacgtaccccattgggccagaagatccgccgtgcgtttgtagctgaggagggttggcgtttagtggccctcgattatagccaaattgaattacgtgtccttgcccatctttctggcgatgagaacctcatccgcgtgtttcaggaaggcaaagacattcacactcaaacggcaagctggatgtttggattatcagctgaagcgatcgatcctttgatgcgtcgtgcagcgaagaccatcaatttcggtgttctctacggtatgagtgcctttcgtttgtcgcaggaattaggcattccctatgaagaagctgcggcgttcattcagaaatactttcaaagctatcccaaagttaaagcatggatcgagaagactctcgaagaaggccgcacacgtggttacgtagagaccttatttggacgtcgccgctatgttcccgatttaaacgctcgcgtgaaaggcaagcgtgaagccgccgaacgcatggcgttcaacatgcctgtacagggcacggcagctgacctcatgaaacttgcaatggtgcgcctttttccacaattgcgtgaagttggtgcccgcatgctcttgcaggtccacgatgaactcttgttagaagcgccaaaagagcgtgcggaagaggtggcagccctcgcgaaagaagttatggaaggcgtgtggcccttagcggtgcctcttgaagtcgaagttggtattggcgaggattggctggctgccaaaggataatga

SEQ ID NO: 3094 - protein, 841 aa, synthetic construct
  REGION 1..841: note = Variant of DNA polymerase I from Thermus sp. strain 2.9
MHHHHHHGGSGVLPVFEPKGRVLLVDGHHLAYRNFFALKGLTTSSGEPVQGVYGFAKSLLKALKEDGDVVIVVFDAKAPSFRHEAYEAYKAGRAPTPEDFPRQLALMKELVDLLGLERLEVPGFEADDVLATLAKKAEREGYEVQILTADRDLFQLLSPRISVLHPEGHRITPEWLWEKYGLRPEQWVDFRALAGDPSDNIPGVKGIGEKTALKLLKEWGSLENLLENLDQVKPESVREKILAHLEDLKLSRELSRVRTDLPLEVDFRRRREPDWEGLKAFLERLEFGSLLHEFGLLESPLPAEEAPWPPPEGAFLGYRLSRPEPMWAELLALAASAQGRVYRAEDPHGALRGLFEVRGLLAKDLAVVALREGLDLPPTDDPMLLAYLLDPSNTTPEGVARRYGGEWTEDAAKRALLAERLHANLLGRLQGEERLLWLYEEVEKPLSRVLAHMEATGVKLDVAYLEALSLEVAAHMRRLEEEVFRLAGHSFRLNSRDQLERVLFDELGLPPIGKTEKTGKRSTSAAVLEALREVHPIVDKILQYRELAKLKGTYIDRLPALVHPKTGRLHTRFNQTATATGRLSSSDPNLQNIPVRTPLGQKIRRAFVAEEGWRLVALDYSQIELRVLAHLSGDENLIRVFQEGKDIHTQTASWMFGLSAEAIDPLMRRAAKTINFGVLYGMSAFRLSQELGIPYEEAAAFIQKYFQSYPKVKAWIEKTLEEGRTRGYVETLFGRRRYVPDLNARVKGKREAAERMAFNMPVQGTAADLMKLAMVRLFPQLREVGARMLLQVHDELLLEAPKERAEEVAALAKEVMEGVWPLAVPLEVEVGIGEDWLAAKG

SEQ ID NO: 3095 - DNA, 2529 bp, synthetic construct
  misc_feature 1..2529: note = Variant of DNA polymerase I from Thermus sp. strain 2.9
  source 1..2529: mol_type = other DNA
atgcaccatcatcatcatcatggcggtagcggcgtgttaccggtgttcgagcctaaaggtcgcgtgcttctggttgatggccatcatctcgcgtatcgtaacttctttgccctgaaaggattaaccaccagcagcggcgagccggtacagggtgtctacggctttgcaaagtcgctcctgaaagctctgaaagaagacggtgatgtggtgattgttgtctttgatgcgaaagcgccaagttttcgccacgaagcgtacgaagcttacaaagccgggcgtgctccaacgccggaagactttcctcgccaattggcgcttatgaaggaattagtggatttgcttggcctcgaacgcttggaagttcccggtttcgaggcagacgacgtattagcgactctcgcaaagaaagccgaacgtgagggctatgaagtccagatcttgacagcagatcgcgatcttttccagcttttatctccgcgcatctcggtgttacacccggaagggcatcgtatcaccccggaatggctctgggagaaatatggtttgcgtcccgaacaatgggtggattttcgcgccttagcaggcgatccgagcgacaatattccgggagttaaaggtatcggcgagaagacggcgctcaagctccttaaagaatgggggtcgttggagaacttgcttgaaaatttagatcaggtcaaaccagagtcagtgcgtgagaagattcttgctcacctcgaagacctcaaattaagccgcgaattgtcccgtgtacgcaccgatttgccgctcgaagttgatttccgtcgccgccgcgaacctgactgggagggtcttaaagcgtttttagagcgtcttgaatttggttcgctcttgcatgaattcggccttttagaaagcccgttactggccgaagaagcaccttggccaccgcccgagggcgcgtttttaggttaccgtttgagtcgcccggaaccgatgtgggccgaattactggctcttgcagcgtctgcccagggacgtgtgtatcgcgcggaagaccctcatggtgcgctccgcggcctcttcgaagtccgtggactccttgccaaagacttagctgttgttgcattgcgcgaaggtcttgatttacctccgactgatgatccaatgcttcttgcgtacctcttggacccgtcaaacacgacgcccgaaggcgtagcccgtcgttacggcggcgagtggaccgaagatgcagcgaaacgcgcgttattggccgaacgtttgcacgcaaatttattaggacgtttgcaaggcgaggaacgtctcctctggctttacgaagaagtggagaaaccattgagtcgcgtgctcgcgcatatggaagctaccggtgtcaaattagacgtggcgtatttggaggctctcagccttgaagttgctgcccacatgcgccgcttggaggaagaagtattccgtttagcaggccattcctttcgccttaattctcgcgatcagttagaacgtgtgttgttcgatgaacttggtctccctcctatcggcaagacagagaagaccggtaaacgtagcacttcagcggcggttttagaagctcttcgcgaagtccatcccattgtggacaagatcttgcagtaccgcgaactcgcgaaattgaaaggcacctatattgaccgtcttccggcattagtccacccgaaaacgggacgcctccatacccgcttcaaccaaacagccacggcgaccggtcgtttgtcctcctctgatccaaaccttcagaatattccagtacgtaccccattgggccagaagatccgccgtgcgtttgtagctgaggagggttggcgtttagtggccctcgattatagccaaattgaattacgtgtccttgcccatctttctggcgatgagaacctcatccgcgtgtttcaggaaggcaaagacattcacactcaaacggcaagctggatgtttggattatcagctgaagcgatcgatcctttgatgcgtcgtgcagcgaagaccatcaatttcggtgttctctacggtatgagtgcctttcgtttgtcgcaggaattaggcattccctatgaagaagctgcggcgttcattcagaaatactttcaaagctatcccaaagttaaagcatggatcgagaagactctcgaagaaggccgcacacgtggttacgtagagaccttatttggacgtcgccgctatgttcccgatttaaacgctcgcgtgaaaggcaagcgtgaagccgccgaacgcatggcgttcaacatgcctgtacagggcacggcagctgacctcatgaaacttgcaatggtgcgcctttttccacaattgcgtgaagttggtgcccgcatgctcttgcaggtccacgatgaactcttgttagaagcgccaaaagagcgtgcggaagaggtggcagccctcgcgaaagaagttatggaaggcgtgtggcccttagcggtgcctcttgaagtcgaagttggtattggcgaggattggctggctgccaaaggataatga

SEQ ID NO: 3096 - protein, 841 aa, synthetic construct
  REGION 1..841: note = Variant of DNA polymerase I from Thermus sp. strain 2.9
MHHHHHHGGSGVLPVFEPKGRVLLVDGHHLAYRNFFALKGLTTSSGEPVQGVYGFAKSLLKALKEDGDVVIVVFDAKAPSFRHEAYEAYKAGRAPTPEDFPRQLALMKELVDLLGLERLEVPGFEADDVLATLAKKAEREGYEVQILTADRDLFQLLSPRISVLHPEGHRITPEWLWEKYGLRPEQWVDFRALAGDPSDNIPGVKGIGEKTALKLLKEWGSLENLLENLDQVKPESVREKILAHLEDLKLSRELSRVRTDLPLEVDFRRRREPDWEGLKAFLERLEFGSLLHEFGLLESPLLAEEAPWPPPEGAFLGYRLSRPEPMWAELLALAASAQGRVYRAEDPHGALRGLFEVRGLLAKDLAVVALREGLDLPPTDDPMLLAYLLDPSNTTPEGVARRYGGEWTEDAAKRALLAERLHANLLGRLQGEERLLWLYEEVEKPLSRVLAHMEATGVKLDVAYLEALSLEVAAHMRRLEEEVFRLAGHSFRLNSRDQLERVLFDELGLPPIGKTEKTGKRSTSAAVLEALREVHPIVDKILQYRELAKLKGTYIDRLPALVHPKTGRLHTRFNQTATATGRLSSSDPNLQNIPVRTPLGQKIRRAFVAEEGWRLVALDYSQIELRVLAHLSGDENLIRVFQEGKDIHTQTASWMFGLSAEAIDPLMRRAAKTINFGVLYGMSAFRLSQELGIPYEEAAAFIQKYFQSYPKVKAWIEKTLEEGRTRGYVETLFGRRRYVPDLNARVKGKREAAERMAFNMPVQGTAADLMKLAMVRLFPQLREVGARMLLQVHDELLLEAPKERAEEVAALAKEVMEGVWPLAVPLEVEVGIGEDWLAAKG

SEQ ID NO: 3097 - DNA, 2529 bp, synthetic construct
  misc_feature 1..2529: note = Variant of DNA polymerase I from Thermus sp. strain 2.9
  source 1..2529: mol_type = other DNA
atgcaccatcatcatcatcatggcggtagcggcgtgttaccggtgttcgagcctaaaggtcgcgtgcttctggttgatggccatcatctcgcgtatcgtaacttctttgccctgaaaggattaaccaccagcagcggcgagccggtacagggtgtctacggctttgcaaagtcgctcctgaaagctctgaaagaagacggtgatgtggtgattgttgtctttgatgcgaaagcgccaagttttcgccacgaagcgtacgaagcttacaaagccgggcgtgctccaacgccggaagactttcctcgccaattggcgcttatgaaggaattagtggatttgcttggcctcgaacgcttggaagttcccggtttcgaggcagacgacgtattagcgactctcgcaaagaaagccgaacgtgagggctatgaagtccagatcttgacagcagatcgcgatcttttccagcttttatctccgcgcatctcggtgttacacccggaagggcatcgtatcaccccggaatggctctgggagaaatatggtttgcgtcccgaacaatgggtggattttcgcgccttagcaggcgatccgagcgacaatattccgggagttaaaggtatcggcgagaagacggcgctcaagctccttaaagaatgggggtcgttggagaacttgcttaagaatttagatcaggtcaaaccagagtcagtgcgtgagaagattcttgctcacctcgaagacctcaaattaagccgcgaattgtcccgtgtacgcaccgatttgccgctcgaagttgatttccaacgccgccgcgaacctgactgggagggtcttaaagcgtttttagagcgtcttgaatttggttcgctcttgcatgaattcggccttttagaaagcccgttaccagccgaagaagcaccttggccaccgcccgagggcgcgtttttaggttaccgtttgagtcgcccggaaccgatgtgggccgaattactggctcttgcagcgtctgcccagggacgtgtgtatcgcgcggaagaccctcatggtgcgctccgcggcctcttcgaagtccgtggactccttgccaaagacttagctgttgttgcattgcgcgaaggtcttgatttacctccgactgatgatccaatgcttcttgcgtacctcttggacccgtcaaacacgacgcccgaaggcgtagcccgtcgttacggcggcgagtggaccgaagatgcagcgaaacgcgcgttattggccgaacgtttgcacgccaatttattaggacgtttgcaaggcgaggaacgtctcctctggctttacgaagaagtggagaaaccattgagtcgcgtgctcgcgcatatggaagctaccggtgtcaaattagacgtggcgtatttggagaatctcagccttgaagttgctgcccacatgcgccgcttggaggaagaagtattccgtttagcaggccgttcctttcgccttaattctcgcgatcagttagaacgtgtgttgttcgatgaacttggtctccgtcctatcggcaagacagagaagaccggtaaacgtagcacttcagcggcggttttagaagctcttcgcgaagtccatcccattgtggacaagatcttgcagtaccgcgaactcgcgaaattgaaaggcacctatattgaccgtcttccggcattagtccacccgaaaacgggacgcctccatacccgcttcaaccaaacagccacggcgaccggtcgtttgtcctcctctgatccaaaccttcagaatattccagtacgtaccccattgggccagaagatccgccgtgcgtttgtagctgaggagggttggcgtttagtggccctcgattatagccaaattgaattacgtgtccttgcccatctttctggcgatgagaacctcatccgcgtgtttcaggaaggcaaagacattcacactcaaacggcaagctggatgtttggattatcagctgaagcgatcgatcctttgatgcgtcgtgcagcgaagaccatcaatttcggtgttctctacggtatgagtgcctttcgtttgtcgcaggaattaggcattccctatgaagaagctcaggcgttcattcagaaatactttcaaagctatcccaaagttaaagcatggatcgagaagactctcgaagaaggccgcacacgtggttacgtagagaccttatttggacgtcgccgctatgttcccgatttaaacgctcgcgtgaaaggcaagcgtgaagccgccgaacgcatggcgttcaacatgcctgtacagggcacggcagctgacctcatgaaacttgcaatggtgcgcctttttccacaattgcgtgaagttggtgcccgcatgctcttgcaggtccacgatgaactcttgttagaagcgccaaaagagcgtgcggaagaggtggcagccctcgcgaaagaagttatggaaggcgtgtggcccttagcggtgcctcttgaagtcgaagttggtattggcgaggattggctggctgccaaaggataatga

SEQ ID NO: 3098 - protein, 841 aa, synthetic construct
  REGION 1..841: note = Variant of DNA polymerase I from Thermus sp. strain 2.9
MHHHHHHGGSGVLPVFEPKGRVLLVDGHHLAYRNFFALKGLTTSSGEPVQGVYGFAKSLLKALKEDGDVVIVVFDAKAPSFRHEAYEAYKAGRAPTPEDFPRQLALMKELVDLLGLERLEVPGFEADDVLATLAKKAEREGYEVQILTADRDLFQLLSPRISVLHPEGHRITPEWLWEKYGLRPEQWVDFRALAGDPSDNIPGVKGIGEKTALKLLKEWGSLENLLKNLDQVKPESVREKILAHLEDLKLSRELSRVRTDLPLEVDFQRRREPDWEGLKAFLERLEFGSLLHEFGLLESPLPAEEAPWPPPEGAFLGYRLSRPEPMWAELLALAASAQGRVYRAEDPHGALRGLFEVRGLLAKDLAVVALREGLDLPPTDDPMLLAYLLDPSNTTPEGVARRYGGEWTEDAAKRALLAERLHANLLGRLQGEERLLWLYEEVEKPLSRVLAHMEATGVKLDVAYLENLSLEVAAHMRRLEEEVFRLAGRSFRLNSRDQLERVLFDELGLRPIGKTEKTGKRSTSAAVLEALREVHPIVDKILQYRELAKLKGTYIDRLPALVHPKTGRLHTRFNQTATATGRLSSSDPNLQNIPVRTPLGQKIRRAFVAEEGWRLVALDYSQIELRVLAHLSGDENLIRVFQEGKDIHTQTASWMFGLSAEAIDPLMRRAAKTINFGVLYGMSAFRLSQELGIPYEEAQAFIQKYFQSYPKVKAWIEKTLEEGRTRGYVETLFGRRRYVPDLNARVKGKREAAERMAFNMPVQGTAADLMKLAMVRLFPQLREVGARMLLQVHDELLLEAPKERAEEVAALAKEVMEGVWPLAVPLEVEVGIGEDWLAAKG

SEQ ID NO: 3099 - DNA, 2529 bp, synthetic construct
  misc_feature 1..2529: note = Variant of DNA polymerase I from Thermus sp. strain 2.9
  source 1..2529: mol_type = other DNA
atgcaccatcatcatcatcatggcggtagcggcgtgttaccggtgttcgagcctaaaggtcgcgtgcttctggttgatggccatcatctcgcgtatcgtaacttctttgccctgaaaggattaaccaccagcagcggcgagccggtacagggtgtctacggctttgcaaagtcgctcctgaaagctctgaaagaagacggtgatgtggtgattgttgtctttgatgcgaaagcgccaagttttcgccacgaagcgtacgaagcttacaaagccgggcgtgctccaacgccggaagactttcctcgccaattggcgcttatgaaggaattagtggatttgcttggcctcgaacgcttggaagttcccggtttcgaggcagacgacgtattagcgactctcgcaaagaaagccgaacgtgagggctatgaagtccagatcttgacagcagatcgcgatcttttccagcttttatctccgcgcatctcggtgttacacccggaagggcatcgtatcaccccggaatggctctgggagaaatatggtttgcgtcccgaacaatgggtggattttcgcgccttagcaggcgatccgagcgacaatattccgggagttaaaggtatcggcgagaagacggcgctcaagctccttaaagaatgggggtcgttggagaacttgcttaagaatttagatcaggtcaaaccagagtcagtgcgtgagaagattcttgctcacctcgaagacctcaaattaagccgcgaattgtcccgtgtacgcaccgatttgccgctcgaagttgatttccagcgccgccgcgaacctgactgggagggtcttaaagcgtttttagagcgtcttgaatttggttcgctcttgcatgaattcggccttttagaaagcccgttaccagccgaagaagcaccttggccaccgcccgagggcgcgtttttaggttaccgtttgagtcgcccggaaccgatgtgggccgaattactggctcttgcagcgtctgcccagggacgtgtgtatcgcgcggaagaccctcatggtgcgctccgcggcctcttcgaagtccgtggactccttgccaaagacttagctgttgttgcattgcgcgaaggtcttgatttacctccgactgatgatccaatgcttcttgcgtacctcttggacccgtcaaacacgacgcccgaaggcgtagcccgtcgttacggcggcgagtggaccgaagatgcagcgaaacgcgcgttattggccgaacgtttgcacgccaatttattaggacgtttgcaaggcgaggaacgtctcctctggctttacgaagaagtggagaaaccattgagtcgcgtgctcgcgcatatggaagctaccggtgtcaaattagacgtggcgtatttggaggctctcagccttgaagttgctgcccacatgcgccgcttggaggaagaagtattccgtttagcaggccattcctttcgccttaattctcgcgatcagttagaacgtgtgttgttcgatgaacttggtctccctcctatcggcaagacagagaagaccggtaaacgtagcacttcagcggcggttttagaagctcttcgcgaagtccatcccattgtggacaagatcttgcagtaccgcgaactcgcgaaattgaaaggcacctatattgaccgtcttccggcattagtccacccgaaaacgggacgcctccatacccgcttcaaccaaacagccacggcgaccggtcgtttgtcctcctctgatccaaaccttcagaatattccagtacgtaccccattgggccagaagatccgcaaagcgtttgtagctgaggagggttggcgtttagtggccctcgattatcgtcaaattgaattacgtgtccttgcccatctttctggcgatgagaacctcatccgcgtgtttcaggaaggcaaagacattcacactcaaacggcaagctggatgtttggattatcagctgaagcgatcgatcctttgatgcgtcgtgcagcgaagaccatcaatttcggtgttctctacggtatgagtgcctttcgtttgtcgcaggaattaggcattccctatgaagaagctgcggcgttcattcagaaatactttcaaagctatcccaaagttaaagcatggatcgagaagactctccgtgaaggccgcacacgtggttacgtagagaccttatttggacgtcgccgctatgttcccgatttaaacgctcgcgtgaaaggcaagcgtgaagccgccgaacgcatggcgttcaacatgcctgtacagggcacggcagctgacctcatgaaacttgcaatggtgcgcctttttccacaattgcgtgaagttggtgcccgcatgctcttgcaggtccacgatgaactcttgttagaagcgccaaaagagcgtgcggaagaggtggcagccctcgcgaaagaagttatggaaggcgtgtggcccttagcggtgcctcttgaagtcgaagttggtattggcgaggattggctggctgccaaaggataatga

SEQ ID NO: 3100 - protein, 841 aa, synthetic construct
  REGION 1..841: note = Variant of DNA polymerase I from Thermus sp. strain 2.9
MHHHHHHGGSGVLPVFEPKGRVLLVDGHHLAYRNFFALKGLTTSSGEPVQGVYGFAKSLLKALKEDGDVVIVVFDAKAPSFRHEAYEAYKAGRAPTPEDFPRQLALMKELVDLLGLERLEVPGFEADDVLATLAKKAEREGYEVQILTADRDLFQLLSPRISVLHPEGHRITPEWLWEKYGLRPEQWVDFRALAGDPSDNIPGVKGIGEKTALKLLKEWGSLENLLKNLDQVKPESVREKILAHLEDLKLSRELSRVRTDLPLEVDFQRRREPDWEGLKAFLERLEFGSLLHEFGLLESPLPAEEAPWPPPEGAFLGYRLSRPEPMWAELLALAASAQGRVYRAEDPHGALRGLFEVRGLLAKDLAVVALREGLDLPPTDDPMLLAYLLDPSNTTPEGVARRYGGEWTEDAAKRALLAERLHANLLGRLQGEERLLWLYEEVEKPLSRVLAHMEATGVKLDVAYLEALSLEVAAHMRRLEEEVFRLAGHSFRLNSRDQLERVLFDELGLPPIGKTEKTGKRSTSAAVLEALREVHPIVDKILQYRELAKLKGTYIDRLPALVHPKTGRLHTRFNQTATATGRLSSSDPNLQNIPVRTPLGQKIRKAFVAEEGWRLVALDYRQIELRVLAHLSGDENLIRVFQEGKDIHTQTASWMFGLSAEAIDPLMRRAAKTINFGVLYGMSAFRLSQELGIPYEEAAAFIQKYFQSYPKVKAWIEKTLREGRTRGYVETLFGRRRYVPDLNARVKGKREAAERMAFNMPVQGTAADLMKLAMVRLFPQLREVGARMLLQVHDELLLEAPKERAEEVAALAKEVMEGVWPLAVPLEVEVGIGEDWLAAKG

SEQ ID NO: 3101 - DNA, 2529 bp, synthetic construct
  misc_feature 1..2529: note = Variant of DNA polymerase I from Thermus sp. strain 2.9
  source 1..2529: mol_type = other DNA
atgcaccatcatcatcatcatggcggtagcggcgtgttaccggtgttcgagcctaaaggtcgcgtgcttctggttgatggccatcatctcgcgtatcgtaacttctttgccctgaaaggattaaccaccagcagcggcgagccggtacagggtgtctacggctttgcaaagtcgctcctgaaagctctgaaagaagacggtgatgtggtgattgttgtctttgatgcgaaagcgccaagttttcgccacgaagcgtacgaagcttacaaagccgggcgtgctccaacgccggaagactttcctcgccaattggcgcttatgaaggaattagtggatttgcttggcctcgaacgcttggaagttcccggtttcgaggcagacgacgtattagcgactctcgcaaagaaagccgaacgtgagggctatgaagtccagatcttgacagcagatcgcgatcttttccagcttttatctccgcgcatctcggtgttacacccggaagggcatcgtatcaccccggaatggctctgggagaaatatggtttgcgtcccgaacaatgggtggattttcgcgccttagcaggcgatccgagcgacaatattccgggagttaaaggtatcggcgagaagacggcgctcaagctccttaaagaatgggggtcgttggagaacttgcttaagaatttagatcaggtcaaaccagagtcagtgcgtgagaagattcttgctcacctcgaagacctcaaattaagccgcgaattgtcccgtgtacgcaccgatttgccgctcgaagttgatttccgtcgccgccgcgaacctgactgggagggtcttaaagcgtttttagagcgtcttgaatttggttcgctcttgcatgaattcggccttttagaaagcccgttaccagccgaagaagcaccttggccaccgcccgagggcgcgtttttaggttaccgtttgagtcgcccggaaccgatgtgggccgaattagcagctcttgcagcgtctgcccagggacgtgtgtatcgcgcggaagaccctcatggtgcgctccgcggcctcttcgaagtccgtggactccttgccaaagacttagctgttgttgcattgcgcgaaggtcttgatttacctccgactgatgatccaatgcttcttgcgtacctcttggacccgtcaaacacgacgcccgaaggcgtagcccgtcgttacggcggcgagtggaccgaagatgcagcgaaacgcgcgttattggccgaacgtttgcacgcgaatttattaggacgtttgcaaggcgaggaacgtctcctctggctttacgaagaagtggagaaaccattgagtcgcgtgctcgcgcatatggaagctaccggtgtcaaattagacgtggcgtatttggaggctctcagccttgaagttgctgcccacatgcgccgcttggaggaagaagtattccgtttagcaggccattcctttcgccttaattctcgcgatcagttagaacgtgtgttgttcgatgaacttggtctccctcctatcggcaagacagagaagaccggtaaacgtagcacttcacgtgcggttttagaagctcttcgcgaagtccatcccattgtggacaagatcttgcagtaccgcgaactcgcgaaattgaaaggcacctatattgaccgtcttccggcattagtccacccgaaaacgggacgcctccatacccgcttcaaccaaacagccacggcgaccggtcgtttgtcctcctctgatccaaaccttcagaatattccagtacgtaccccattgggccagaagatccgcaaagcgtttgtagctgaggagggttggcgtttagtggccctcgattatagccaaattgaattacgtgtccttgcccatctttctggcgatgagaacctcatccgcgtgtttcaggaaggcaaagacattcacactcaaacggcaagctggatgtttggattatcagctgaagcgatcgatcctttgatgcgtcgtgcagcgaagaccatcaatttcggtgttctctacggtatgagtgcctttcgtttgtcgcaggaattaggcattccctatgaagaagctcaggcgttcattcagaaatactttcaaagctatcccaaagttaaagcatggatcgagaagactctcgaagaaggccgcacacgtggttacgtagagaccttatttggacgtcgccgctatgttcccgatttaaacgctcgcgtgaaaggcaagcgtgaagccgccgaacgcatggcgttcaacatgcctgtacagggcacggcagctgacctcatgaaacttgcaatggtgcgcctttttccacaattgcgtgaagttggtgcccgcatgctcttgcaggtccacgatgaactcttgttagaagcgccaaaagagcgtgcggaagaggtggcagccctcgcgaaagaagttatggaaggcgtgtggcccttagcggtgcctcttgaagtcgaagttggtattggcgaggattggctggctgccaaaggataatga

SEQ ID NO: 3102 - protein, 841 aa, synthetic construct
  REGION 1..841: note = Variant of DNA polymerase I from Thermus sp. strain 2.9
MHHHHHHGGSGVLPVFEPKGRVLLVDGHHLAYRNFFALKGLTTSSGEPVQGVYGFAKSLLKALKEDGDVVIVVFDAKAPSFRHEAYEAYKAGRAPTPEDFPRQLALMKELVDLLGLERLEVPGFEADDVLATLAKKAEREGYEVQILTADRDLFQLLSPRISVLHPEGHRITPEWLWEKYGLRPEQWVDFRALAGDPSDNIPGVKGIGEKTALKLLKEWGSLENLLKNLDQVKPESVREKILAHLEDLKLSRELSRVRTDLPLEVDFRRRREPDWEGLKAFLERLEFGSLLHEFGLLESPLPAEEAPWPPPEGAFLGYRLSRPEPMWAELAALAASAQGRVYRAEDPHGALRGLFEVRGLLAKDLAVVALREGLDLPPTDDPMLLAYLLDPSNTTPEGVARRYGGEWTEDAAKRALLAERLHANLLGRLQGEERLLWLYEEVEKPLSRVLAHMEATGVKLDVAYLEALSLEVAAHMRRLEEEVFRLAGHSFRLNSRDQLERVLFDELGLPPIGKTEKTGKRSTSRAVLEALREVHPIVDKILQYRELAKLKGTYIDRLPALVHPKTGRLHTRFNQTATATGRLSSSDPNLQNIPVRTPLGQKIRKAFVAEEGWRLVALDYSQIELRVLAHLSGDENLIRVFQEGKDIHTQTASWMFGLSAEAIDPLMRRAAKTINFGVLYGMSAFRLSQELGIPYEEAQAFIQKYFQSYPKVKAWIEKTLEEGRTRGYVETLFGRRRYVPDLNARVKGKREAAERMAFNMPVQGTAADLMKLAMVRLFPQLREVGARMLLQVHDELLLEAPKERAEEVAALAKEVMEGVWPLAVPLEVEVGIGEDWLAAKG

SEQ ID NO: 3103 - DNA, 2529 bp, synthetic construct
  misc_feature 1..2529: note = Variant of DNA polymerase I from Thermus sp. strain 2.9
  source 1..2529: mol_type = other DNA
atgcaccatcatcatcatcatggcggtagcggcgtgttaccggtgttcgagcctaaaggtcgcgtgcttctggttgatggccatcatctcgcgtatcgtaacttctttgccctgaaaggattaaccaccagcagcggcgagccggtacagggtgtctacggctttgcaaagtcgctcctgaaagctctgaaagaagacggtgatgtggtgattgttgtctttgatgcgaaagcgccaagttttcgccacgaagcgtacgaagcttacaaagccgggcgtgctccaacgccggaagactttcctcgccaattggcgcttatgaaggaattagtggatttgcttggcctcgaacgcttggaagttcccggtttcgaggcagacgacgtattagcgactctcgcaaagaaagccgaacgtgagggctatgaagtccagatcttgacagcagatcgcgatcttttccagcttttatctccgcgcatctcggtgttacacccggaagggcatcgtatcaccccggaatggctctgggagaaatatggtttgcgtcccgaacaatgggtggattttcgcgccttagcaggcgatccgagcgacaatattccgggagttaaaggtatcggcgagaagacggcgctcaagctccttaaagaatgggggtcgttggagaacttgcttaagaatttagatcaggtcaaaccagagtcagtgcgtgagaagattcttgctcacctcgaagacctcaaattaagccgcgaattgtcccgtgtacgcaccgatttgccgctcgaagttgatttccgtcgccgccgcgaacctgactgggagggtcttaaagcgtttttagagcgtcttgaatttggttcgctcttgcatgaattcggccttttagaaagcccgttaccagccgaagaagcaccttggccaccgcccgagggcgcgtttttaggttaccgtttgagtcgcccggaaccgatgtgggccgaattactggctcttgcagcgtctgcccagggacgtgtgtatcgcgcggaagaccctcatggtgcgctccgcggcctcttcgaagtccgtggactccttgccaaagacttagctgttgttgcattgcgcgaaggtcttgatttacctccgactgatgatccaatgcttcttgcgtacctcttggacccgtcaaacacgacgcccgaaggcgtagcccgtcgttacggcggcgagtggaccgaagatgcagcgaaacgcgcgttattggccgaacgtttgcacgccaatttattaggacgtttgcaaggcgaggaacgtctcctctggctttacgaagaagtggagaaaccattgagtcgcgtgctcgcgcatatggaagctaccggtgtcaaattagacgtggcgtatttggagaatctcagccttgaagttgctgcccacatgcgccgcttggaggaagaagtattccgtttagcaggccgttcctttcgccttaattctcgcgatcagttagaacgtgtgttgttcgatgaacttggtctccctcctatcggcaagacagagaagaccggtaaacgtagcacttcagcggcggttttagaagctcttcgcgaagtccatcccattgtggacaagatcttgcagtaccgcgaactcgcgaaattgaaaggcacctatattgaccgtcttccggcattagtccacccgaaaacgggacgcctccatacccgcttcaaccaaacagccacggcgaccggtcgtttgtcctcctctgatccaaaccttcagaatattccagtacgtaccccattgggccagaagatccgccgtgcgtttgtagctgaggagggttggcgtttagtggccctcgattatagccaaattgaattacgtgtccttgcccatctttctggcgatgagaacctcatccgcgtgtttcaggaaggcaaagacattcacactcaaacggcaagctggatgtttggattatcagctgaagcgatcgatcctttgatgcgtcgtgcagcgaagaccatcaatttcggtgttctctacggtatgagtgcctttcgtttgtcgcaggaattaggcattccctatgaagaagcttcggcgttcattcagaaatactttcaaagctatcccaaagttaaagcatggatcgagaagactctcgaagaaggccgcacacgtggttacgtagagaccttatttggacgtcgccgctatgttcccgatttaaacgctcgcgtgaaaggcaagcgtgaagccgccgaacgcatggcgttcaacatgcctgtacagggcacggcagctgacctcatgaaacttgcaatggtgcgcctttttccacaattgcgtgaagttggtgcccgcatgctcttgcaggtccacgatgaactcttgttagaagcgccaaaagagcgtgcggaagaggtggcagccctcgcgaaaaccgttatggaaggcgtgtggcccttagcggtgcctcttgaagtcgaagttggtattggcgaggattggctggctgccaaaggataatga

SEQ ID NO: 3104 - protein, 841 aa, synthetic construct
  REGION 1..841: note = Variant of DNA polymerase I from Thermus sp. strain 2.9
MHHHHHHGGSGVLPVFEPKGRVLLVDGHHLAYRNFFALKGLTTSSGEPVQGVYGFAKSLLKALKEDGDVVIVVFDAKAPSFRHEAYEAYKAGRAPTPEDFPRQLALMKELVDLLGLERLEVPGFEADDVLATLAKKAEREGYEVQILTADRDLFQLLSPRISVLHPEGHRITPEWLWEKYGLRPEQWVDFRALAGDPSDNIPGVKGIGEKTALKLLKEWGSLENLLKNLDQVKPESVREKILAHLEDLKLSRELSRVRTDLPLEVDFRRRREPDWEGLKAFLERLEFGSLLHEFGLLESPLPAEEAPWPPPEGAFLGYRLSRPEPMWAELLALAASAQGRVYRAEDPHGALRGLFEVRGLLAKDLAVVALREGLDLPPTDDPMLLAYLLDPSNTTPEGVARRYGGEWTEDAAKRALLAERLHANLLGRLQGEERLLWLYEEVEKPLSRVLAHMEATGVKLDVAYLENLSLEVAAHMRRLEEEVFRLAGRSFRLNSRDQLERVLFDELGLPPIGKTEKTGKRSTSAAVLEALREVHPIVDKILQYRELAKLKGTYIDRLPALVHPKTGRLHTRFNQTATATGRLSSSDPNLQNIPVRTPLGQKIRRAFVAEEGWRLVALDYSQIELRVLAHLSGDENLIRVFQEGKDIHTQTASWMFGLSAEAIDPLMRRAAKTINFGVLYGMSAFRLSQELGIPYEEASAFIQKYFQSYPKVKAWIEKTLEEGRTRGYVETLFGRRRYVPDLNARVKGKREAAERMAFNMPVQGTAADLMKLAMVRLFPQLREVGARMLLQVHDELLLEAPKERAEEVAALAKTVMEGVWPLAVPLEVEVGIGEDWLAAKG

SEQ ID NO: 3105 - DNA, 2529 bp, synthetic construct
  misc_feature 1..2529: note = Variant of DNA polymerase I from Thermus sp. strain 2.9
  source 1..2529: mol_type = other DNA
atgcaccatcatcatcatcatggcggtagcggcgtgttaccggtgttcgagcctaaaggtcgcgtgcttctggttgatggccatcatctcgcgtatcgtaacttctttgccctgaaaggattaaccaccagcctgggcgagccggtacagggtgtctacggctttgcaaagtcgctcctgaaagctctgaaagaagacggtgatgtggtgattgttgtctttgatgcgaaagcgccaagttttcgccacgaagcgtacgaagcttacaaagccgggcgtgctccaacgccggaagactttcctcgccaattggcgcttatgaaggaattagtggatttgcttggcctcgaacgcttggaagttcccggtttcgaggcagacgacgtattagcgactctcgcaaagaaagccgaacgtgagggctatgaagtccagatcttgacagcagatcgcgatcttttccagcttttatctccgcgcatctcggtgttacacccggaagggcatcgtatcaccccggaatggctctgggagaaatatggtttgcgtcccgaacaatgggtggattttcgcgccttagcaggcgatccgagcgacaatattccgggagttaaaggtatcggcgagaagacggcgctcaagctccttaaagaatgggggtcgttggagaacttgcttaagaatttagatcaggtcaaaccagagtcagtgcgtgagaagattcttgctcacctcgaagacctcaaattaagccgcgaattgtcccgtgtacgcaccgatttgccgctcgaagttgatttccgtcgccgccgcgaacctgactgggagggtcttaaagcgtttttagagcgtcttgaatttggttcgctcttgcatgaattcggccttttagaaagcccgttaccagccgaagaagcaccttggccaccgcccgagggcgcgtttttaggttaccgtttgagtcgcccggaaccgatgtgggccgaattactggctcttgcagcgtctgcccagggaaccgtgtatcgcgcggaagaccctcatggtgcgctccgcggcctcttcgaagtccgtggactccttgccaaagacttagctgttgttgcattgcgcgaaggtcttgatttacctccgactgatgatccaatgcttcttgcgtacctcttggacccgtcaaacacgacgcccgaaggcgtagcccgtcgttacggcggcgagtggaccgaagatgcagcgaaacgcgcgttattggccgaacgtttgcacgaaaatttattaggacgtttgcaaggcgaggaacgtctcctctggctttacgaagaagtggagaaaccattgagtcgcgtgctcgcgcatatggaagctaccggtgtcaaattagacgtggcgtatttggaggctctcagccttgaagttgctgcccacatgcgccgcttggaggaagaagtattccgtttagcaggccactcctttcgccttaactctcgcgatcagttagaacgtgtgttgttcgatgaacttggtctccctcctatcggcaagacagagaagaccggtaaacgtagcacttcagcggcggttttagaagctcttcgcgaagtccatcccattgtggacaagatcttgcagtaccgcgaactcgcgaaattgaaaggcacctatattgaccgtcttccggcattagtccacccgaaaacgggacgcctccatacccgcttcaaccaaacagccacggcgaccggtcgtttgtcctcctctgatccaaaccttcagaatattccagtacgtaccccattgggccagaagatccgccgtgcgtttgtagctgaggagggttggcgtttagtggccctcgattatagccaaattgaattacgtgtccttgcccatctttctggcgatgagaacctcatccgcgtgtttcaggaaggcaaagacattcacactcaaacggcaagctggatgtttggattatcagctgaagcgatcgatcctttgatgcgtcgtgcagcgaagaccatcaatttcggtgttctctacggtatgagtgcctttcgtttgtcgcaggaattaggcattccctatgaagaagctgcggcgttcattcagaaatactttcaaagctatcccaaagttaaagcatggatcgagaagactctcgaagaaggccgcacacgtggttacgtagagaccttatttggacgtcgccgctatgttcccgatttaaacgctcgcgtgaaaggcaagcgtgaagccgccgaacgcatggcgttcaacatgcctgtacagggcacggcagctgacctcatgaaacttgcaatggtgcgcctttttccacaattgcgtgaagttggtgcccgcatgctcttgcaggtccacgatgaactcttgttagaagcgccaaaagagcgtgcggaagaggtggcagccctcgcgaaagaagttatggaaggcgtgtggcccttagcggtgcctcttgaagtcgaagttggtattggcgaggattggctggctgccaaaggataatga

SEQ ID NO: 3106 - protein, 841 aa, synthetic construct
  REGION 1..841: note = Variant of DNA polymerase I from Thermus sp. strain 2.9
MHHHHHHGGSGVLPVFEPKGRVLLVDGHHLAYRNFFALKGLTTSLGEPVQGVYGFAKSLLKALKEDGDVVIVVFDAKAPSFRHEAYEAYKAGRAPTPEDFPRQLALMKELVDLLGLERLEVPGFEADDVLATLAKKAEREGYEVQILTADRDLFQLLSPRISVLHPEGHRITPEWLWEKYGLRPEQWVDFRALAGDPSDNIPGVKGIGEKTALKLLKEWGSLENLLKNLDQVKPESVREKILAHLEDLKLSRELSRVRTDLPLEVDFRRRREPDWEGLKAFLERLEFGSLLHEFGLLESPLPAEEAPWPPPEGAFLGYRLSRPEPMWAELLALAASAQGTVYRAEDPHGALRGLFEVRGLLAKDLAVVALREGLDLPPTDDPMLLAYLLDPSNTTPEGVARRYGGEWTEDAAKRALLAERLHENLLGRLQGEERLLWLYEEVEKPLSRVLAHMEATGVKLDVAYLEALSLEVAAHMRRLEEEVFRLAGHSFRLNSRDQLERVLFDELGLPPIGKTEKTGKRSTSAAVLEALREVHPIVDKILQYRELAKLKGTYIDRLPALVHPKTGRLHTRFNQTATATGRLSSSDPNLQNIPVRTPLGQKIRRAFVAEEGWRLVALDYSQIELRVLAHLSGDENLIRVFQEGKDIHTQTASWMFGLSAEAIDPLMRRAAKTINFGVLYGMSAFRLSQELGIPYEEAAAFIQKYFQSYPKVKAWIEKTLEEGRTRGYVETLFGRRRYVPDLNARVKGKREAAERMAFNMPVQGTAADLMKLAMVRLFPQLREVGARMLLQVHDELLLEAPKERAEEVAALAKEVMEGVWPLAVPLEVEVGIGEDWLAAKG

SEQ ID NO: 3107 - DNA, 2529 bp, synthetic construct
  misc_feature 1..2529: note = Variant of DNA polymerase I from Thermus sp. strain 2.9
  source 1..2529: mol_type = other DNA
atgcaccatcatcatcatcatggcggtagcggcgtgttaccggtgttcgagcctaaaggtcgcgtgcttctggttgatggccatcatctcgcgtatcgtaacttctttgccctgaaaggattaaccaccagcagcggcgagccggtacagggtgtctacggctttgcaaagtcgctcctgaaagctctgaaagaagacggtgatgtggtgattgttgtctttgatgcgaaagcgccaagttttcgccacgaagcgtacgaagcttacaaagccgggcgtgctccaacgccggaagactttcctcgccaattggcgcttatgaaggaattagtggatttgcttggcctcgaacgcttggaagttcccggtttcgaggcagacgacgtattagcgactctcgcaaagaaagccgaacgtgagggctatgaagtccagatcttgacagcagatcgcgatcttttccagcttttatctccgcgcatctcggtgttacacccggaagggcatcgtatcaccccggaatggctctgggagaaatatggtttgcgtcccgaacaatgggtggattttcgcgccttagcaggcgatccgagcgacaatattccgggagttaaaggtatcggcgagaagacggcgctcaagctccttaaagaatgggggtcgttggagaacttgcttaagaatttagatcaggtcaaaccagagtcagtgcgtgagaagattcttgctcacctcgaagacctcaaattaagccgcgaattgtcccgtgtacgcaccgatttgccgctcgaagttgatttccgtcgccgccgcgaacctgactgggagggtcttaaagcgtttttagagcgtcttgaatttggttcgctcttgcatgaattcggccttttagaaagcccgttaccagccgaagaagcaccttggccaccgcccgagggcgcgtttttaggttaccgtttgagtcgcccggaaccgatgtgggccgaattactggctcttgcagcgtctgcccagggacgtgtgtatcgcgcggaagaccctcatggtgcgctccgcggcctcttcgaagtccgtggactccttgccaaagacttagctgttgttgcattgcgcgaaggtcttgatttacctccgactgatgatccaatgcttcttgcgtacctcttggacccgtcaaacacgacgcccgaaggcgtagcccgtcgttacggcggcgagtggaccgaagatgcagcgaaacgcgcgttattggccgaacgtttgcacgccaatttattaggacgtttgcaaggcgaggaacgtctcctctggctttacgaagaagtggagaaaccattgagtcgcgtgctcgcgcatatggaagctaccggtgtcaaattagacgtggcgtatttggaggctctcagccttgaagttgctgcccacatgcgccgcttggaggaagaagtattccgtttagcaggccattcctttcgccttaattctcgcgatcagttagaacgtgtgttgttcgatgaacttggtctccctcctatcggcaagacagagaagaccggtaaacgtagcacttcagcggcggttttagaagctcttcgcgaagtccatcccattgtggacagtatcttgcagtaccgcgaactcgcgaaattgaaaggcacctatattgaccgtcttccggcattagtccacccgaaaacgggacgcctccatacccgcttcaaccaaacagccacggcgaccggtcgtttgtcctcctctgatccaaaccttcagaatattccagtacgtaccccattgggccagaagatccgccgtgcgtttgtagctgaggagggttggcgtttagtggccctcgattatagccaaattgaattacgtgtccttgcccatctttctggcgatgagaacctcatccgcgtgtttcaggaaggcaaagacattcacactcaaacggcaagctggatgtttggattatcagctgaagcgatcgatcctttgatgcgtcgtgcagcgaagaccatcaatttcggtgttctctacggtatgagtgcctttcgtttgtcgcaggaattaggcattccctatgaagaagctgcggcgttcattcagaaatactttcaaagctatcccaaagttaaagcatggatcgagaagactctcgaagaaggccgcacacgtggttacgtagagaccttatttggacgtcgccgctatgttcccgatttaaacgctcgcgtgaaaggcaagcgtgaagccgccgaacgcatggcgttcaacatgcctgtacagggcacggcagctgacctcatgaaacttgcaatggtgcgcctttttccacaattgcgtgaagttggtgcccgcatgctcttgcaggtccacgatgaactcttgttagaagcgccaaaagagcgtgcggaagaggtggcagccctcgcgaaagaagttatggaaggcgtgtggcccttagcggtgcctcttgaagtcgaagttggtattggcgaggattggctggctgccaaaggataatga

SEQ ID NO: 3108 - protein, 841 aa, synthetic construct
  REGION 1..841: note = Variant of DNA polymerase I from Thermus sp. strain 2.9
MHHHHHHGGSGVLPVFEPKGRVLLVDGHHLAYRNFFALKGLTTSSGEPVQGVYGFAKSLLKALKEDGDVVIVVFDAKAPSFRHEAYEAYKAGRAPTPEDFPRQLALMKELVDLLGLERLEVPGFEADDVLATLAKKAEREGYEVQILTADRDLFQLLSPRISVLHPEGHRITPEWLWEKYGLRPEQWVDFRALAGDPSDNIPGVKGIGEKTALKLLKEWGSLENLLKNLDQVKPESVREKILAHLEDLKLSRELSRVRTDLPLEVDFRRRREPDWEGLKAFLERLEFGSLLHEFGLLESPLPAEEAPWPPPEGAFLGYRLSRPEPMWAELLALAASAQGRVYRAEDPHGALRGLFEVRGLLAKDLAVVALREGLDLPPTDDPMLLAYLLDPSNTTPEGVARRYGGEWTEDAAKRALLAERLHANLLGRLQGEERLLWLYEEVEKPLSRVLAHMEATGVKLDVAYLEALSLEVAAHMRRLEEEVFRLAGHSFRLNSRDQLERVLFDELGLPPIGKTEKTGKRSTSAAVLEALREVHPIVDSILQYRELAKLKGTYIDRLPALVHPKTGRLHTRFNQTATATGRLSSSDPNLQNIPVRTPLGQKIRRAFVAEEGWRLVALDYSQIELRVLAHLSGDENLIRVFQEGKDIHTQTASWMFGLSAEAIDPLMRRAAKTINFGVLYGMSAFRLSQELGIPYEEAAAFIQKYFQSYPKVKAWIEKTLEEGRTRGYVETLFGRRRYVPDLNARVKGKREAAERMAFNMPVQGTAADLMKLAMVRLFPQLREVGARMLLQVHDELLLEAPKERAEEVAALAKEVMEGVWPLAVPLEVEVGIGEDWLAAKG

SEQ ID NO: 3109 - DNA, 2529 bp, synthetic construct
  misc_feature 1..2529: note = Variant of DNA polymerase I from Thermus sp. strain 2.9
  source 1..2529: mol_type = other DNA
atgcaccatcatcatcatcatggcggtagcggcgtgttaccggtgttcgagcctaaaggtcgcgtgcttctggttgatggccatcatctcgcgtatcgtaacttctttgccctgaaaggattaaccaccagcagcggcgagccggtacagggtgtctacggctttgcaaagtcgctcctgaaagctctgaaagaagacggtgatgtggtgattgttgtctttgatgcgaaagcgccaagttttcgccacgaagcgtacgaagcttacaaagccgggcgtgctccaacgccggaagactttcctcgccaattggcgcttatgaaggaattagtggatttgcttggcctcgaacgcttggaagttcccggtttcgaggcagacgacgtattagcgactctcgcaaagaaagccgaacgtgagggctatgaagtccagatcttgacagcagatcgcgatcttttccagcttttatctccgcgcatctcggtgttacacccggaagggcatcgtatcaccccggaatggctctgggagaaatatggtttgcgtcccgaacaatgggtggattttcgcgccttagcaggcgatccgagcgacaatattccgggagttaaaggtatcggcgagaagacggcgctcaagctccttaaagaatgggggtcgttggagaacttgcttaagaatttagatcaggtcaaaccagagtcagtgcgtgagaagattcttgctcacctcgaagacctcaaattaagccgcgaattgtcccgtgtacgcaccgatttgccgctcgaagttgatttccgtcgccgccgcgaacctgactgggagggtcttaaagcgtttttagagcgtcttgaatttggttcgctcttgcatgaattcggccttttagaaagcccgttactggccgaagaagcaccttggccaccgcccgagggcgcgtttttaggttaccgtttgagtcgcccggaaccgatgtgggccgaattactggctcttgcagcgtctgcccagggacgcgtgtatcgcgcggaagaccctcatggtgcgctccgcggcctcttcgaagtccgtggactccttgccaaagacttagctgttgttgcattgcgcgaaggtcttgatttacctccgactgatgatccaatgcttcttgcgtacctcttggacccgtcaaacacgacgcccgaaggcgtagcccgtcgttacggcggcgagtggaccgaagatgcagcgaaacgcgcgttattggccgaacgtttgcacgccaatttattaggacgtttgcaaggcgaggaacgtctcctctggctttacgaagaagtggagaaaccattgagtcgcgtgctcgcgcatatggaagctaccggtgtcaaattagacgtggcgtatttggaggctctcagccttgaagttgctgcccacatgcgccgcttggaggaagaagtattccgtttagcaggccattcctttcgccttaattctcgcgatcagttagaacgtgtgttgttcgatgaacttggtctccctcctatcggcaagacagagaagaccggtaaacgtagcacttcagcggcggttttagaagctcttcgcgaagtccatcccattgtggacaagatcttggtttaccgcgaactcgcgaaattgaaaggcacctatattgaccgtcttccggcattagtccacccgaaaacgggacgcctccatacccgcttcaaccaaacagccacggcgaccggtcgtttgtcctcctctgatccaaaccttcagaatattccagtacgtaccccattgggccagaagatccgccgtgcgtttgtagctgaggagggttggcgtttagtggccctcgattatcgtcaaattgaattacgtgtccttgcccatctttctggcgatgagaacctcatccgcgtgtttcaggaaggcaaagacattcacactcaaacggcaagctggatgtttggattatcagctgaagcgatcgatcctttgatgcgtcgtgcagcgaagaccatcaatttcggtgttctctacggtatgagtgcctttcgtttgtcgcaggaattaggcattccctatcaggaagctcaagcgttcattcagaaatactttcaaagctatcccaaagttaaagcatggatcgagaagactctcgaagaaggccgcacacgtggttacgtagagaccttatttggacgtcgccgctatgttcccgatttaaacgctcgcgtgaaaggcaagcgtgaagccgccgaacgcatggcgttcaacatgcctgtacagggcacggcagctgacctcatgaaacttgcaatggtgcgcctttttccacaattgcgtgaagttggtgcccgcatgctcttgcaggtccacgatgaactcttgttagaagcgccaaaagagcgtgcggaagaggtggcagccctcgcgaaagaagttatggaaggcgtgtggcccttagcggtgcctcttgaagtcgaagttggtattggcgaggattggctggctgccaaaggataatga

SEQ ID NO: 3110 - protein, 841 aa, synthetic construct
  REGION 1..841: note = Variant of DNA polymerase I from Thermus sp. strain 2.9
MHHHHHHGGSGVLPVFEPKGRVLLVDGHHLAYRNFFALKGLTTSSGEPVQGVYGFAKSLLKALKEDGDVVIVVFDAKAPSFRHEAYEAYKAGRAPTPEDFPRQLALMKELVDLLGLERLEVPGFEADDVLATLAKKAEREGYEVQILTADRDLFQLLSPRISVLHPEGHRITPEWLWEKYGLRPEQWVDFRALAGDPSDNIPGVKGIGEKTALKLLKEWGSLENLLKNLDQVKPESVREKILAHLEDLKLSRELSRVRTDLPLEVDFRRRREPDWEGLKAFLERLEFGSLLHEFGLLESPLLAEEAPWPPPEGAFLGYRLSRPEPMWAELLALAASAQGRVYRAEDPHGALRGLFEVRGLLAKDLAVVALREGLDLPPTDDPMLLAYLLDPSNTTPEGVARRYGGEWTEDAAKRALLAERLHANLLGRLQGEERLLWLYEEVEKPLSRVLAHMEATGVKLDVAYLEALSLEVAAHMRRLEEEVFRLAGHSFRLNSRDQLERVLFDELGLPPIGKTEKTGKRSTSAAVLEALREVHPIVDKILVYRELAKLKGTYIDRLPALVHPKTGRLHTRFNQTATATGRLSSSDPNLQNIPVRTPLGQKIRRAFVAEEGWRLVALDYRQIELRVLAHLSGDENLIRVFQEGKDIHTQTASWMFGLSAEAIDPLMRRAAKTINFGVLYGMSAFRLSQELGIPYQEAQAFIQKYFQSYPKVKAWIEKTLEEGRTRGYVETLFGRRRYVPDLNARVKGKREAAERMAFNMPVQGTAADLMKLAMVRLFPQLREVGARMLLQVHDELLLEAPKERAEEVAALAKEVMEGVWPLAVPLEVEVGIGEDWLAAKG

SEQ ID NO: 3111 - DNA, 2529 bp, synthetic construct
  misc_feature 1..2529: note = Variant of DNA polymerase I from Thermus sp. strain 2.9
  source 1..2529: mol_type = other DNA
atgcaccatcatcatcatcatggcggtagcggcgtgttaccggtgttcgagcctaaaggtcgcgtgcttctggttgatggccatcatctcgcgtatcgtaacttctttgccctgaaaggattaaccaccagctcgggcgagccggtacagggtgtctacggctttgcaaagtcgctcctgaaagctctgaaagaagacggtgatgtggtgattgttgtctttgatgcgaaagcgccaagttttcgccacgaagcgtacgaagcttacaaagccgggcgtgctccaacgccggaagactttcctcgccaattggcgcttatgaaggaattagtggatttgcttggcctcgaacgcttggaagttcccggtttcgaggcagacgacgtattagcgactctcgcaaagaaagccgaacgtgagggctatgaagtccagatcttgacagcagatcgcgatcttttccagcttttatctccgcgcatctcggtgttacacccggaagggcatcgtatcaccccggaatggctctgggagaaatatggtttgcgtcccgaacaatgggtggattttcgcgccttagcaggcgatccgagcgacaatattccgggagttaaaggtatcggcgagaagacggcgctcaagctccttaaagaatgggggtcgttggagaacttgcttaagaatttagatcaggtcaaaccagagtcagtgcgtgagaagattcttgctcacctcgaagacctcaaattaagccgcgaattgtcccgtgtacgcaccgatttgccgctcgaagttgatttccgtcgccgccgcgaacctgactgggagggtcttaaagcgtttttagagcgtcttgaatttggttcgctcttgcatgaattcggccttttagaaagcccgttaccagccgaagaagcaccttggccaccgcccgaaggcgcgtttttaggttaccgtttgagtcgcccggaaccgatgtgggccgaattactggctcttgcagcgtctgcccagggacgtgtgtatcgcgcggaagaccctcatggtgcgctccgcggcctcttcgaagtccgtggactccttgccaaagacttagctgttgttgcattgcgcgaaggtcttgatttacctccgactgatgatccaatgcttcttgcgtacctcttggacccgtcaaacacgacgcccgaaggcgtagcccgtcgttacggcggcgagtggaccgaagatgcagcgaaacgcgcgttattggccgaacgtttgcacgccaatttattaggacgtttgcaaggcgaggaacgtctcctctggctttacgaagaagtggagaaaccattgagtcgcgtgctcgcgcatatggaagctaccggtgtcaaattagacgtggcgtatttggaggctctcagccttgaagttgctgcccacatgcgccgcttggaggaagaagtattccgtttagcaggccattcctttcgccttaattctcgcgatcagttagaacgtgtgttgttcgatgaacttggtctccctcctatcggcaagacagagaagaccggtaaacgtagcacttcagcggcggttttagaagctcttcgcgaagtccatcccattgtggacaagatcttgcagtaccgcgaactcgcgaaattgaaaggcacctatattgaccgtcttccggcattagtccacccgaaaacgggacgcctccatacccgcttcaaccaaacagccacggcgaccggtcgtttgtcctcctctgatccaaaccttcagaatattccagtacgtaccccattgggccagaagatccgcaaagcgtttgtagctgaggagggttggcgtttagtggccctcgattatcgtcaaattgaattacgtgtccttgcccatctttctggcgatgagaacctcatccgcgtgtttcaggaaggcaaagacattcacactcaaacggcaagctggatgtttggattaggcgctgaagcgatcgatcctttgatgcgtcgtgcagcgaagaccatcaatttcggtgttctctacggtatgagtgcctttcgtttgtcgcaggaattaggcattccctatcaggaagcttcggcgttcattcagaaatactttcaaagctatcccaaagttaaagcatggatcgagaagactctcgaagaaggccgcacacgtggttacgtagagaccttatttggacgtcgccgctatgttcccgatttaaacgctcgcgtgaaaggcaagcgtgaagccgccgaacgcatggcgttcaacatgcctgtacagggcacggcagctgacctcatgaaacttgcaatggtgcgcctttttccacaattgcgtgaagttggtgcccgcatgctcttgcaggtccacgatgaactcttgttagaagcgccaaaagagcgtgcggaagaggtggcagccctcgcgaaagaagttatggaaggcgtgtggcccttagcggtgcctcttgaagtcgaagttggtattggcgaggattggctggctgccaaaggataatga

SEQ ID NO: 3112 - protein, 841 aa, synthetic construct
  REGION 1..841: note = Variant of DNA polymerase I from Thermus sp. strain 2.9
MHHHHHHGGSGVLPVFEPKGRVLLVDGHHLAYRNFFALKGLTTSSGEPVQGVYGFAKSLLKALKEDGDVVIVVFDAKAPSFRHEAYEAYKAGRAPTPEDFPRQLALMKELVDLLGLERLEVPGFEADDVLATLAKKAEREGYEVQILTADRDLFQLLSPRISVLHPEGHRITPEWLWEKYGLRPEQWVDFRALAGDPSDNIPGVKGIGEKTALKLLKEWGSLENLLKNLDQVKPESVREKILAHLEDLKLSRELSRVRTDLPLEVDFRRRREPDWEGLKAFLERLEFGSLLHEFGLLESPLPAEEAPWPPPEGAFLGYRLSRPEPMWAELLALAASAQGRVYRAEDPHGALRGLFEVRGLLAKDLAVVALREGLDLPPTDDPMLLAYLLDPSNTTPEGVARRYGGEWTEDAAKRALLAERLHANLLGRLQGEERLLWLYEEVEKPLSRVLAHMEATGVKLDVAYLEALSLEVAAHMRRLEEEVFRLAGHSFRLNSRDQLERVLFDELGLPPIGKTEKTGKRSTSAAVLEALREVHPIVDKILQYRELAKLKGTYIDRLPALVHPKTGRLHTRFNQTATATGRLSSSDPNLQNIPVRTPLGQKIRKAFVAEEGWRLVALDYRQIELRVLAHLSGDENLIRVFQEGKDIHTQTASWMFGLGAEAIDPLMRRAAKTINFGVLYGMSAFRLSQELGIPYQEASAFIQKYFQSYPKVKAWIEKTLEEGRTRGYVETLFGRRRYVPDLNARVKGKREAAERMAFNMPVQGTAADLMKLAMVRLFPQLREVGARMLLQVHDELLLEAPKERAEEVAALAKEVMEGVWPLAVPLEVEVGIGEDWLAAKG

SEQ ID NO: 3113 - DNA, 2529 bp, synthetic construct
  misc_feature 1..2529: note = Variant of DNA polymerase I from Thermus sp. strain 2.9
  source 1..2529: mol_type = other DNA
atgcaccatcatcatcatcatggcggtagcggcgtgttaccggtgttcgagcctaaaggtcgcgtgcttctggttgatggccatcatctcgcgtatcgtaacttctttgccctgaaaggattaaccaccagcctgggcgagccggtacagggtgtctacggctttgcaaagtcgctcctgaaagctctgaaagaagacggtgatgtggtgattgttgtctttgatgcgaaagcgccaagttttcgccacgaagcgtacgaagcttacaaagccgggcgtgctccaacgccggaagactttcctcgccaattggcgcttatgaaggaattagtggatttgcttggcctcgaacgcttggaagttcccggtttcgaggcagacgacgtattagcgactctcgcaaagaaagccgaacgtgagggctatgaagtccagatcttgacagcagatcgcgatcttttccagcttttatctccgcgcatctcggtgttacacccggaagggcatcgtatcaccccggaatggctctgggagaaatatggtttgcgtcccgaacaatgggtggattttcgcgccttagcaggcgatccgagcgacaatattccgggagttaaaggtatcggcgagaagacggcgctcaagctccttaaagaatgggggtcgttggagaacttgcttgaaaatttagatcaggtcaaaccagagtcagtgcgtgagaagattcttgctcacctcgaagacctcaaattaagccgcgaattgtcccgtgtacgcaccgatttgccgctcgaagttgatttccgtcgccgccgcgaacctgactgggagggtcttaaagcgtttttagagcgtcttgaatttggttcgctcttgcatgaattcggccttttagaaagcccgttaccagccgaagaagcaccttggccaccgccccaaggcgcgtttttaggttaccgtttgagtcgcccggaaccgatgtgggccgaattactggctcttgcagcgtctgcccagggacgcgtgtatcgcgcggaagaccctcatggtgcgctccgcggcctcttcgaagtccgtggactccttgccaaagacttagctgttgttgcattgcgcgaaggtcttgatttacctccgactgatgatccaatgcttcttgcgtacctcttggacccgtcaaacacgacgcccgaaggcgtagcccgtcgttacggcggcgagtggaccgaagatgcagcgaaacgcgcgttattggccgaacgtttgcacgaaaatttattaggacgtttgcaaggcgaggaacgtctcctctggctttacgaagaagtggagaaaccattgagtcgcgtgctcgcgcatatggaagctaccggtgtcaaattagacgtggcgtatttggaggctctcagccttgaagttgctgcccacatgcgccgcttggaggaagaagtattccgtttagcaggccactcctttcgccttaactctcgcgatcagttagaacgtgtgttgttcgatgaacttggtctccctcctatcggcaagacagagaagaccggtaaacgtagcacttcacgcgcggttttagaagctcttcgcgaagtccatcccattgtggacaagatcttgcagtaccgcgaactcgcgaaattgaaaggcacctatattgaccgtcttccggcattagtccacccgaaaacgggacgcctccatacccgcttcaaccaaacagccacggcgaccggtcgtttgtcctcctctgatccaaaccttcagaatattccagtacgtaccccattgggccagaagatccgcaaagcgtttgtagctgaggagggttggcgtttagtggccctcgattatagtcaaattgaattacgtgtccttgcccatctttctggcgatgagaacctcatccgcgtgtttcaggaaggcaaagacattcacactcaaacggcaagctggatgtttggattatcagctgaagcgatcgatcctttgatgcgtcgtgcagcgaagaccatcaatttcggtgttctctacggtatgagtgcctttcgtttgtcgcaggaattaggcattccctatgaggaagctcaagcgttcattcagaaatactttcaaagctatcccaaagttaaagcatggatcgagaagactctcgaagaaggccgcacacgtggttacgtagagaccttatttggacgtcgccgctatgttcccgatttaaacgctcgcgtgaaaggcaagcgtgaagccgccgaacgcatggcgttcaacatgcctgtacagggcacggcagctgacctcatgaaacttgcaatggtgcgcctttttccacaattgcgtgaagttggtgcccgcatgctcttgcaggtccacgatgaactcttgttagaagcgccaaaagagcgtgcggaagaggtggcagccctcgcgaaagaagttatggaaggcgtgtggcccttagcggtgcctcttgaagtcgaagttggtattggcgaggattggctggctgccaaaggataatga

SEQ ID NO: 3114 - protein, 841 aa, synthetic construct
  REGION 1..841: note = Variant of DNA polymerase I from Thermus sp. strain 2.9
MHHHHHHGGSGVLPVFEPKGRVLLVDGHHLAYRNFFALKGLTTSLGEPVQGVYGFAKSLLKALKEDGDVVIVVFDAKAPSFRHEAYEAYKAGRAPTPEDFPRQLALMKELVDLLGLERLEVPGFEADDVLATLAKKAEREGYEVQILTADRDLFQLLSPRISVLHPEGHRITPEWLWEKYGLRPEQWVDFRALAGDPSDNIPGVKGIGEKTALKLLKEWGSLENLLENLDQVKPESVREKILAHLEDLKLSRELSRVRTDLPLEVDFRRRREPDWEGLKAFLERLEFGSLLHEFGLLESPLPAEEAPWPPPQGAFLGYRLSRPEPMWAELLALAASAQGRVYRAEDPHGALRGLFEVRGLLAKDLAVVALREGLDLPPTDDPMLLAYLLDPSNTTPEGVARRYGGEWTEDAAKRALLAERLHENLLGRLQGEERLLWLYEEVEKPLSRVLAHMEATGVKLDVAYLEALSLEVAAHMRRLEEEVFRLAGHSFRLNSRDQLERVLFDELGLPPIGKTEKTGKRSTSRAVLEALREVHPIVDKILQYRELAKLKGTYIDRLPALVHPKTGRLHTRFNQTATATGRLSSSDPNLQNIPVRTPLGQKIRKAFVAEEGWRLVALDYSQIELRVLAHLSGDENLIRVFQEGKDIHTQTASWMFGLSAEAIDPLMRRAAKTINFGVLYGMSAFRLSQELGIPYEEAQAFIQKYFQSYPKVKAWIEKTLEEGRTRGYVETLFGRRRYVPDLNARVKGKREAAERMAFNMPVQGTAADLMKLAMVRLFPQLREVGARMLLQVHDELLLEAPKERAEEVAALAKEVMEGVWPLAVPLEVEVGIGEDWLAAKG

SEQ ID NO: 3115 - DNA, 2529 bp, synthetic construct
  misc_feature 1..2529: note = Variant of DNA polymerase I from Thermus sp. strain 2.9
  source 1..2529: mol_type = other DNA
atgcaccatcatcatcatcatggcggtagcggcgtgttaccggtgttcgagcctaaaggtcgcgtgcttctggttgatggccatcatctcgcgtatcgtaacttctttgccctgaaaggattaaccaccagcagcggcgagccggtacagggtgtctacggctttgcaaagtcgctcctgaaagctctgaaagaagacggtgatgtggtgattgttgtctttgatgcgaaagcgccaagttttcgccacgaagcgtacgaagcttacaaagccgggcgtgctccaacgccggaagactttcctcgccaattggcgcttatgaaggaattagtggatttgcttggcctcgaacgcttggaagttcccggtttcgaggcagacgacgtattagcgactctcgcaaagaaagccgaacgtgagggctatgaagtccagatcttgacagcagatcgcgatcttttccagcttttatctccgcgcatctcggtgttacacccggaagggcatcgtatcaccccggaatggctctgggagaaatatggtttgcgtcccgaacaatgggtggattttcgcgccttagcaggcgatccgagcgacaatattccgggagttaaaggtatcggcgagaagacggcgctcaagctccttaaagaatgggggtcgttggagaacttgcttaagaatttagatcaggtcaaaccagagtcagtgcgtgagaagattcttgctcacctcgaagacctcaaattaagccgcgaattgtcccgtgtacgcaccgatttgccgctcgaagttgatttccgtcgccgccgcgaacctgactgggagggtcttaaagcgtttttagagcgtcttgaatttggttcgctcttgcatgaattcggccttttagaaagcccgttaccagccgaagaagcaccttggccaccgcccgagggcgcgtttttaggttaccgtttgagtcgcccggaaccgatgtgggccgaattactggctcttgcagcgtctgcccagggacgtgtgtatcgcgcggaagaccctcatggtgcgctccgcggcctcttcgaagtccgtggactccttgccaaagacttagctgttgttgcattgcgcgaaggtcttgatttacctccgactgatgatccaatgcttcttgcgtacctcttggacccgtcaaacacgacgcccgaaggcgtagcccgtcgttacggcggcgagtggaccgaagatgcagcgaaacgcgcgttattggccgaacgtttgcacgagaatttattaggacgtttgcaaggcgaggaacgtctcctctggctttacgaagaagtggagaaaccattgagtcgcgtgctcgggcatatggaagctaccggtgtcaaattagacgtggcgtatttggaggctctcagccttgaagttgctgcccacatgcgccgcttggaggaagaagtattccgtttagcaggccattcctttcgccttaactctcgcgatcagttagaacgtgtgttgttcgatgaacttggtctccctcctatcggcaagacagagaagaccggtaaacgtagcacttcagcagcggttttagaagctcttcgcgaagtccatcccattgtggacaagatcttgcagtaccgcgaactcgcgaaattgaaaggcacctatattgaccgtcttccggcattagtccacccgaaaacgggacgcctccatacccgcttcaaccaaacagccacggcgaccggtcgtttgtcctcctctgatccaaaccttcagaatattccagtacgtaccccattgggccagaagatccgcaaagcgtttgtagctgaggagggttggcgtttagtggccctcgattatagccaaattgaattacgtgtccttgcccatctttctggcgatgagaacctcatccgcgtgtttcaggaaggcaaagacattcacactcaaacggcaagctggatgtttggattaggtgctgaagcgatcgatcctttgatgcgtcgtgcagcgaagaccatcaatttcggtgttctctacggtatgagtgcctttcgtttgtcgcaggaattaggcattccctatgaagaagctcaggcgttcattcagaaatactttcaaagctatcccaaagttaaagcatggatcgagaagactctcgaagaaggccgcacacgtggttacgtagagaccttatttggacgtcgccgctatgttcccgatttaaacgctcgcgtgaaaggcaagcgtgaagccgccgaacgcatggcgttcaacatgcctgtacagggcacggcagctgacctcatgaaacttgcaatggtgcgcctttttccacaattgcgtgaagttggtgcccgcatgctcttgcaggtccacgatgaactcttgttagaagcgccaaaagagcgtgcggaagaggtggcagccctcgcgaaagaagttatggaaggcgtgtggcccttagcggtgcctcttgaagtcgaagttggtattggcgaggattggctggctgccaaaggataatga

SEQ ID NO: 3116 - protein, 841 aa, synthetic construct
  REGION 1..841: note = Variant of DNA polymerase I from Thermus sp. strain 2.9
MHHHHHHGGSGVLPVFEPKGRVLLVDGHHLAYRNFFALKGLTTSSGEPVQGVYGFAKSLLKALKEDGDVVIVVFDAKAPSFRHEAYEAYKAGRAPTPEDFPRQLALMKELVDLLGLERLEVPGFEADDVLATLAKKAEREGYEVQILTADRDLFQLLSPRISVLHPEGHRITPEWLWEKYGLRPEQWVDFRALAGDPSDNIPGVKGIGEKTALKLLKEWGSLENLLKNLDQVKPESVREKILAHLEDLKLSRELSRVRTDLPLEVDFRRRREPDWEGLKAFLERLEFGSLLHEFGLLESPLPAEEAPWPPPEGAFLGYRLSRPEPMWAELLALAASAQGRVYRAEDPHGALRGLFEVRGLLAKDLAVVALREGLDLPPTDDPMLLAYLLDPSNTTPEGVARRYGGEWTEDAAKRALLAERLHENLLGRLQGEERLLWLYEEVEKPLSRVLGHMEATGVKLDVAYLEALSLEVAAHMRRLEEEVFRLAGHSFRLNSRDQLERVLFDELGLPPIGKTEKTGKRSTSAAVLEALREVHPIVDKILQYRELAKLKGTYIDRLPALVHPKTGRLHTRFNQTATATGRLSSSDPNLQNIPVRTPLGQKIRKAFVAEEGWRLVALDYSQIELRVLAHLSGDENLIRVFQEGKDIHTQTASWMFGLGAEAIDPLMRRAAKTINFGVLYGMSAFRLSQELGIPYEEAQAFIQKYFQSYPKVKAWIEKTLEEGRTRGYVETLFGRRRYVPDLNARVKGKREAAERMAFNMPVQGTAADLMKLAMVRLFPQLREVGARMLLQVHDELLLEAPKERAEEVAALAKEVMEGVWPLAVPLEVEVGIGEDWLAAKG

SEQ ID NO: 3117 - DNA, 2529 bp, synthetic construct
  misc_feature 1..2529: note = Variant of DNA polymerase I from Thermus sp. strain 2.9
  source 1..2529: mol_type = other DNA
atgcaccatcatcatcatcatggcggtagcggcgtgttaccggtgttcgagcctaaaggtcgcgtgcttctggttgatggccatcatctcgcgtatcgtaacttctttgccctgaaaggattaaccaccagcagcggcgagccggtacagggtgtctacggctttgcaaagtcgctcctgaaagctctgaaagaagacggtgatgtggtgattgttgtctttgatgcgaaagcgccaagttttcgccacgaagcgtacgaagcttacaaagccgggcgtgctccaacgccggaagactttcctcgccaattggcgcttatgaaggaattagtggatttgcttggcctcgaacgcttggaagttcccggtttcgaggcagacgacgtattagcgactctcgcaaagaaagccgaacgtgagggctatgaagtccagatcttgacagcagatcgcgatcttttccagcttttatctccgcgcatctcggtgttacacccggaagggcatcgtatcaccccggaatggctctgggagaaatatggtttgcgtcccgaacaatgggtggattttcgcgccttagcaggcgatccgagcgacaatattccgggagttaaaggtatcggcgagaagacggcgctcaagctccttaaagaatgggggtcgttggagaacttgcttaagaatttagatcaggtcaaaccagagtcagtgcgtgagaagattcttgctcacctcgaagacctcaaattaagccgcgaattgtcccgtgtacgcaccgatttgccgctcgaagttgatttccgtcgccgccgcgaacctgactgggagggtcttaaagcgtttttagagcgtcttgaatttggttcgctcttgcatgaattcggccttttagaaagcccgttaccagccgaagaagcaccttggccaccgcccgagggcgcgtttttaggttaccgtttgagtcgcccggaaccgatgtgggccgaattactggctcttgcagcgtctgcccagggacgtgtgtatcgcgcggaagaccctcatggtgcgctccgcggcctcttcgaagtccgtggactccttgccaaagacttagctgttgttgcattgcgcgaaggtcttgatttacctccgactgatgatccaatgcttcttgcgtacctcttggacccgtcaaacacgacgcccgaaggcgtagcccgtcgttacggcggcgagtggaccgaagatgcagcgaaacgcgcgttattggccgaacgtttgcacgccaatttattaggacgtttgcaaggcgaggaacgtctcctctggctttacgaagaagtggagaaaccattgagtcgcgtgctcgcgcatatggaagctaccggtgtcaaattagacgtggcgtatttggaggctctcagccttgaagttgctgcccacatgcgccgcttggaggaagaagtattccgtttagcaggccattcctttcgccttaattctcgcgatcagttagaacgtgtgttgttcgatgaacttggtctccctcctatcggcaagacagagaagaccggtaaacgtagcacttcagcggcggttttagaagctcttcgcgaagtccatcccattgtggacaagatcttgcagtaccgcgaactcgcgaaattgaaaggcacctatattgaccgtcttccggcattagtccacccgaaaacgggacgcctccatacccgcttcaaccaaacagccacggcgaccggtcgtttgtcctcctctgatccaaaccttcagaatattccagtacgtaccccattgggccagaagatccgccgtgcgtttgtagctgaggagggttggcgtttagtggccctcgattatagccaaattgaattacgtgtccttgcccatctttctggcgatgagaacctcatccgcgtgtttcaggaaggcaaagacattcacactcaaacggcaagctggatgtttggattatcagctgaagcgatcgatcctttgatgcgtcgtgcagcgaagaccatcaatttcggtgttctctacggtatgagtgcccgtcgtttgtcgcaggaattaggcattccctatgaagaagctgcggcgttcattcagaaatactttcaaagctatcccaaagttaaagcatggatcgagaagactctcgaagaaggccgcacacgtggttacgtagagaccttatttggacgtcgccgctatgttcccgatttaaacgctcgcgtgaaaggcaagcgtgaagccgccgaacgcatggcgttcaacatgcctgtacagggcacggcagctgacctcatgaaacttgcaatggtgcgcctttttccacaattgcgtgaagttggtgcccgcatgctcttgcaggtccacgatgaactcttgttagaagcgccaaaagagcgtgcggaagaggtggcagccctcgcgaaagaagttatggaaggcgtgtggcccttagcggtgcctcttgaagtcgaagttggtattggcgaggattggctggctgccaaaggataatga

SEQ ID NO: 3118 - protein, 841 aa, synthetic construct
  REGION 1..841: note = Variant of DNA polymerase I from Thermus sp. strain 2.9
MHHHHHHGGSGVLPVFEPKGRVLLVDGHHLAYRNFFALKGLTTSSGEPVQGVYGFAKSLLKALKEDGDVVIVVFDAKAPSFRHEAYEAYKAGRAPTPEDFPRQLALMKELVDLLGLERLEVPGFEADDVLATLAKKAEREGYEVQILTADRDLFQLLSPRISVLHPEGHRITPEWLWEKYGLRPEQWVDFRALAGDPSDNIPGVKGIGEKTALKLLKEWGSLENLLKNLDQVKPESVREKILAHLEDLKLSRELSRVRTDLPLEVDFRRRREPDWEGLKAFLERLEFGSLLHEFGLLESPLPAEEAPWPPPEGAFLGYRLSRPEPMWAELLALAASAQGRVYRAEDPHGALRGLFEVRGLLAKDLAVVALREGLDLPPTDDPMLLAYLLDPSNTTPEGVARRYGGEWTEDAAKRALLAERLHANLLGRLQGEERLLWLYEEVEKPLSRVLAHMEATGVKLDVAYLEALSLEVAAHMRRLEEEVFRLAGHSFRLNSRDQLERVLFDELGLPPIGKTEKTGKRSTSAAVLEALREVHPIVDKILQYRELAKLKGTYIDRLPALVHPKTGRLHTRFNQTATATGRLSSSDPNLQNIPVRTPLGQKIRRAFVAEEGWRLVALDYSQIELRVLAHLSGDENLIRVFQEGKDIHTQTASWMFGLSAEAIDPLMRRAAKTINFGVLYGMSARRLSQELGIPYEEAAAFIQKYFQSYPKVKAWIEKTLEEGRTRGYVETLFGRRRYVPDLNARVKGKREAAERMAFNMPVQGTAADLMKLAMVRLFPQLREVGARMLLQVHDELLLEAPKERAEEVAALAKEVMEGVWPLAVPLEVEVGIGEDWLAAKG

SEQ ID NO: 3119 - DNA, 2529 bp, synthetic construct
  misc_feature 1..2529: note = Variant of DNA polymerase I from Thermus sp. strain 2.9
  source 1..2529: mol_type = other DNA
atgcaccatcatcatcatcatggcggtagcggcgtgttaccggtgttcgagcctaaaggtcgcgtgcttctggttgatggccatcatctcgcgtatcgtaacttctttgccctgaaaggattaaccaccagcagcggcgagccggtacagggtgtctacggctttgcaaagtcgctcctgaaagctctgaaagaagacggtgatgtggtgattgttgtctttgatgcgaaagcgccaagttttcgccacgaagcgtacgaagcttacaaagccgggcgtgctccaacgccggaagactttcctcgccaattggcgcttatgaaggaattagtggatttgcttggcctcgaacgcttggaagttcccggtttcgaggcagacgacgtattagcgactctcgcaaagaaagccgaacgtgagggctatgaagtccagatcttgacagcagatcgcgatcttttccagcttttatctccgcgcatctcggtgttacacccggaagggcatcgtatcaccccggaatggctctgggagaaatatggtttgcgtcccgaacaatgggtggattttcgcgccttagcaggcgatccgagcgacaatattccgggagttaaaggtatcggcgagaagacggcgctcaagctccttaaagaatgggggtcgttggagaacttgcttaaaaatttagatcaggtcaaaccagagtcagtgcgtgagaagattcttgctcacctcgaagacctcaaattaagccgcgaattgtcccgtgtacgcaccgatttgccgctcgaagttgatttccgtcgccgccgcgaacctgactgggagggtcttaaagcgtttttagagcgtcttgaatttggttcgctcttgcatgaattcggccttttagaaagcccgttaccagccgaagaagcaccttggccaccgcccgaaggcgcgtttttaggttaccgtttgagtcgcccggaaccgatgtgggccgaattactggctcttgcagcgtctgcccagggacgtgtgtatcgcgcggaagaccctcatggtgcgctccgcggcctcttcgaagtccgtggactccttgccaaagacttagctgttgttgcattgcgcgaaggtcttgatttacctccgactgatgatccaatgcttcttgcgtacctcttggacccgtcaaacacgacgcccgaaggcgtagcccgtcgttacggcggcgagtggaccgaagatgcagcgaaacgcgcgttattggccgaacgtttgcacgccaatttattaggacgtttgcaaggcgaggaacgtctcctctggctttacgaagaagtggagaaaccattgagtcgcgtgctcgcgcatatggaagctaccggtgtcaaattagacgtggcgtatttggaggctctcagccttgaagttgctgcccacatgcgccgcttggaggaagaagtattccgtttagcaggccattcctttcgccttaattctcgcgatcagttagaacgtgtgttgttcgatgaacttggtctccctcctatcggcaagacagagaagaccggtaaacgtagcacttcagcggcggttttagaagctcttcgcgaagtccatcccattgtggacaagatcttggtttaccgcgaactcgcgaaattgaaaggcacctatattgaccgtcttccggcattagtccacccgaaaacgggacgcctccatacccgcttcaaccaaacagccacggcgaccggtcgtttgtcctcctctgatccaaaccttcagaatattccagtacgtaccccattgggccagaagatccgccgtgcgtttgtagctgaggagggttggcgtttagtggccctcgattatagtcaaattgaattacgtgtccttgcccatctttctggcgatgagaacctcatccgcgtgtttcaggaaggcaaagacattcacactcaaacggcaagctggatgtttggattatcagctgaagcgatcgatcctttgatgcgtcgtgcagcgaagaccatcaatttcggtgttctctacggtatgagtgcctttcgtttgtcgcaggaattaggcattccctatgaggaagctcaagcgttcattcagaaatactttcaaagctatcccaaagttaaagcatggatcgagaagactctcgaagaaggccgcacacgtggttacgtagagaccttatttggacgtcgccgctatgttcccgatttaaacgctcgcgtgaaaggcaagcgtgaagccgccgaacgcatggcgttcaacatgcctgtacagggcacggcagctgacctcatgaaacttgcaatggtgcgcctttttccacaattgcgtgaagttggtgcccgcatgctcttgcaggtccacgatgaactcttgttagaagcgccaaaagagcgtgcggaagaggtggcagccctcgcgaaagaagttatggaaggcgtgtggcccttagcggtgcctcttgaagtcgaagttggtattggcgaggattggctggctgccaaaggataatga

SEQ ID NO: 3120 - protein, 841 aa, synthetic construct
  REGION 1..841: note = Variant of DNA polymerase I from Thermus sp. strain 2.9
MHHHHHHGGSGVLPVFEPKGRVLLVDGHHLAYRNFFALKGLTTSSGEPVQGVYGFAKSLLKALKEDGDVVIVVFDAKAPSFRHEAYEAYKAGRAPTPEDFPRQLALMKELVDLLGLERLEVPGFEADDVLATLAKKAEREGYEVQILTADRDLFQLLSPRISVLHPEGHRITPEWLWEKYGLRPEQWVDFRALAGDPSDNIPGVKGIGEKTALKLLKEWGSLENLLKNLDQVKPESVREKILAHLEDLKLSRELSRVRTDLPLEVDFRRRREPDWEGLKAFLERLEFGSLLHEFGLLESPLPAEEAPWPPPEGAFLGYRLSRPEPMWAELLALAASAQGRVYRAEDPHGALRGLFEVRGLLAKDLAVVALREGLDLPPTDDPMLLAYLLDPSNTTPEGVARRYGGEWTEDAAKRALLAERLHANLLGRLQGEERLLWLYEEVEKPLSRVLAHMEATGVKLDVAYLEALSLEVAAHMRRLEEEVFRLAGHSFRLNSRDQLERVLFDELGLPPIGKTEKTGKRSTSAAVLEALREVHPIVDKILVYRELAKLKGTYIDRLPALVHPKTGRLHTRFNQTATATGRLSSSDPNLQNIPVRTPLGQKIRRAFVAEEGWRLVALDYSQIELRVLAHLSGDENLIRVFQEGKDIHTQTASWMFGLSAEAIDPLMRRAAKTINFGVLYGMSAFRLSQELGIPYEEAQAFIQKYFQSYPKVKAWIEKTLEEGRTRGYVETLFGRRRYVPDLNARVKGKREAAERMAFNMPVQGTAADLMKLAMVRLFPQLREVGARMLLQVHDELLLEAPKERAEEVAALAKEVMEGVWPLAVPLEVEVGIGEDWLAAKG

SEQ ID NO: 3121 - DNA, 2529 bp, synthetic construct
  misc_feature 1..2529: note = Variant of DNA polymerase I from Thermus sp. strain 2.9
  source 1..2529: mol_type = other DNA
atgcaccatcatcatcatcatggcggtagcggcgtgttaccggtgttcgagcctaaaggtcgcgtgcttctggttgatggccatcatctcgcgtatcgtaacttctttgccctgaaaggattaaccaccagcagcggcgagccggtacagggtgtctacggctttgcaaagtcgctcctgaaagctctgaaagaagacggtgatgtggtgattgttgtctttgatgcgaaagcgccaagttttcgccacgaagcgtacgaagcttacaaagccgggcgtgctccaacgccggaagactttcctcgccaattggcgcttatgaaggaattagtggatttgcttggcctcgaacgcttggaagttcccggtttcgaggcagacgacgtattagcgactctcgcaaagaaagccgaacgtgagggctatgaagtccagatcttgacagcagatcgcgatcttttccagcttttatctccgcgcatctcggtgttacacccggaagggcatcgtatcaccccggaatggctctgggagaaatatggtttgcgtcccgaacaatgggtggattttcgcgccttagcaggcgatccgagcgacaatattccgggagttaaaggtatcggcgagaagacggcgctcaagctccttaaagaatgggggtcgttggagaacttgcttaagaatttagatcaggtcaaaccagagtcagtgcgtgagaagattcttgctcacctcgaagacctcaaattaagccgcgaattgtcccgtgtacgcaccgatttgccgctcgaagttgatttcggtcgccgccgcgaacctgactgggagggtcttaaagcgtttttagagcgtcttgaatttggttcgctcttgcatgaattcggccttttagaaagcccgttaccagccgaagaagcaccttggccaccgcccgagggcgcgtttttaggttaccgtttgagtcgcccggaaccgatgtgggccgaattactggctcttgcagcgtctgcccagggacgtgtgtatcgcgcggaagaccctcatggtgcgctccgcggcctcttcgaagtccgtggactccttgccaaagacttagctgttgttgcattgcgcgaaggtcttgatttacctccgactgatgatccaatgcttcttgcgtacctcttggacccgtcaaacacgacgcccgaaggcgtagcccgtcgttacggcggcgagtggaccgaagatgcagcgaaacgcgcgttattggccgaacgtttgcacgagaatttattaggacgtttgcaaggcgaggaacgtctcctctggctttacgaagaagtggagaaaccattgagtcgcgtgctcgcgcatatggaagctaccggtgtcaaattagacgtggcgtatttggaggctctcagccttgaagttgctgcccacatgcgccgcttggaggaagaagtattccgtttagcaggccattcctttcgccttaattctcgcgatcagttagaacgtgtgttgttcgatgaacttggtctccctcctatcggcaagacagagaagaccggtaaacgtagcacttcagcggcggttttagaagctcttcgcgaagtccatcccattgtggacaagatcttgcagtaccgcgaactcgcgaaattgaaaggcacctatattgaccgtcttccggcattagtccacccgaaaacgggacgcctccatacccgcttcaaccaaacagccacggcgaccggtcgtttgtcctcctctgatccaaaccttcagaatattccagtacgtaccccattgggccagaagatccgccgtgcgtttgtagctgaggagggttggcgtttagtggccctcgattatagccaaattgaattacgtgtccttgcccatctttctggcgatgagaacctcatccgcgtgtttcaggaaggcaaagacattcacactcaaacggcaagctggatgtttggattatcagctgaagcgatcgatcctttgatgcgtcgtgcagcgaagaccatcaatttcggtgttctctacggtatgagtgcctttcgtttgtcgcaggaattaggcattccctatgaagaagctcaggcgttcattcagaaatactttcaaagctatcccaaagttaaagcatggatcgagaagactctcgaagaaggccgcacacgtggttacgtagagaccttatttggacgtcgccgctatgttcccgatttaaacgctcgcgtgaaaggcaagcgtgaagccgccgaacgcatggcgttcaacatgcctgtacagggcacggcagctgacctcatgaaacttgcaatggtgcgcctttttccacaattgcgtgaagttggtgcccgcatgctcttgcaggtccacgatgaactcttgttagaagcgccaaaagagcgtgcggaagaggtggcagccctcgcgaaagaagttatggaaggcgtgtggcccttagcggtgcctcttgaagtcgaagttggtattggcgaggattggctggctgccaaaggataatga

SEQ ID NO: 3122 - protein, 841 aa, synthetic construct
  REGION 1..841: note = Variant of DNA polymerase I from Thermus sp. strain 2.9
MHHHHHHGGSGVLPVFEPKGRVLLVDGHHLAYRNFFALKGLTTSSGEPVQGVYGFAKSLLKALKEDGDVVIVVFDAKAPSFRHEAYEAYKAGRAPTPEDFPRQLALMKELVDLLGLERLEVPGFEADDVLATLAKKAEREGYEVQILTADRDLFQLLSPRISVLHPEGHRITPEWLWEKYGLRPEQWVDFRALAGDPSDNIPGVKGIGEKTALKLLKEWGSLENLLKNLDQVKPESVREKILAHLEDLKLSRELSRVRTDLPLEVDFGRRREPDWEGLKAFLERLEFGSLLHEFGLLESPLPAEEAPWPPPEGAFLGYRLSRPEPMWAELLALAASAQGRVYRAEDPHGALRGLFEVRGLLAKDLAVVALREGLDLPPTDDPMLLAYLLDPSNTTPEGVARRYGGEWTEDAAKRALLAERLHENLLGRLQGEERLLWLYEEVEKPLSRVLAHMEATGVKLDVAYLEALSLEVAAHMRRLEEEVFRLAGHSFRLNSRDQLERVLFDELGLPPIGKTEKTGKRSTSAAVLEALREVHPIVDKILQYRELAKLKGTYIDRLPALVHPKTGRLHTRFNQTATATGRLSSSDPNLQNIPVRTPLGQKIRRAFVAEEGWRLVALDYSQIELRVLAHLSGDENLIRVFQEGKDIHTQTASWMFGLSAEAIDPLMRRAAKTINFGVLYGMSAFRLSQELGIPYEEAQAFIQKYFQSYPKVKAWIEKTLEEGRTRGYVETLFGRRRYVPDLNARVKGKREAAERMAFNMPVQGTAADLMKLAMVRLFPQLREVGARMLLQVHDELLLEAPKERAEEVAALAKEVMEGVWPLAVPLEVEVGIGEDWLAAKG

SEQ ID NO: 3123 - DNA, 2529 bp, synthetic construct
  misc_feature 1..2529: note = Variant of DNA polymerase I from Thermus sp. strain 2.9
  source 1..2529: mol_type = other DNA
atgcaccatcatcatcatcatggcggtagcggcgtgttaccggtgttcgagcctaaaggtcgcgtgcttctggttgatggccatcatctcgcgtatcgtaacttctttgccctgaaaggattaaccaccagcagcggcgagccggtacagggtgtctacggctttgcaaagtcgctcctgaaagctctgaaagaagacggtgatgtggtgattgttgtctttgatgcgaaagcgccaagttttcgccacgaagcgtacgaagcttacaaagccgggcgtgctccaacgccggaagactttcctcgccaattggcgcttatgaaggaattagtggatttgcttggcctcgaacgcttggaagttcccggtttcgaggcagacgacgtattagcgactctcgcaaagaaagccgaacgtgagggctatgaagtccagatcttgacagcagatcgcgatcttttccagcttttatctccgcgcatctcggtgttacacccggaagggcatcgtatcaccccggaatggctctgggagaaatatggtttgcgtcccgaacaatgggtggattttcgcgccttagcaggcgatccgagcgacaatattccgggagttaaaggtatcggcgagaagacggcgctcaagctccttaaagaatgggggtcgttggagaacttgcttaagaatttagatcaggtcaaaccagagtcagtgcgtgagaagattcttgctcacctcgaagacctcaaattaagccgcgaattgtcccgtgtacgcaccgatttgccgctcgaagttgatttccgtcgccgccgcgaacctgactgggagggtcttaaagcgtttttagagcgtcttgaatttggttcgctcttgcatgaattcggccttttagaaagcccgttaccagccgaagaagcaccttggccaccgcccgagggcgcgtttttaggttaccgtttgagtcgcccggaaccgatgtgggccgaattactggctcttgcagcgtctgcccagggacgtgtgtatcgcgcggaagaccctcatggtgcgctccgcggcctcttcgaagtccgtggactccttgccaaagacttagctgttgttgcattgcgcgaaggtcttgatttacctccgactgatgatccaatgcttcttgcgtacctcttggacccgtcaaacacgacgcccgaaggcgtagcccgtcgttacggcggcgagtggaccgaagatgcagcgaaacgcgcgttattggccgaacgtttgcacgccaatttattaggacgtttgcaaggcgaggaacgtctcctctggctttacgaagaagtggagaaaccattgagtcgcgtgctcgcgcatatggaagctaccggtgtcaaattagacgtggcgtatttggaggctctcagccttgaagttgctgcccacatgcgccgcttggaggaagaagtattccgtttagcaggccattcctttcgccttaattctcgcgatcagttagaacgtgtgttgttcgatgaacttggtctccctcctatcggcaagacagagaagaccggtaaacgtagcacttcagcggcggttttagaagctcttcgcgaagtccatcccattgtggacaagatcttgcagtaccgcgaactcgcgaaattgaaaggcacctatattgaccgtcttccggcattagtccacccgaaaacgggacgcctccatacccgcttcaaccaaacagccacggcgaccggtcgtttgtcctcctctgatccaaaccttcagaatattccagtacgtaccccattgggccagaagatccgccgtgcgtttgtagctgaggagggttggcgtttagtggccctcgattatagccaaattgaattacgtgtccttgcccatctttctggcgatgagaacctcatccgcgtgtttcaggaaggcaaagacattcacactcaaacggcaagctggatgtttggattatcagctgaagcgatcgatcctttgatgcgtcgtgcagcgaagaagatcaatttcggtgttctctacggtatgagtgcctttcgtttgtcgcaggaattaggcattccctatgaagaagctgcggcgttcattcagaaatactttcaaagctatcccaaagttaaagcatggatcgagaagactctcgaagaaggccgcacacgtggttacgtagagaccttatttggacgtcgccgctatgttcccgatttaaacgctcgcgtgaaaggcaagcgtgaagccgccgaacgcatggcgttcaacatgcctgtacagggcacggcagctgacctcatgaaacttgcaatggtgcgcctttttccacaattgcgtgaagttggtgcccgcatgctcttgcaggtccacgatgaactcttgttagaagcgccaaaagagcgtgcggaagaggtggcagccctcgcgaaagaagttatggaaggcgtgtggcccttagcggtgcctcttgaagtcgaagttggtattggcgaggattggctggctgccaaaggataatga

SEQ ID NO: 3124 - protein, 841 aa, synthetic construct
  REGION 1..841: note = Variant of DNA polymerase I from Thermus sp. strain 2.9
MHHHHHHGGSGVLPVFEPKGRVLLVDGHHLAYRNFFALKGLTTSSGEPVQGVYGFAKSLLKALKEDGDVVIVVFDAKAPSFRHEAYEAYKAGRAPTPEDFPRQLALMKELVDLLGLERLEVPGFEADDVLATLAKKAEREGYEVQILTADRDLFQLLSPRISVLHPEGHRITPEWLWEKYGLRPEQWVDFRALAGDPSDNIPGVKGIGEKTALKLLKEWGSLENLLKNLDQVKPESVREKILAHLEDLKLSRELSRVRTDLPLEVDFRRRREPDWEGLKAFLERLEFGSLLHEFGLLESPLPAEEAPWPPPEGAFLGYRLSRPEPMWAELLALAASAQGRVYRAEDPHGALRGLFEVRGLLAKDLAVVALREGLDLPPTDDPMLLAYLLDPSNTTPEGVARRYGGEWTEDAAKRALLAERLHANLLGRLQGEERLLWLYEEVEKPLSRVLAHMEATGVKLDVAYLEALSLEVAAHMRRLEEEVFRLAGHSFRLNSRDQLERVLFDELGLPPIGKTEKTGKRSTSAAVLEALREVHPIVDKILQYRELAKLKGTYIDRLPALVHPKTGRLHTRFNQTATATGRLSSSDPNLQNIPVRTPLGQKIRRAFVAEEGWRLVALDYSQIELRVLAHLSGDENLIRVFQEGKDIHTQTASWMFGLSAEAIDPLMRRAAKKINFGVLYGMSAFRLSQELGIPYEEAAAFIQKYFQSYPKVKAWIEKTLEEGRTRGYVETLFGRRRYVPDLNARVKGKREAAERMAFNMPVQGTAADLMKLAMVRLFPQLREVGARMLLQVHDELLLEAPKERAEEVAALAKEVMEGVWPLAVPLEVEVGIGEDWLAAKG

SEQ ID NO: 3125 - DNA, 2529 bp, synthetic construct
  misc_feature 1..2529: note = Variant of DNA polymerase I from Thermus sp. strain 2.9
  source 1..2529: mol_type = other DNA
atgcaccatcatcatcatcatggcggtagcggcgtgttaccggtgttcgagcctaaaggtcgcgtgcttctggttgatggccatcatctcgcgtatcgtaacttctttgccctgaaaggattaaccaccagcagcggcgagccggtacagggtgtctacggctttgcaaagtcgctcctgaaagctctgaaagaagacggtgatgtggtgattgttgtctttgatgcgaaagcgccaagttttcgccacgaagcgtacgaagcttacaaagccgggcgtgctccaacgccggaagactttcctcgccaattggcgcttatgaaggaattagtggatttgcttggcctcgaacgcttggaagttcccggtttcgaggcagacgacgtattagcgactctcgcaaagaaagccgaacgtgagggctatgaagtccagatcttgacagcagatcgcgatcttttccagcttttatctccgcgcatctcggtgttacacccggaagggcatcgtatcaccccggaatggctctgggagaaatatggtttgcgtcccgaacaatgggtggattttcgcgccttagcaggcgatccgagcgacaatattccgggagttaaaggtatcggcgagaagacggcgctcaagctccttaaagaatgggggtcgttggagaacttgcttaagaatttagatcaggtcaaaccagagtcagtgcgtgagaagattcttgctcacctcgaagacctcaaattaagccgcgaattgtcccgtgtacgcaccgatttgccgctcgaagttgatttccgtcgccgccgcgaacctgactgggagggtcttaaagcgtttttagagcgtcttgaatttggttcgctcttgcatgaattcggccttttagaaagcccgttaccagccgaagaagcaccttggccaccgcccgagggcgcgtttttaggttaccgtttgagtcgcccggaaccgatgtgggccgaattactggctcttgcagcgtctgcccagggacgtgtgtatcgcgcggaagaccctcatggtgcgctccgcggcctcttcgaagtccgtggactccttgccaaagacttagctgttgttgcattgcgcgaaggtcttgatttacctccgactgatgatccaatgcttcttgcgtacctcttggacccgtcaaacacgacgcccgaaggcgtagcccgtcgttacggcggcgagtggaccgaagatgcagcgaaacgcgcgttattggccgaacgtttgcacgccaatttattaggacgtttgcaaggcgaggaacgtctcctctggctttacgaagaagtggagaaaccattgagtcgcgtgctcgcgcatatggaagctaccggtgtcaaattagacgtggcgtatttggaggctctcagccttgaagttgctgcccacatgcgccgcttggaggaagaagtattccgtttagcaggccattcctttcgccttaattctcgcgatcagttagaacgtgtgttgttcgatgaacttggtctccctcctatcggcaagacagagaagaccggtaaacgtagcacttcagcggcggttttagaagctcttcgcgaagtccatcccattgtggacaagatcttgcagtaccgcgaactcgcgaaattgaaaggcacctatattgaccgtcttccggcattagtccacccgaaaacgggacgcctccatacccgcttcaaccaaacagccacggcgaccggtcgtttgtcctcctctgatccaaaccttcagaatattccagtacgtaccccattgggccagaagatccgccgtgcgtttgtagctgaggagggttggcgtttagtggccctcgattatagccaaattgaattacgtgtccttgcccatctttctggcgatgagaacctcatccgcgtgtttcaggaaggcaaagacattcacactcaaacggcaagctggatgtttggattatcagctgaagcgatcgatcctttgatgcgtcgtgcagcgaagaccatcaatttcggtgttctctacggtatgagtgccaagcgtttgtcgcaggaattaggcattccctatgaagaagctgcggcgttcattcagaaatactttcaaagctatcccaaagttaaagcatggatcgagaagactctcgaagaaggccgcacacgtggttacgtagagaccttatttggacgtcgccgctatgttcccgatttaaacgctcgcgtgaaaggcaagcgtgaagccgccgaacgcatggcgttcaacatgcctgtacagggcacggcagctgacctcatgaaacttgcaatggtgcgcctttttccacaattgcgtgaagttggtgcccgcatgctcttgcaggtccacgatgaactcttgttagaagcgccaaaagagcgtgcggaagaggtggcagccctcgcgaaagaagttatggaaggcgtgtggcccttagcggtgcctcttgaagtcgaagttggtattggcgaggattggctggctgccaaaggataatga

SEQ ID NO: 3126 - protein, 841 aa, synthetic construct
  REGION 1..841: note = Variant of DNA polymerase I from Thermus sp. strain 2.9
MHHHHHHGGSGVLPVFEPKGRVLLVDGHHLAYRNFFALKGLTTSSGEPVQGVYGFAKSLLKALKEDGDVVIVVFDAKAPSFRHEAYEAYKAGRAPTPEDFPRQLALMKELVDLLGLERLEVPGFEADDVLATLAKKAEREGYEVQILTADRDLFQLLSPRISVLHPEGHRITPEWLWEKYGLRPEQWVDFRALAGDPSDNIPGVKGIGEKTALKLLKEWGSLENLLKNLDQVKPESVREKILAHLEDLKLSRELSRVRTDLPLEVDFRRRREPDWEGLKAFLERLEFGSLLHEFGLLESPLPAEEAPWPPPEGAFLGYRLSRPEPMWAELLALAASAQGRVYRAEDPHGALRGLFEVRGLLAKDLAVVALREGLDLPPTDDPMLLAYLLDPSNTTPEGVARRYGGEWTEDAAKRALLAERLHANLLGRLQGEERLLWLYEEVEKPLSRVLAHMEATGVKLDVAYLEALSLEVAAHMRRLEEEVFRLAGHSFRLNSRDQLERVLFDELGLPPIGKTEKTGKRSTSAAVLEALREVHPIVDKILQYRELAKLKGTYIDRLPALVHPKTGRLHTRFNQTATATGRLSSSDPNLQNIPVRTPLGQKIRRAFVAEEGWRLVALDYSQIELRVLAHLSGDENLIRVFQEGKDIHTQTASWMFGLSAEAIDPLMRRAAKTINFGVLYGMSAKRLSQELGIPYEEAAAFIQKYFQSYPKVKAWIEKTLEEGRTRGYVETLFGRRRYVPDLNARVKGKREAAERMAFNMPVQGTAADLMKLAMVRLFPQLREVGARMLLQVHDELLLEAPKERAEEVAALAKEVMEGVWPLAVPLEVEVGIGEDWLAAKG

SEQ ID NO: 3127 - DNA, 2529 bp, synthetic construct
  misc_feature 1..2529: note = Variant of DNA polymerase I from Thermus sp. strain 2.9
  source 1..2529: mol_type = other DNA
atgcaccatcatcatcatcatggcggtagcggcgtgttaccggtgttcgagcctaaaggtcgcgtgcttctggttgatggccatcatctcgcgtatcgtaacttctttgccctgaaaggattaaccaccagcagcggcgagccggtacagggtgtctacggctttgcaaagtcgctcctgaaagctctgaaagaagacggtgatgtggtgattgttgtctttgatgcgaaagcgccaagttttcgccacgaagcgtacgaagcttacaaagccgggcgtgctccaacgccggaagactttcctcgccaattggcgcttatgaaggaattagtggatttgcttggcctcgaacgcttggaagttcccggtttcgaggcagacgacgtattagcgactctcgcaaagaaagccgaacgtgagggctatgaagtccagatcttgacagcagatcgcgatcttttccagcttttatctccgcgcatctcggtgttacacccggaagggcatcgtatcaccccggaatggctctgggagaaatatggtttgcgtcccgaacaatgggtggattttcgcgccttagcaggcgatccgagcgacaatattccgggagttaaaggtatcggcgagaagacggcgctcaagctccttaaagaatgggggtcgttggagaacttgcttgaaaatttagatcaggtcaaaccagagtcagtgcgtgagaagattcttgctcacctcgaagacctcaaattaagccgcgaattgtcccgtgtacgcaccgatttgccgctcgaagttgatttccgtcgccgccgcgaacctgactgggagggtcttaaagcgtttttagagcgtcttgaatttggttcgctcttgcatgaattcggccttttagaaagcccgttaccggccgaagaagcaccttggccaccgcccgaaggcgcgtttttaggttaccgtttgagtcgcccggaaccgatgtgggccgaattactggctcttgcagcgtctgcccagggaaccgtgtatcgcgcggaagaccctcatggtgcgctccgcggcctcttcgaagtccgtggactccttgccaaagacttagctgttgttgcattgcgcgaaggtcttgatttacctccgactgatgatccaatgcttcttgcgtacctcttggacccgtcaaacacgacgcccgaaggcgtagcccgtcgttacggcggcgagtggaccgaagatgcagcgaaacgcgcgttattggccgaacgtttgcacgaaaatttattaggacgtttgcaaggcgaggaacgtctcctctggctttacgaagaagtggagaaaccattgagtcgcgtgctcgcgcatatggaagctaccggtgtcaaattagacgtggcgtatttggaggctctcagccttgaagttgctgcccacatgcgccgcttggaggaagaagtattccgtttagcaggccattcctttcgccttaattctcgcgatcagttagaacgtgtgttgttcgatgaacttggtctccctcctatcggcaagacagagaagaccggtaaacgtagcacttcagcggcggttttagaagctcttcgcgaagtccatcccattgtggacaagatcttgcaataccgcgaactcgcgaaattgaaaggcacctatattgaccgtcttccggcattagtccacccgaaaacgggacgcctccatacccgcttcaaccaaacagccacggcgaccggtcgtttgtcctcctctgatccaaaccttcagaatattccagtacgtaccccattgggccagaagatccgcaaagcgtttgtagctgaggagggttggcgtttagtggccctcgattatagtcaaattgaattacgtgtccttgcccatctttctggcgatgagaacctcatccgcgtgtttcaggaaggcaaagacattcacactcaaacggcaagctggatgtttggattatcagctgaagcgatcgatcctttgatgcgtcgtgcagcgaagaccatcaatttcggtgttctctacggtatgagtgcctttcgtttgtcgcaggaattaggcattccctatgaagaagctgcggcgttcattcagaaatactttcaaagctatcccaaagttaaagcatggatcgagaagactctcgaagaaggccgcacacgtggttacgtagagaccttatttggacgtcgccgctatgttcccgatttaaacgctcgcgtgaaaggcaagcgtgaagccgccgaacgcatggcgttcaacatgcctgtacagggcacggcagctgacctcatgaaacttgcaatggtgcgcctttttccacaattgcgtgaagttggtgcccgcatgctcttgcaggtccacgatgaactcttgttagaagcgccaaaagagcgtgcggaagaggtggcagccctcgcgaaagaagttatggaaggcgtgtggcccttagcggtgcctcttgaagtcgaagttggtattggcgaggattggctggctgccaaaggataatga

SEQ ID NO: 3128 - protein, 841 aa, synthetic construct
  REGION 1..841: note = Variant of DNA polymerase I from Thermus sp. strain 2.9
MHHHHHHGGSGVLPVFEPKGRVLLVDGHHLAYRNFFALKGLTTSSGEPVQGVYGFAKSLLKALKEDGDVVIVVFDAKAPSFRHEAYEAYKAGRAPTPEDFPRQLALMKELVDLLGLERLEVPGFEADDVLATLAKKAEREGYEVQILTADRDLFQLLSPRISVLHPEGHRITPEWLWEKYGLRPEQWVDFRALAGDPSDNIPGVKGIGEKTALKLLKEWGSLENLLENLDQVKPESVREKILAHLEDLKLSRELSRVRTDLPLEVDFRRRREPDWEGLKAFLERLEFGSLLHEFGLLESPLPAEEAPWPPPEGAFLGYRLSRPEPMWAELLALAASAQGTVYRAEDPHGALRGLFEVRGLLAKDLAVVALREGLDLPPTDDPMLLAYLLDPSNTTPEGVARRYGGEWTEDAAKRALLAERLHENLLGRLQGEERLLWLYEEVEKPLSRVLAHMEATGVKLDVAYLEALSLEVAAHMRRLEEEVFRLAGHSFRLNSRDQLERVLFDELGLPPIGKTEKTGKRSTSAAVLEALREVHPIVDKILQYRELAKLKGTYIDRLPALVHPKTGRLHTRFNQTATATGRLSSSDPNLQNIPVRTPLGQKIRKAFVAEEGWRLVALDYSQIELRVLAHLSGDENLIRVFQEGKDIHTQTASWMFGLSAEAIDPLMRRAAKTINFGVLYGMSAFRLSQELGIPYEEAAAFIQKYFQSYPKVKAWIEKTLEEGRTRGYVETLFGRRRYVPDLNARVKGKREAAERMAFNMPVQGTAADLMKLAMVRLFPQLREVGARMLLQVHDELLLEAPKERAEEVAALAKEVMEGVWPLAVPLEVEVGIGEDWLAAKG

SEQ ID NO: 3129 - DNA, 2529 bp, synthetic construct
  misc_feature 1..2529: note = Variant of DNA polymerase I from Thermus sp. strain 2.9
  source 1..2529: mol_type = other DNA
atgcaccatcatcatcatcatggcggtagcggcgtgttaccggtgttcgagcctaaaggtcgcgtgcttctggttgatggccatcatctcgcgtatcgtaacttctttgccctgaaaggattaaccaccagcctgggcgagccggtacagggtgtctacggctttgcaaagtcgctcctgaaagctctgaaagaagacggtgatgtggtgattgttgtctttgatgcgaaagcgccaagttttcgccacgaagcgtacgaagcttacaaagccgggcgtgctccaacgccggaagactttcctcgccaattggcgcttatgaaggaattagtggatttgcttggcctcgaacgcttggaagttcccggtttcgaggcagacgacgtattagcgactctcgcaaagaaagccgaacgtgagggctatgaagtccagatcttgacagcagatcgcgatcttttccagcttttatctccgcgcatctcggtgttacacccggaagggcatcgtatcaccccggaatggctctgggagaaatatggtttgcgtcccgaacaatgggtggattttcgcgccttagcaggcgatccgagcgacaatattccgggagttaaaggtatcggcgagaagacggcgctcaagctccttaaagaatgggggtcgttggagaacttgcttaagaatttagatcaggtcaaaccagagtcagtgcgtgagaagattcttgctcacctcgaagacctcaaattaagccgcgaattgtcccgtgtacgcaccgatttgccgctcgaagttgatttccgtcgccgccgcgaacctgactgggagggtcttaaagcgtttttagagcgtcttgaatttggttcgctcttgcatgaattcggccttttagaaagcccgttaccagccgaagaagcaccttggccaccgcccgaaggcgcgtttttaggttaccgtttgagtcgcccggaaccgatgtgggccgaattagcggctcttgcagcgtctgcccagggacgtgtgtatcgcgcggaagaccctcatggtgcgctccgcggcctcttcgaagtccgtggactccttgccaaagacttagctgttgttgcattgcgcgaaggtcttgatttacctccgactgatgatccaatgcttcttgcgtacctcttggacccgtcaaacacgacgcccgaaggcgtagcccgtcgttacggcggcgagtggaccgaagatgcagcgaaacgcgcgttattggccgaacgtttgcacgccaatttattaggacgtttgcaaggcgaggaacgtctcctctggctttacgaagaagtggagaaaccattgagtcgcgtgctcgcgcatatggaagctaccggtgtcaaattagacgtggcgtatttggaggctctcagccttgaagttgctgcccacatgcgccgcttggaggaagaagtattccgtttagcaggccattcctttcgccttaattctcgcgatcagttagaacgtgtgttgttcgatgaacttggtctccctcctatcggcaagacagagaagaccggtaaacgtagcacttcagcggcggttttagaagctcttcgcgaagtccatcccattgtggacaagatcttgcagtaccgcgaactcgcgaaattgaaaggcacctatattgaccgtcttccggcattagtccacccgaaaacgggacgcctccatacccgcttcaaccaaacagccacggcgaccggtcgtttgtcctcctctgatccaaaccttcagaatattccagtacgtaccccattgggccagaagatccgccgtgcgtttgtagctgaggagggttggcgtttagtggccctcgattatcgtcaaattgaattacgtgtccttgcccatctttctggcgatgagaacctcatccgcgtgtttcaggaaggcaaagacattcacactcaaacggcaagctggatgtttggattatcagctgaagcgatcgatcctttgatgcgtcgtgcagcgaagaccatcaatttcggtgttctctacggtatgagtgcctttcgtttgtcgcaggaattaggcattccctatgaagaagctgcggcgttcattcagaaatactttcaaagctatcccaaagttaaagcatggatcgagaagactctcgaagaaggccgcacacgtggttacgtagagaccttatttggacgtcgccgctatgttcccgatttaaacgctcgcgtgaaaggcaagcgtgaagccgccgaacgcatggcgttcaacatgcctgtacagggcacggcagctgacctcatgaaacttgcaatggtgcgcctttttccacaattgcgtgaagttggtgcccgcatgctcttgcaggtccacgatgaactcttgttagaagcgccaaaagagcgtgcggaagaggtggcagccctcgcgaaagaagttatggaaggcgtgtggcccttagcggtgcctcttgaagtcgaagttggtattggcgaggattggctggctgccaaaggataatga

SEQ ID NO: 3130 - protein, 841 aa, synthetic construct
  REGION 1..841: note = Variant of DNA polymerase I from Thermus sp. strain 2.9
MHHHHHHGGSGVLPVFEPKGRVLLVDGHHLAYRNFFALKGLTTSLGEPVQGVYGFAKSLLKALKEDGDVVIVVFDAKAPSFRHEAYEAYKAGRAPTPEDFPRQLALMKELVDLLGLERLEVPGFEADDVLATLAKKAEREGYEVQILTADRDLFQLLSPRISVLHPEGHRITPEWLWEKYGLRPEQWVDFRALAGDPSDNIPGVKGIGEKTALKLLKEWGSLENLLKNLDQVKPESVREKILAHLEDLKLSRELSRVRTDLPLEVDFRRRREPDWEGLKAFLERLEFGSLLHEFGLLESPLPAEEAPWPPPEGAFLGYRLSRPEPMWAELAALAASAQGRVYRAEDPHGALRGLFEVRGLLAKDLAVVALREGLDLPPTDDPMLLAYLLDPSNTTPEGVARRYGGEWTEDAAKRALLAERLHANLLGRLQGEERLLWLYEEVEKPLSRVLAHMEATGVKLDVAYLEALSLEVAAHMRRLEEEVFRLAGHSFRLNSRDQLERVLFDELGLPPIGKTEKTGKRSTSAAVLEALREVHPIVDKILQYRELAKLKGTYIDRLPALVHPKTGRLHTRFNQTATATGRLSSSDPNLQNIPVRTPLGQKIRRAFVAEEGWRLVALDYRQIELRVLAHLSGDENLIRVFQEGKDIHTQTASWMFGLSAEAIDPLMRRAAKTINFGVLYGMSAFRLSQELGIPYEEAAAFIQKYFQSYPKVKAWIEKTLEEGRTRGYVETLFGRRRYVPDLNARVKGKREAAERMAFNMPVQGTAADLMKLAMVRLFPQLREVGARMLLQVHDELLLEAPKERAEEVAALAKEVMEGVWPLAVPLEVEVGIGEDWLAAKG

SEQ ID NO: 3131 - DNA, 2529 bp, synthetic construct
  misc_feature 1..2529: note = Variant of DNA polymerase I from Thermus sp. strain 2.9
  source 1..2529: mol_type = other DNA
atgcaccatcatcatcatcatggcggtagcggcgtgttaccggtgttcgagcctaaaggtcgcgtgcttctggttgatggccatcatctcgcgtatcgtaacttctttgccctgaaaggattaaccaccagctcgggcgagccggtacagggtgtctacggctttgcaaagtcgctcctgaaagctctgaaagaagacggtgatgtggtgattgttgtctttgatgcgaaagcgccaagttttcgccacgaagcgtacgaagcttacaaagccgggcgtgctccaacgccggaagactttcctcgccaattggcgcttatgaaggaattagtggatttgcttggcctcgaacgcttggaagttcccggtttcgaggcagacgacgtattagcgactctcgcaaagaaagccgaacgtgagggctatgaagtccagatcttgacagcagatcgcgatcttttccagcttttatctccgcgcatctcggtgttacacccggaagggcatcgtatcaccccggaatggctctgggagaaatatggtttgcgtcccgaacaatgggtggattttcgcgccttagcaggcgatccgagcgacaatattccgggagttaaaggtatcggcgagaagacggcgctcaagctccttaaagaatgggggtcgttggagaacttgcttaagaatttagatcaggtcaaaccagagtcagtgcgtgagaagattcttgctcacctcgaagacctcaaattaagccgcgaattgtcccgtgtacgcaccgatttgccgctcgaagttgatttccagcgccgccgcgaacctgactgggagggtcttaaagcgtttttagagcgtcttgaatttggttcgctcttgcatgaattcggccttttagaaagcccgttaccagccgaagaagcaccttggccaccgcccgagggcgcgtttttaggttaccgtttgagtcgcccggaaccgatgtgggccgaattactggctcttgcagcgtctgcccagggacgtgtgtatcgcgcggaagaccctcatggtgcgctccgcggcctcttcgaagtccgtggactccttgccaaagacttagctgttgttgcattgcgcgaaggtcttgatttacctccgactgatgatccaatgcttcttgcgtacctcttggacccgtcaaacacgacgcccgaaggcgtagcccgtcgttacggcggcgagtggaccgaagatgcagcgaaacgcgcgttattggccgaacgtttgcacgaaaatttattaggacgtttgcaaggcgaggaacgtctcctctggctttacgaagaagtggagaaaccattgagtcgcgtgctcgcgcatatggaagctaccggtgtcaaattagacgtggcgtatttggaggctctcagccttgaagttgctgcccacatgcgccgcttggaggaagaagtattccgtttagcaggccactcctttcgccttaactctcgcgatcagttagaacgtgtgttgttcgatgaacttggtctccctcctatcggcaagacagagaagaccggtaaacgtagcacttcagcggcggttttagaagctcttcgcgaagtccatcccattgtggacaagatcttgcagtaccgcgaactcgcgaaattgaaaggcacctatattgaccgtcttccggcattagtccacccgaaaacgggacgcctccatacccgcttcaaccaaacagccacggcgaccggtcgtttgtcctcctctgatccaaaccttcagaatattccagtacgtaccccattgggccagaagatccgcaaagcgtttgtagctgaggagggttggcgtttagtggccctcgattatagccaaattgaattacgtgtccttgcccatctttctggcgatgagaacctcatccgcgtgtttcaggaaggcaaagacattcacactcaaacggcaagctggatgtttggattatcagctgaagcgatcgatcctttgatgcgtcgtgcagcgaagaccatcaatttcggtgttctctacggtatgagtgcctttcgtttgtcgcaggaattaggcattccctatgaggaagcttcggcgttcattcagaaatactttcaaagctatcccaaagttaaagcatggatcgagaagactctcgaagaaggccgcacacgtggttacgtagagaccttatttggacgtcgccgctatgttcccgatttaaacgctcgcgtgaaaggcaagcgtgaagccgccgaacgcatggcgttcaacatgcctgtacagggcacggcagctgacctcatgaaacttgcaatggtgcgcctttttccacaattgcgtgaagttggtgcccgcatgctcttgcaggtccacgatgaactcttgttagaagcgccaaaagagcgtgcggaagaggtggcagccctcgcgaaagaagttatggaaggcgtgtggcccttagcggtgcctcttgaagtcgaagttggtattggcgaggattggctggctgccaaaggataatga

SEQ ID NO: 3132 - protein, 841 aa, synthetic construct
  REGION 1..841: note = Variant of DNA polymerase I from Thermus sp. strain 2.9
MHHHHHHGGSGVLPVFEPKGRVLLVDGHHLAYRNFFALKGLTTSSGEPVQGVYGFAKSLLKALKEDGDVVIVVFDAKAPSFRHEAYEAYKAGRAPTPEDFPRQLALMKELVDLLGLERLEVPGFEADDVLATLAKKAEREGYEVQILTADRDLFQLLSPRISVLHPEGHRITPEWLWEKYGLRPEQWVDFRALAGDPSDNIPGVKGIGEKTALKLLKEWGSLENLLKNLDQVKPESVREKILAHLEDLKLSRELSRVRTDLPLEVDFQRRREPDWEGLKAFLERLEFGSLLHEFGLLESPLPAEEAPWPPPEGAFLGYRLSRPEPMWAELLALAASAQGRVYRAEDPHGALRGLFEVRGLLAKDLAVVALREGLDLPPTDDPMLLAYLLDPSNTTPEGVARRYGGEWTEDAAKRALLAERLHENLLGRLQGEERLLWLYEEVEKPLSRVLAHMEATGVKLDVAYLEALSLEVAAHMRRLEEEVFRLAGHSFRLNSRDQLERVLFDELGLPPIGKTEKTGKRSTSAAVLEALREVHPIVDKILQYRELAKLKGTYIDRLPALVHPKTGRLHTRFNQTATATGRLSSSDPNLQNIPVRTPLGQKIRKAFVAEEGWRLVALDYSQIELRVLAHLSGDENLIRVFQEGKDIHTQTASWMFGLSAEAIDPLMRRAAKTINFGVLYGMSAFRLSQELGIPYEEASAFIQKYFQSYPKVKAWIEKTLEEGRTRGYVETLFGRRRYVPDLNARVKGKREAAERMAFNMPVQGTAADLMKLAMVRLFPQLREVGARMLLQVHDELLLEAPKERAEEVAALAKEVMEGVWPLAVPLEVEVGIGEDWLAAKG

SEQ ID NO: 3133 - DNA, 2529 bp, synthetic construct
  misc_feature 1..2529: note = Variant of DNA polymerase I from Thermus sp. strain 2.9
  source 1..2529: mol_type = other DNA
atgcaccatcatcatcatcatggcggtagcggcgtgttaccggtgttcgagcctaaaggtcgcgtgcttctggttgatggccatcatctcgcgtatcgtaacttctttgccctgaaaggattaaccaccagcagcggcgagccggtacagggtgtctacggctttgcaaagtcgctcctgaaagctctgaaagaagacggtgatgtggtgattgttgtctttgatgcgaaagcgccaagttttcgccacgaagcgtacgaagcttacaaagccgggcgtgctccaacgccggaagactttcctcgccaattggcgcttatgaaggaattagtggatttgcttggcctcgaacgcttggaagttcccggtttcgaggcagacgacgtattagcgactctcgcaaagaaagccgaacgtgagggctatgaagtccagatcttgacagcagatcgcgatcttttccagcttttatctccgcgcatctcggtgttacacccggaagggcatcgtatcaccccggaatggctctgggagaaatatggtttgcgtcccgaacaatgggtggattttcgcgccttagcaggcgatccgagcgacaatattccgggagttaaaggtatcggcgagaagacggcgctcaagctccttaaagaatgggggtcgttggagaacttgcttaagaatttagatcaggtcaaaccagagtcagtgcgtgagaagattcttgctcacctcgaagacctcaaattaagccgcgaattgtcccgtgtacgcaccgatttgccgctcgaagttgatttccgtcgccgccgcgaacctgactgggagggtcttaaagcgtttttagagcgtcttgaatttggttcgctcttgcatgaattcggccttttagaaagcccgttaccagccgaagaagcaccttggccaccgcccgagggcgcgtttttaggttaccgtttgagtcgcccggaaccgatgtgggccgaattactggctcttgcagcgtctgcccagggacgtgtgtatcgcgcggaagaccctcatggtgcgctccgcggcctcttcgaagtccgtggactccttgccaaagacttagctgttgttgcattgcgcgaaggtcttgatttacctccgactgatgatccaatgcttcttgcgtacctcttggacccgtcaaacacgacgcccgaaggcgtagcccgtcgttacggcggcgagtggaccgaagatgcagcgaaacgcgcgttattggccgaacgtttgcacgccaatttattaggacgtttgcaaggcgaggaacgtctcctctggctttacgaagaagtggagaaaccattgagtcgcgtgctcgcgcatatggaagctaccggtgtcaaattagacgtggcgtatttggaggctctcagccttgaagttgctgcccacatgcgccgcttggaggaagaagtattccgtttagcaggccattcctttcgccttaattctcgcgatcagttagaacgtgtgttgttcgatgaacttggtctccctcctatcggcaagacagagaagaccggtaaacgtagcacttcagcggcggttttagaagctcttcgcgaagtccatcccattgtggacaagatcttgcagtaccgcgaactcgcgaaattgaaaggcacctatattgaccgtcttccggcattagtccacccgaaaacgggacgcctccatacccgcttcaaccaaacagccacggcgaccggtcgtttgtcctcctctgatccaaaccttcagaatattccagtacgtaccccattgggccagaagatccgcaaagcgtttgtagctgaggagggttggcgtttagtggccctcgattatagccaaattgaattacgtgtccttgcccatctttctggcgatgagaacctcatccgcgtgtttcaggaaggcaaagacattcacactcaaacggcaagctggatgtttggattaagtgctgaagcgatcgatcctttgatgcgtcgtgcagcgaagaccatcaatttcggtgttctctacggtatgagtgcctttcgtttgtcgcaggaattaggcattccctatgaagaagctgcggcgttcattcagaaatactttcaaagctatcccaaagttaaagcatggatcgagaagactctcgaagaaggccgcacacgtggttacgtagagaccttatttggacgtcgccgctatgttcccgatttaaacgctcgcgtgaaaggcaagcgtgaagccgccgaacgcatggcgttcaacatgcctgtacagggcacggcagctgacctcatgaaacttgcaatggtgcgcctttttccacaattgcgtgaagttggtgcccgcatgctcttgcaggtccacgatgaactcttgttagaagcgccaaaagagcgtgcggaagaggtggcagccctcgcgaaagaagttatggaaggcgtgtggcccttagcggtgcctcttgaagtcgaagttggtattggcgaggattggctggctgccaaaggataatga

SEQ ID NO: 3134 - protein, 841 aa, synthetic construct
  REGION 1..841: note = Variant of DNA polymerase I from Thermus sp. strain 2.9
MHHHHHHGGSGVLPVFEPKGRVLLVDGHHLAYRNFFALKGLTTSSGEPVQGVYGFAKSLLKALKEDGDVVIVVFDAKAPSFRHEAYEAYKAGRAPTPEDFPRQLALMKELVDLLGLERLEVPGFEADDVLATLAKKAEREGYEVQILTADRDLFQLLSPRISVLHPEGHRITPEWLWEKYGLRPEQWVDFRALAGDPSDNIPGVKGIGEKTALKLLKEWGSLENLLKNLDQVKPESVREKILAHLEDLKLSRELSRVRTDLPLEVDFRRRREPDWEGLKAFLERLEFGSLLHEFGLLESPLPAEEAPWPPPEGAFLGYRLSRPEPMWAELLALAASAQGRVYRAEDPHGALRGLFEVRGLLAKDLAVVALREGLDLPPTDDPMLLAYLLDPSNTTPEGVARRYGGEWTEDAAKRALLAERLHANLLGRLQGEERLLWLYEEVEKPLSRVLAHMEATGVKLDVAYLEALSLEVAAHMRRLEEEVFRLAGHSFRLNSRDQLERVLFDELGLPPIGKTEKTGKRSTSAAVLEALREVHPIVDKILQYRELAKLKGTYIDRLPALVHPKTGRLHTRFNQTATATGRLSSSDPNLQNIPVRTPLGQKIRKAFVAEEGWRLVALDYSQIELRVLAHLSGDENLIRVFQEGKDIHTQTASWMFGLSAEAIDPLMRRAAKTINFGVLYGMSAFRLSQELGIPYEEAAAFIQKYFQSYPKVKAWIEKTLEEGRTRGYVETLFGRRRYVPDLNARVKGKREAAERMAFNMPVQGTAADLMKLAMVRLFPQLREVGARMLLQVHDELLLEAPKERAEEVAALAKEVMEGVWPLAVPLEVEVGIGEDWLAAKG

SEQ ID NO: 3135 - DNA, 2529 bp, synthetic construct
  misc_feature 1..2529: note = Variant of DNA polymerase I from Thermus sp. strain 2.9
  source 1..2529: mol_type = other DNA
atgcaccatcatcatcatcatggcggtagcggcgtgttaccggtgttcgagcctaaaggtcgcgtgcttctggttgatggccatcatctcgcgtatcgtaacttctttgccctgaaaggattaaccaccagctcgggcgagccggtacagggtgtctacggctttgcaaagtcgctcctgaaagctctgaaagaagacggtgatgtggtgattgttgtctttgatgcgaaagcgccaagttttcgccacgaagcgtacgaagcttacaaagccgggcgtgctccaacgccggaagactttcctcgccaattggcgcttatgaaggaattagtggatttgcttggcctcgaacgcttggaagttcccggtttcgaggcagacgacgtattagcgactctcgcaaagaaagccgaacgtgagggctatgaagtccagatcttgacagcagatcgcgatcttttccagcttttatctccgcgcatctcggtgttacacccggaagggcatcgtatcaccccggaatggctctgggagaaatatggtttgcgtcccgaacaatgggtggattttcgcgccttagcaggcgatccgagcgacaatattccgggagttaaaggtatcggcgagaagacggcgctcaagctccttaaagaatgggggtcgttggagaacttgcttaagaatttagatcaggtcaaaccagagtcagtgcgtgagaagattcttgctcacctcgaagacctcaaattaagccgcgaattgtcccgtgtacgcaccgatttgccgctcgaagttgatttccgtcgccgccgcgaacctgactgggagggtcttaaagcgtttttagagcgtcttgaatttggttcgctcttgcatgaattcggccttttagaaagcccgttaccagccgaagaagcaccttggccaccgcccgaaggcgcgtttttaggttaccgtttgagtcgcccggaaccgatgtgggccgaattactggctcttgcagcgtctgcccagggacgtgtgtatcgcgcggaagaccctcatggtgcgctccgcggcctcttcgaagtccgtggactccttgccaaagacttagctgttgttgcattgcgcgaaggtcttgatttacctccgactgatgatccaatgcttcttgcgtacctcttggacccgtcaaacacgacgcccgaaggcgtagcccgtcgttacggcggcgagtggaccgaagatgcagcgaaacgcgcgttattggccgaacgtttgcacgaaaatttattaggacgtttgcaaggcgaggaacgtctcctctggctttacgaagaagtggagaaaccattgagtcgcgtgctcgcgcatatggaagctaccggtgtcaaattagacgtggcgtatttggaggctctcagccttgaagttgctgcccacatgcgccgcttggaggaagaagtattccgtttagcaggccattcctttcgccttaattctcgcgatcagttagaacgtgtgttgttcgatgaacttggtctccctcctatcggcaagacagagaagaccggtaaacgtagcacttcagccgcggttttagaagctcttcgcgaagtccatcccattgtggacaagatcttgcagtaccgcgaactcgcgaaattgaaaggcacctatattgaccgtcttccggcattagtccacccgaaaacgggacgcctccatacccgcttcaaccaaacagccacggcgaccggtcgtttgtcctcctctgatccaaaccttcagaatattccagtacgtaccccattgggccagaagatccgcaaagcgtttgtagctgaggagggttggcgtttagtggccctcgattatcgtcaaattgaattacgtgtccttgcccatctttctggcgatgagaacctcatccgcgtgtttcaggaaggcaaagacattcacactcaaacggcaagctggatgtttggattatcagctgaagcgatcgatcctttgatgcgtcgtgcagcgaagaccatcaatttcggtgttctctacggtatgagtgcctttcgtttgtcgcaggaattaggcattccctatgaagaagctgcggcgttcattcagaaatactttcaaagctatcccaaagttaaagcatggatcgagaagactctcgaagaaggccgcacacgtggttacgtagagaccttatttggacgtcgccgctatgttcccgatttaaacgctcgcgtgaaaggcaagcgtgaagccgccgaacgcatggcgttcaacatgcctgtacagggcacggcagctgacctcatgaaacttgcaatggtgcgcctttttccacaattgcgtgaagttggtgcccgcatgctcttgcaggtccacgatgaactcttgttagaagcgccaaaagagcgtgcggaagaggtggcagccctcgcgaaagaagttatggaaggcgtgtggcccttagcggtgcctcttgaagtcgaagttggtattggcgaggattggctggctgccaaaggataatga

SEQ ID NO: 3136 - protein, 841 aa, synthetic construct
  REGION 1..841: note = Variant of DNA polymerase I from Thermus sp. strain 2.9
MHHHHHHGGSGVLPVFEPKGRVLLVDGHHLAYRNFFALKGLTTSSGEPVQGVYGFAKSLLKALKEDGDVVIVVFDAKAPSFRHEAYEAYKAGRAPTPEDFPRQLALMKELVDLLGLERLEVPGFEADDVLATLAKKAEREGYEVQILTADRDLFQLLSPRISVLHPEGHRITPEWLWEKYGLRPEQWVDFRALAGDPSDNIPGVKGIGEKTALKLLKEWGSLENLLKNLDQVKPESVREKILAHLEDLKLSRELSRVRTDLPLEVDFRRRREPDWEGLKAFLERLEFGSLLHEFGLLESPLPAEEAPWPPPEGAFLGYRLSRPEPMWAELLALAASAQGRVYRAEDPHGALRGLFEVRGLLAKDLAVVALREGLDLPPTDDPMLLAYLLDPSNTTPEGVARRYGGEWTEDAAKRALLAERLHENLLGRLQGEERLLWLYEEVEKPLSRVLAHMEATGVKLDVAYLEALSLEVAAHMRRLEEEVFRLAGHSFRLNSRDQLERVLFDELGLPPIGKTEKTGKRSTSAAVLEALREVHPIVDKILQYRELAKLKGTYIDRLPALVHPKTGRLHTRFNQTATATGRLSSSDPNLQNIPVRTPLGQKIRKAFVAEEGWRLVALDYRQIELRVLAHLSGDENLIRVFQEGKDIHTQTASWMFGLSAEAIDPLMRRAAKTINFGVLYGMSAFRLSQELGIPYEEAAAFIQKYFQSYPKVKAWIEKTLEEGRTRGYVETLFGRRRYVPDLNARVKGKREAAERMAFNMPVQGTAADLMKLAMVRLFPQLREVGARMLLQVHDELLLEAPKERAEEVAALAKEVMEGVWPLAVPLEVEVGIGEDWLAAKG

SEQ ID NO: 3137 - DNA, 2529 bp, synthetic construct
  misc_feature 1..2529: note = Variant of DNA polymerase I from Thermus sp. strain 2.9
  source 1..2529: mol_type = other DNA
atgcaccatcatcatcatcatggcggtagcggcgtgttaccggtgttcgagcctaaaggtcgcgtgcttctggttgatggccatcatctcgcgtatcgtaacttctttgccctgaaaggattaaccaccagcagcggcgagccggtacagggtgtctacggctttgcaaagtcgctcctgaaagctctgaaagaagacggtgatgtggtgattgttgtctttgatgcgaaagcgccaagttttcgccacgaagcgtacgaagcttacaaagccgggcgtgctccaacgccggaagactttcctcgccaattggcgcttatgaaggaattagtggatttgcttggcctcgaacgcttggaagttcccggtttcgaggcagacgacgtattagcgactctcgcaaagaaagccgaacgtgagggctatgaagtccagatcttgacagcagatcgcgatcttttccagcttttatctccgcgcatctcggtgttacacccggaagggcatcgtatcaccccggaatggctctgggagaaatatggtttgcgtcccgaacaatgggtggattttcgcgccttagcaggcgatccgagcgacaatattccgggagttaaaggtatcggcgagaagacggcgctcaagctccttaaagaatgggggtcgttggagaacttgcttaagaatttagatcaggtcaaaccagagtcagtgcgtgagaagattcttgctcacctcgaagacctcaaattaagccgcgaattgtcccgtgtacgcaccgatttgccgctcgaagttgatttccgtcgccgccgcgaacctgactgggagggtcttaaagcgtttttagagcgtcttgaatttggttcgctcttgcatgaattcggccttttagaaagcccgttaccagccgaagaagcaccttggccaccgcccgagggcgcgtttttaggttaccgtttgagtcgcccggaaccgatgtgggccgaattactggctcttgcagcgtctgcccagggacgtgtgtatcgcgcggaagaccctcatggtgcgctccgcggcctcttcgaagtccgtggactccttgccaaagacttagctgttgttgcattgcgcgaaggtcttgatttacctccgactgatgatccaatgcttcttgcgtacctcttggacccgtcaaacacgacgcccgaaggcgtagcccgtcgttacggcggcgagtggaccgaagatgcagcgaaacgcgcgttattggccgaacgtttgcacgccaatttattaggacgtttgcaaggcgaggaacgtctcctctggctttacgaagaagtggagaaaccattgagtcgcgtgctcgcgcatatggaagctaccggtgtcaaattagacgtggcgtatttggaggctctcagccttgaagttgctgcccacatgcgccgcttggaggaagaagtattccgtttagcaggccattcctttcgccttaattctcgcgatcagttagaacgtgtgttgttcgatgaacttggtctccctcctatcggcaagacagagaagaccggtaaacgtagcacttcagcggcggttttagaagctcttcgcgaagtccatcccattgtggacaagatcttgcagtaccgcgaactcgcgaaattgaaaggcacctatattgaccgtcttccggcattagtccacccgaaaacgggacgcctccatacccgcttcaaccaaacagccacggcgaccggtcgtttgtcctcctctgatccaaaccttcagaatattccagtacgtaccccattgggccagaagatccgccgtgcgtttgtagctgaggagggttggcgtttagtggccctcgattatcgtcaaattgaattacgtgtccttgcccatctttctggcgatgagaacctcatccgcgtgtttcaggaaggcaaagacattcacactcaaacggcaagctggatgtttggattatcagctgaagcgatcgatcctttgatgcgtcgtgcagcgaagaccatcaatttcggtgttctctacggtatgagtgcctttcgtttgtcgcaggaattaggcattccctatgaagaagctgcggcgttcattcagaaatactttcaaagctatcccaaagttaaagcatggatcgagaagactctcgaagaaggccgcacacgtggttacgtagagaccttatttggacgtcgccgctatgttcccgatttaaacgctcgcgtgaaaggcaagcgtgaagccgccgaacgcatggcgttcaacatgcctgtacagggcacggcagctgacctcatgaaacttgcaatggtgcgcctttttccacaattgcgtgaagttggtgcccgcatgctcttgcaggtccacgatgaactcttgttagaagcgccaaaagagcgtgcggaagaggtggcagccctcgcgaaagaagttatggaaggcgtgtggcccttagcggtgcctcttgaagtcgaagttggtattggcgaggattggctggctgccaaaggataatga

SEQ ID NO: 3138 - protein, 841 aa, synthetic construct
  REGION 1..841: note = Variant of DNA polymerase I from Thermus sp. strain 2.9
MHHHHHHGGSGVLPVFEPKGRVLLVDGHHLAYRNFFALKGLTTSSGEPVQGVYGFAKSLLKALKEDGDVVIVVFDAKAPSFRHEAYEAYKAGRAPTPEDFPRQLALMKELVDLLGLERLEVPGFEADDVLATLAKKAEREGYEVQILTADRDLFQLLSPRISVLHPEGHRITPEWLWEKYGLRPEQWVDFRALAGDPSDNIPGVKGIGEKTALKLLKEWGSLENLLKNLDQVKPESVREKILAHLEDLKLSRELSRVRTDLPLEVDFRRRREPDWEGLKAFLERLEFGSLLHEFGLLESPLPAEEAPWPPPEGAFLGYRLSRPEPMWAELLALAASAQGRVYRAEDPHGALRGLFEVRGLLAKDLAVVALREGLDLPPTDDPMLLAYLLDPSNTTPEGVARRYGGEWTEDAAKRALLAERLHANLLGRLQGEERLLWLYEEVEKPLSRVLAHMEATGVKLDVAYLEALSLEVAAHMRRLEEEVFRLAGHSFRLNSRDQLERVLFDELGLPPIGKTEKTGKRSTSAAVLEALREVHPIVDKILQYRELAKLKGTYIDRLPALVHPKTGRLHTRFNQTATATGRLSSSDPNLQNIPVRTPLGQKIRRAFVAEEGWRLVALDYRQIELRVLAHLSGDENLIRVFQEGKDIHTQTASWMFGLSAEAIDPLMRRAAKTINFGVLYGMSAFRLSQELGIPYEEAAAFIQKYFQSYPKVKAWIEKTLEEGRTRGYVETLFGRRRYVPDLNARVKGKREAAERMAFNMPVQGTAADLMKLAMVRLFPQLREVGARMLLQVHDELLLEAPKERAEEVAALAKEVMEGVWPLAVPLEVEVGIGEDWLAAKG

SEQ ID NO: 3139 - DNA, 2529 bp, synthetic construct
  misc_feature 1..2529: note = Variant of DNA polymerase I from Thermus sp. strain 2.9
  source 1..2529: mol_type = other DNA
atgcaccatcatcatcatcatggcggtagcggcgtgttaccggtgttcgagcctaaaggtcgcgtgcttctggttgatggccatcatctcgcgtatcgtaacttctttgccctgaaaggattaaccaccagcctgggcgagccggtacagggtgtctacggctttgcaaagtcgctcctgaaagctctgaaagaagacggtgatgtggtgattgttgtctttgatgcgaaagcgccaagttttcgccacgaagcgtacgaagcttacaaagccgggcgtgctccaacgccggaagactttcctcgccaattggcgcttatgaaggaattagtggatttgcttggcctcgaacgcttggaagttcccggtttcgaggcagacgacgtattagcgactctcgcaaagaaagccgaacgtgagggctatgaagtccagatcttgacagcagatcgcgatcttttccagcttttatctccgcgcatctcggtgttacacccggaagggcatcgtatcaccccggaatggctctgggagaaatatggtttgcgtcccgaacaatgggtggattttcgcgccttagcaggcgatccgagcgacaatattccgggagttaaaggtatcggcgagaagacggcgctcaagctccttaaagaatgggggtcgttggagaacttgcttaagaatttagatcaggtcaaaccagagtcagtgcgtgagaagattcttgctcacctcgaagacctcaaattaagccgcgaattgtcccgtgtacgcaccgatttgccgctcgaagttgatttccgtcgccgccgcgaacctgactgggagggtcttaaagcgtttttagagcgtcttgaatttggttcgctcttgcatgaattcggccttttagaaagcccgttaccagccgaagaagcaccttggccaccgcccgaaggcgcgtttttaggttaccgtttgagtcgcccggaaccgatgtgggccgaattactggctcttgcagcgtctgcccagggacgtgtgtatcgcgcggaagaccctcatggtgcgctccgcggcctcttcgaagtccgcggactccttgccaaagacttagctgttgttgcattgcgcgaaggtcttgatttacctccgactgatgatccaatgcttcttgcgtacctcttggacccgtcaaacacgacgcccgaaggcgtagcccgtcgttacggcggcgagtggaccgaagatgcagcgaaacgcgcgttattggccgaacgtttgcacgccaatttattaggacgtttgcaaggcgaggaacgtctcctctggctttacgaagaagtggagaaaccattgagtcgcgtgctcgcgcatatggaagctaccggtgtcaaattagacgtggcgtatttggaggctctcagccttgaagttgctgcccacatgcgccgcttggaggaagaagtattccgtttagcaggccattcctttcgccttaattctcgcgatcagttagaacgtgtgttgttcgatgaacttggtctccctcctatcggcaagacagagaagaccggtaaacgtagcacttcagcggcggttttagaagctcttcgcgaagtccatcccattgtggacaagatcttgcagtaccgcgaactcgcgaaattgaaaggcacctatattgaccgtcttccggcattagtccacccgaaaacgggacgcctccatacccgcttcaaccaaacagccacggcgaccggtcgtttgtcctcctctgatccaaaccttcagaatattccagtacgtaccccattgggccagaagatccgccgtgcgtttgtagctgaggagggttggcgtttagtggccctcgattatagtcaaattgaattacgtgtccttgcccatctttctggcgatgagaacctcatccgcgtgtttcaggaaggcaaagacattcacactcaaacggcaagctggatgtttggattatcagctgaagcgatcgatcctttgatgcgtcgtgcagcgaagaccatcaatttcggtgttctctacggtatgagtgcctttcgtttgtcgcaggaattaggcattccctatcaggaagctcaagcgttcattcagaaatactttcaaagctatcccaaagttaaagcatggatcgagaagactctcgaagaaggccgcacacgtggttacgtagagaccttatttggacgtcgccgctatgttcccgatttaaacgctcgcgtgaaaggcaagcgtgaagccgccgaacgcatggcgttcaacatgcctgtacagggcacggcagctgacctcatgaaacttgcaatggtgcgcctttttccacaattgcgtgaagttggtgcccgcatgctcttgcaggtccacgatgaactcttgttagaagcgccaaaagagcgtgcggaagaggtggcagccctcgcgaaagaagttatggaaggcgtgtggcccttagcggtgcctcttgaagtcgaagttggtattggcgaggattggctggctgccaaaggataatga

SEQ ID NO: 3140 - protein, 841 aa, synthetic construct
  REGION 1..841: note = Variant of DNA polymerase I from Thermus sp. strain 2.9
MHHHHHHGGSGVLPVFEPKGRVLLVDGHHLAYRNFFALKGLTTSLGEPVQGVYGFAKSLLKALKEDGDVVIVVFDAKAPSFRHEAYEAYKAGRAPTPEDFPRQLALMKELVDLLGLERLEVPGFEADDVLATLAKKAEREGYEVQILTADRDLFQLLSPRISVLHPEGHRITPEWLWEKYGLRPEQWVDFRALAGDPSDNIPGVKGIGEKTALKLLKEWGSLENLLKNLDQVKPESVREKILAHLEDLKLSRELSRVRTDLPLEVDFRRRREPDWEGLKAFLERLEFGSLLHEFGLLESPLPAEEAPWPPPEGAFLGYRLSRPEPMWAELLALAASAQGRVYRAEDPHGALRGLFEVRGLLAKDLAVVALREGLDLPPTDDPMLLAYLLDPSNTTPEGVARRYGGEWTEDAAKRALLAERLHANLLGRLQGEERLLWLYEEVEKPLSRVLAHMEATGVKLDVAYLEALSLEVAAHMRRLEEEVFRLAGHSFRLNSRDQLERVLFDELGLPPIGKTEKTGKRSTSAAVLEALREVHPIVDKILQYRELAKLKGTYIDRLPALVHPKTGRLHTRFNQTATATGRLSSSDPNLQNIPVRTPLGQKIRRAFVAEEGWRLVALDYSQIELRVLAHLSGDENLIRVFQEGKDIHTQTASWMFGLSAEAIDPLMRRAAKTINFGVLYGMSAFRLSQELGIPYQEAQAFIQKYFQSYPKVKAWIEKTLEEGRTRGYVETLFGRRRYVPDLNARVKGKREAAERMAFNMPVQGTAADLMKLAMVRLFPQLREVGARMLLQVHDELLLEAPKERAEEVAALAKEVMEGVWPLAVPLEVEVGIGEDWLAAKG

SEQ ID NO: 3141 - DNA, 2529 bp, synthetic construct
  misc_feature 1..2529: note = Variant of DNA polymerase I from Thermus sp. strain 2.9
  source 1..2529: mol_type = other DNA
atgcaccatcatcatcatcatggcggtagcggcgtgttaccggtgttcgagcctaaaggtcgcgtgcttctggttgatggccatcatctcgcgtatcgtaacttctttgccctgaaaggattaaccaccagctcgggcgagccggtacagggtgtctacggctttgcaaagtcgctcctgaaagctctgaaagaagacggtgatgtggtgattgttgtctttgatgcgaaagcgccaagttttcgccacgaagcgtacgaagcttacaaagccgggcgtgctccaacgccggaagactttcctcgccaattggcgcttatgaaggaattagtggatttgcttggcctcgaacgcttggaagttcccggtttcgaggcagacgacgtattagcgactctcgcaaagaaagccgaacgtgagggctatgaagtccagatcttgacagcagatcgcgatcttttccagcttttatctccgcgcatctcggtgttacacccggaagggcatcgtatcaccccggaatggctctgggagaaatatggtttgcgtcccgaacaatgggtggattttcgcgccttagcaggcgatccgagcgacaatattccgggagttaaaggtatcggcgagaagacggcgctcaagctccttaaagaatgggggtcgttggagaacttgcttaaaaatttagatcaggtcaaaccagagtcagtgcgtgagaagattcttgctcacctcgaagacctcaaattaagccgcgaattgtcccgtgtacgcaccgatttgccgctcgaagttgatttccgtcgccgccgcgaacctgactgggagggtcttaaagcgtttttagagcgtcttgaatttggttcgctcttgcatgaattcggccttttagaaagcccgttaccagccgaagaagcaccttggccaccgcccgagggcgcgtttttaggttaccgtttgagtcgcccggaaccgatgtgggccgaattagcggctcttgcagcgtctgcccagggacgtgtgtatcgcgcggaagaccctcatggtgcgctccgcggcctcttcgaagtccgcggactccttgccaaagacttagctgttgttgcattgcgcgaaggtcttgatttacctccgactgatgatccaatgcttcttgcgtacctcttggacccgtcaaacacgacgcccgaaggcgtagcccgtcgttacggcggcgagtggaccgaagatgcagcgaaacgcgcgttattggccgaacgtttgcacgccaatttattaggacgtttgcaaggcgaggaacgtctcctctggctttacgaagaagtggagaaaccattgagtcgcgtgctcgcgcatatggaagctaccggtgtcaaattagacgtggcgtatttggaggctctcagccttgaagttgctgcccacatgcgccgcttggaggaagaagtattccgtttagcaggccattcctttcgccttaattctcgcgatcagttagaacgtgtgttgttcgatgaacttggtctccctcctatcggcaagacagagaagaccggtaaacgtagcacttcagcggcggttttagaagctcttcgcgaagtccatcccattgtggacaagatcttgcagtaccgcgaactcgcgaaattgaaaggcacctatattgaccgtcttccggcattagtccacccgaaaacgggacgcctccatacccgcttcaaccaaacagccacggcgaccggtcgtttgtcctcctctgatccaaaccttcagaatattccagtacgtaccccattgggccagaagatccgcaaagcgtttgtagctgaggagggttggcgtttagtggccctcgattatagccaaattgaattacgtgtccttgcccatctttctggcgatgagaacctcatccgcgtgtttcaggaaggcaaagacattcacactcaaacggcaagctggatgtttggattatcagctgaagcgatcgatcctttgatgcgtcgtgcagcgaagaccatcaatttcggtgttctctacggtatgagtgcctttcgtttgtcgcaggaattaggcattccctatgaggaagctcaagcgttcattcagaaatactttcaaagctatcccaaagttaaagcatggatcgagaagactctcgaagaaggccgcacacgtggttacgtagagaccttatttggacgtcgccgctatgttcccgatttaaacgctcgcgtgaaaggcaagcgtgaagccgccgaacgcatggcgttcaacatgcctgtacagggcacggcagctgacctcatgaaacttgcaatggtgcgcctttttccacaattgcgtgaagttggtgcccgcatgctcttgcaggtccacgatgaactcttgttagaagcgccaaaagagcgtgcggaagaggtggcagccctcgcgaaagaagttatggaaggcgtgtggcccttagcggtgcctcttgaagtcgaagttggtattggcgaggattggctggctgccaaaggataatga

SEQ ID NO: 3142 - protein, 841 aa, synthetic construct
  REGION 1..841: note = Variant of DNA polymerase I from Thermus sp. strain 2.9
MHHHHHHGGSGVLPVFEPKGRVLLVDGHHLAYRNFFALKGLTTSSGEPVQGVYGFAKSLLKALKEDGDVVIVVFDAKAPSFRHEAYEAYKAGRAPTPEDFPRQLALMKELVDLLGLERLEVPGFEADDVLATLAKKAEREGYEVQILTADRDLFQLLSPRISVLHPEGHRITPEWLWEKYGLRPEQWVDFRALAGDPSDNIPGVKGIGEKTALKLLKEWGSLENLLKNLDQVKPESVREKILAHLEDLKLSRELSRVRTDLPLEVDFRRRREPDWEGLKAFLERLEFGSLLHEFGLLESPLPAEEAPWPPPEGAFLGYRLSRPEPMWAELAALAASAQGRVYRAEDPHGALRGLFEVRGLLAKDLAVVALREGLDLPPTDDPMLLAYLLDPSNTTPEGVARRYGGEWTEDAAKRALLAERLHANLLGRLQGEERLLWLYEEVEKPLSRVLAHMEATGVKLDVAYLEALSLEVAAHMRRLEEEVFRLAGHSFRLNSRDQLERVLFDELGLPPIGKTEKTGKRSTSAAVLEALREVHPIVDKILQYRELAKLKGTYIDRLPALVHPKTGRLHTRFNQTATATGRLSSSDPNLQNIPVRTPLGQKIRKAFVAEEGWRLVALDYSQIELRVLAHLSGDENLIRVFQEGKDIHTQTASWMFGLSAEAIDPLMRRAAKTINFGVLYGMSAFRLSQELGIPYEEAQAFIQKYFQSYPKVKAWIEKTLEEGRTRGYVETLFGRRRYVPDLNARVKGKREAAERMAFNMPVQGTAADLMKLAMVRLFPQLREVGARMLLQVHDELLLEAPKERAEEVAALAKEVMEGVWPLAVPLEVEVGIGEDWLAAKG

SEQ ID NO: 3143 - DNA, 2529 bp, synthetic construct
  misc_feature 1..2529: note = Variant of DNA polymerase I from Thermus sp. strain 2.9
  source 1..2529: mol_type = other DNA
atgcaccatcatcatcatcatggcggtagcggcgtgttaccggtgttcgagcctaaaggtcgcgtgcttctggttgatggccatcatctcgcgtatcgtaacttctttgccctgaaaggattaaccaccagcagcggcgagccggtacagggtgtctacggctttgcaaagtcgctcctgaaagctctgaaagaagacggtgatgtggtgattgttgtctttgatgcgaaagcgccaagttttcgccacgaagcgtacgaagcttacaaagccgggcgtgctccaacgccggaagactttcctcgccaattggcgcttatgaaggaattagtggatttgcttggcctcgaacgcttggaagttcccggtttcgaggcagacgacgtattagcgactctcgcaaagaaagccgaacgtgagggctatgaagtccagatcttgacagcagatcgcgatcttttccagcttttatctccgcgcatctcggtgttacacccggaagggcatcgtatcaccccggaatggctctgggagaaatatggtttgcgtcccgaacaatgggtggattttcgcgccttagcaggcgatccgagcgacaatattccgggagttaaaggtatcggcgagaagacggcgctcaagctccttaaagaatgggggtcgttggagaacttgcttgaaaatttagatcaggtcaaaccagagtcagtgcgtgagaagattcttgctcacctcgaagacctcaaattaagccgcgaattgtcccgtgtacgcaccgatttgccgctcgaagttgatttccagcgccgccgcgaacctgactgggagggtcttaaagcgtttttagagcgtcttgaatttggttcgctcttgcatgaattcggccttttagaaagcccgttaccagccgaagaagcaccttggccaccgcccgagggcgcgtttttaggttaccgtttgagtcgcccggaaccgatgtgggccgaattactggctcttgcagcgtctgcccagggaaccgtgtatcgcgcggaagaccctcatggtgcgctccgcggcctcttcgaagtccgtggactccttgccaaagacttagctgttgttgcattgcgcgaaggtcttgatttacctccgactgatgatccaatgcttcttgcgtacctcttggacccgtcaaacacgacgcccgaaggcgtagcccgtcgttacggcggcgagtggaccgaagatgcagcgaaacgcgcgttattggccgaacgtttgcacgccaatttattaggacgtttgcaaggcgaggaacgtctcctctggctttacgaagaagtggagaaaccattgagtcgcgtgctcgggcatatggaagctaccggtgtcaaattagacgtggcgtatttggaggctctcagccttgaagttgctgcccacatgcgccgcttggaggaagaagtattccgtttagcaggccactcctttcgccttaactctcgcgatcagttagaacgtgtgttgttcgatgaacttggtctccctcctatcggcaagacagagaagaccggtaaacgtagcacttcagcggcggttttagaagctcttcgcgaagtccatcccattgtggacaagatcttgcaataccgcgaactcgcgaaattgaaaggcacctatattgaccgtcttccggcattagtccacccgaaaacgggacgcctccatacccgcttcaaccaaacagccacggcgaccggtcgtttgtcctcctctgatccaaaccttcagaatattccagtacgtaccccattgggccagaagatccgccgcgcgtttgtagctgaggagggttggcgtttagtggccctcgattatagtcaaattgaattacgtgtccttgcccatctttctggcgatgagaacctcatccgcgtgtttcaggaaggcaaagacattcacactcaaacggcaagctggatgtttggattatcagctgaagcgatcgatcctttgatgcgtcgtgcagcgaagaccatcaatttcggtgttctctacggtatgagtgcctttcgtttgtcgcaggaattaggcattccctatgaagaagctgcggcgttcattcagaaatactttcaaagctatcccaaagttaaagcatggatcgagaagactctcgaagaaggccgcacacgtggttacgtagagaccttatttggacgtcgccgctatgttcccgatttaaacgctcgcgtgaaaggcaagcgtgaagccgccgaacgcatggcgttcaacatgcctgtacagggcacggcagctgacctcatgaaacttgcaatggtgcgcctttttccacaattgcgtgaagttggtgcccgcatgctcttgcaggtccacgatgaactcttgttagaagcgccaaaagagcgtgcggaagaggtggcagccctcgcgaaagaagttatggaaggcgtgtggcccttagcggtgcctcttgaagtcgaagttggtattggcgaggattggctggctgccaaaggataatga

SEQ ID NO: 3144 - protein, 841 aa, synthetic construct
  REGION 1..841: note = Variant of DNA polymerase I from Thermus sp. strain 2.9
MHHHHHHGGSGVLPVFEPKGRVLLVDGHHLAYRNFFALKGLTTSSGEPVQGVYGFAKSLLKALKEDGDVVIVVFDAKAPSFRHEAYEAYKAGRAPTPEDFPRQLALMKELVDLLGLERLEVPGFEADDVLATLAKKAEREGYEVQILTADRDLFQLLSPRISVLHPEGHRITPEWLWEKYGLRPEQWVDFRALAGDPSDNIPGVKGIGEKTALKLLKEWGSLENLLENLDQVKPESVREKILAHLEDLKLSRELSRVRTDLPLEVDFQRRREPDWEGLKAFLERLEFGSLLHEFGLLESPLPAEEAPWPPPEGAFLGYRLSRPEPMWAELLALAASAQGTVYRAEDPHGALRGLFEVRGLLAKDLAVVALREGLDLPPTDDPMLLAYLLDPSNTTPEGVARRYGGEWTEDAAKRALLAERLHANLLGRLQGEERLLWLYEEVEKPLSRVLGHMEATGVKLDVAYLEALSLEVAAHMRRLEEEVFRLAGHSFRLNSRDQLERVLFDELGLPPIGKTEKTGKRSTSAAVLEALREVHPIVDKILQYRELAKLKGTYIDRLPALVHPKTGRLHTRFNQTATATGRLSSSDPNLQNIPVRTPLGQKIRRAFVAEEGWRLVALDYSQIELRVLAHLSGDENLIRVFQEGKDIHTQTASWMFGLSAEAIDPLMRRAAKTINFGVLYGMSAFRLSQELGIPYEEAAAFIQKYFQSYPKVKAWIEKTLEEGRTRGYVETLFGRRRYVPDLNARVKGKREAAERMAFNMPVQGTAADLMKLAMVRLFPQLREVGARMLLQVHDELLLEAPKERAEEVAALAKEVMEGVWPLAVPLEVEVGIGEDWLAAKG

SEQ ID NO: 3145 - DNA, 2529 bp, synthetic construct
  misc_feature 1..2529: note = Variant of DNA polymerase I from Thermus sp. strain 2.9
  source 1..2529: mol_type = other DNA
atgcaccatcatcatcatcatggcggtagcggcgtgttaccggtgttcgagcctaaaggtcgcgtgcttctggttgatggccatcatctcgcgtatcgtaacttctttgccctgaaaggattaaccaccagcagcggcgagccggtacagggtgtctacggctttgcaaagtcgctcctgaaagctctgaaagaagacggtgatgtggtgattgttgtctttgatgcgaaagcgccaagttttcgccacgaagcgtacgaagcttacaaagccgggcgtgctccaacgccggaagactttcctcgccaattggcgcttatgaaggaattagtggatttgcttggcctcgaacgcttggaagttcccggtttcgaggcagacgacgtattagcgactctcgcaaagaaagccgaacgtgagggctatgaagtccagatcttgacagcagatcgcgatcttttccagcttttatctccgcgcatctcggtgttacacccggaagggcatcgtatcaccccggaatggctctgggagaaatatggtttgcgtcccgaacaatgggtggattttcgcgccttagcaggcgatccgagcgacaatattccgggagttaaaggtatcggcgagaagacggcgctcaagctccttaaagaatgggggtcgttggagaacttgcttaagaatttagatcaggtcaaaccagagtcagtgcgtgagaagattcttgctcacctcgaagacctcaaattaagccgcgaattgtcccgtgtacgcaccgatttgccgctcgaagttgatttccgccgccgccgcgaacctgactgggagggtcttaaagcgtttttagagcgtcttgaatttggttcgctcttgcatgaattcggccttttagaaagcccgttaccagccgaagaagcaccttggccaccgcccgagggcgcgtttttaggttaccgtttgagtcgcccggaaccgatgtgggccgaattactggctcttgcagcgtctgcccagggacgtgtgtatcgcgcggaagaccctcatggtgcgctccgcggcctcttcgaagtccgtggactccttgccaaagacttagctgttgttgcattgcgcgaaggtcttgatttacctccgactgatgatccaatgcttcttgcgtacctcttggacccgtcaaacacgacgcccgaaggcgtagcccgtcgttacggcggcgagtggaccgaagatgcagcgaaacgcgcgttattggccgaacgtttgcacgccaatttattaggacgtttgcaaggcgaggaacgtctcctctggctttacgaagaagtggagaaaccattgagtcgcgtgctcgcgcatatggaagctaccggtgtcaaattagacgtggcgtatttggagaatctcagccttgaagttgctgcccacatgcgccgcttggaggaagaagtattccgtttagcaggccattcctttcgccttaattctcgcgatcagttagaacgtgtgttgttcgatgaacttggtctccctcctatcggcaagacagagaagaccggtaaacgtagcacttcagcggcggttttagaagctcttcgcgaagtccatcccattgtggacaagatcttgcaataccgcgaactcgcgaaattgaaaggcacctatattgaccgtcttccggcattagtccacccgaaaacgggacgcctccatacccgcttcaaccaaacagccacggcgaccggtcgtttgtcctcctctgatccaaaccttcagaatattccagtacgtaccccattgggccagaagatccgccgtgcgtttgtagctgaggagggttggcgtttagtggccctcgattatagccaaattgaattacgtgtccttgcccatctttctggcgatgagaacctcatccgcgtgtttcaggaaggcaaagacattcacactcaaacggcaagctggatgtttggattatcagctgaagcgatcgatcctttgatgcgtcgtgcagcgaagaccatcaatttcggtgttctctacggtatgagtgcctttcgtttgtcgcaggaattaggcattccctatgaagaagctgcggcgttcattcagaaatactttcaaagctatcccaaagttaaagcatggatcgagaagactctcgaagaaggccgcacacgtggttacgtagagaccttatttggacgtcgccgctatgttcccgatttaaacgctcgcgtgaaaggcaagcgtgaagccgccgaacgcatggcgttcaacatgcctgtacagggcacggcagctgacctcatgaaacttgcaatggtgcgcctttttccacaattgcgtgaagttggtgcccgcatgctcttgcaggtccacgatgaactcttgttagaagcgccaaaagagcgtgcggaagaggtggcagccctcgcgaaagaagttatggaaggcgtgtggcccttagcggtgcctcttgaagtcgaagttggtattggcgaggattggctggctgccaaaggataatga

SEQ ID NO: 3146 - protein, 841 aa, synthetic construct
  REGION 1..841: note = Variant of DNA polymerase I from Thermus sp. strain 2.9
MHHHHHHGGSGVLPVFEPKGRVLLVDGHHLAYRNFFALKGLTTSSGEPVQGVYGFAKSLLKALKEDGDVVIVVFDAKAPSFRHEAYEAYKAGRAPTPEDFPRQLALMKELVDLLGLERLEVPGFEADDVLATLAKKAEREGYEVQILTADRDLFQLLSPRISVLHPEGHRITPEWLWEKYGLRPEQWVDFRALAGDPSDNIPGVKGIGEKTALKLLKEWGSLENLLKNLDQVKPESVREKILAHLEDLKLSRELSRVRTDLPLEVDFRRRREPDWEGLKAFLERLEFGSLLHEFGLLESPLPAEEAPWPPPEGAFLGYRLSRPEPMWAELLALAASAQGRVYRAEDPHGALRGLFEVRGLLAKDLAVVALREGLDLPPTDDPMLLAYLLDPSNTTPEGVARRYGGEWTEDAAKRALLAERLHANLLGRLQGEERLLWLYEEVEKPLSRVLAHMEATGVKLDVAYLENLSLEVAAHMRRLEEEVFRLAGHSFRLNSRDQLERVLFDELGLPPIGKTEKTGKRSTSAAVLEALREVHPIVDKILQYRELAKLKGTYIDRLPALVHPKTGRLHTRFNQTATATGRLSSSDPNLQNIPVRTPLGQKIRRAFVAEEGWRLVALDYSQIELRVLAHLSGDENLIRVFQEGKDIHTQTASWMFGLSAEAIDPLMRRAAKTINFGVLYGMSAFRLSQELGIPYEEAAAFIQKYFQSYPKVKAWIEKTLEEGRTRGYVETLFGRRRYVPDLNARVKGKREAAERMAFNMPVQGTAADLMKLAMVRLFPQLREVGARMLLQVHDELLLEAPKERAEEVAALAKEVMEGVWPLAVPLEVEVGIGEDWLAAKG

SEQ ID NO: 3147 - DNA, 2529 bp, synthetic construct
  misc_feature 1..2529: note = Variant of DNA polymerase I from Thermus sp. strain 2.9
  source 1..2529: mol_type = other DNA
atgcaccatcatcatcatcatggcggtagcggcgtgttaccggtgttcgagcctaaaggtcgcgtgcttctggttgatggccatcatctcgcgtatcgtaacttctttgccctgaaaggattaaccaccagctcgggcgagccggtacagggtgtctacggctttgcaaagtcgctcctgaaagctctgaaagaagacggtgatgtggtgattgttgtctttgatgcgaaagcgccaagttttcgccacgaagcgtacgaagcttacaaagccgggcgtgctccaacgccggaagactttcctcgccaattggcgcttatgaaggaattagtggatttgcttggcctcgaacgcttggaagttcccggtttcgaggcagacgacgtattagcgactctcgcaaagaaagccgaacgtgagggctatgaagtccagatcttgacagcagatcgcgatcttttccagcttttatctccgcgcatctcggtgttacacccggaagggcatcgtatcaccccggaatggctctgggagaaatatggtttgcgtcccgaacaatgggtggattttcgcgccttagcaggcgatccgagcgacaatattccgggagttaaaggtatcggcgagaagacggcgctcaagctccttaaagaatgggggtcgttggagaacttgcttaaaaatttagatcaggtcaaaccagagtcagtgcgtgagaagattcttgctcacctcgaagacctcaaattaagccgcgaattgtcccgtgtacgcaccgatttgccgctcgaagttgatttccgtcgccgccgcgaacctgactgggagggtcttaaagcgtttttagagcgtcttgaatttggttcgctcttgcatgaattcggccttttagaaagcccgttaccggccgaagaagcaccttggccaccgcccgagggcgcgtttttaggttaccgtttgagtcgcccggaaccgatgtgggccgaattagcggctcttgcagcgtctgcccagggacgcgtgtatcgcgcggaagaccctcatggtgcgctccgcggcctcttcgaagtccgtggactccttgccaaagacttagctgttgttgcattgcgcgaaggtcttgatttacctccgactgatgatccaatgcttcttgcgtacctcttggacccgtcaaacacgacgcccgaaggcgtagcccgtcgttacggcggcgagtggaccgaagatgcagcgaaacgcgcgttattggccgaacgtttgcacgaaaatttattaggacgtttgcaaggcgaggaacgtctcctctggctttacgaagaagtggagaaaccattgagtcgcgtgctcgcgcatatggaagctaccggtgtcaaattagacgtggcgtatttggaggctctcagccttgaagttgctgcccacatgcgccgcttggaggaagaagtattccgtttagcaggccactcctttcgccttaactctcgcgatcagttagaacgtgtgttgttcgatgaacttggtctccctcctatcggcaagacagagaagaccggtaaacgtagcacttcagccgcgtttttagaagctcttcgcgaagtccatcccattgtggacaagatcttgcagtaccgcgaactcgcgaaattgaaaggcacctatattgaccgtcttccggcattagtccacccgaaaacgggacgcctccatacccgcttcaaccaaacagccacggcgaccggtcgtttgtcctcctctgatccaaaccttcagaatattccagtacgtaccccattgggccagaagatccgccgtgcgtttgtagctgaggagggttggcgtttagtggccctcgattatagccaaattgaattacgtgtccttgcccatctttctggcgatgagaacctcatccgcgtgtttcaggaaggcaaagacattcacactcaaacggcaagctggatgtttggattaagcgctgaagcgatcgatcctttgatgcgtcgtgcagcgaagaccatcaatttcggtgttctctacggtatgagtgcctttcgtttgtcgcaggaattaggcattccctatgaagaagctgcggcgttcattcagaaatactttcaaagctatcccaaagttaaagcatggatcgagaagactctcgaagaaggccgcacacgtggttacgtagagaccttatttggacgtcgccgctatgttcccgatttaaacgctcgcgtgaaaggcaagcgtgaagccgccgaacgcatggcgttcaacatgcctgtacagggcacggcagctgacctcatgaaacttgcaatggtgcgcctttttccacaattgcgtgaagttggtgcccgcatgctcttgcaggtccacgatgaactcttgttagaagcgccaaaagagcgtgcggaagaggtggcagccctcgcgaaagaagttatggaaggcgtgtggcccttagcggtgcctcttgaagtcgaagttggtattggcgaggattggctggctgccaaaggataatga

SEQ ID NO: 3148 - protein, 841 aa, synthetic construct
  REGION 1..841: note = Variant of DNA polymerase I from Thermus sp. strain 2.9
MHHHHHHGGSGVLPVFEPKGRVLLVDGHHLAYRNFFALKGLTTSSGEPVQGVYGFAKSLLKALKEDGDVVIVVFDAKAPSFRHEAYEAYKAGRAPTPEDFPRQLALMKELVDLLGLERLEVPGFEADDVLATLAKKAEREGYEVQILTADRDLFQLLSPRISVLHPEGHRITPEWLWEKYGLRPEQWVDFRALAGDPSDNIPGVKGIGEKTALKLLKEWGSLENLLKNLDQVKPESVREKILAHLEDLKLSRELSRVRTDLPLEVDFRRRREPDWEGLKAFLERLEFGSLLHEFGLLESPLPAEEAPWPPPEGAFLGYRLSRPEPMWAELAALAASAQGRVYRAEDPHGALRGLFEVRGLLAKDLAVVALREGLDLPPTDDPMLLAYLLDPSNTTPEGVARRYGGEWTEDAAKRALLAERLHENLLGRLQGEERLLWLYEEVEKPLSRVLAHMEATGVKLDVAYLEALSLEVAAHMRRLEEEVFRLAGHSFRLNSRDQLERVLFDELGLPPIGKTEKTGKRSTSAAFLEALREVHPIVDKILQYRELAKLKGTYIDRLPALVHPKTGRLHTRFNQTATATGRLSSSDPNLQNIPVRTPLGQKIRRAFVAEEGWRLVALDYSQIELRVLAHLSGDENLIRVFQEGKDIHTQTASWMFGLSAEAIDPLMRRAAKTINFGVLYGMSAFRLSQELGIPYEEAAAFIQKYFQSYPKVKAWIEKTLEEGRTRGYVETLFGRRRYVPDLNARVKGKREAAERMAFNMPVQGTAADLMKLAMVRLFPQLREVGARMLLQVHDELLLEAPKERAEEVAALAKEVMEGVWPLAVPLEVEVGIGEDWLAAKG

SEQ ID NO: 3149 - DNA, 2529 bp, synthetic construct
  misc_feature 1..2529: note = Variant of DNA polymerase I from Thermus sp. strain 2.9
  source 1..2529: mol_type = other DNA
atgcaccatcatcatcatcatggcggtagcggcgtgttaccggtgttcgagcctaaaggtcgcgtgcttctggttgatggccatcatctcgcgtatcgtaacttctttgccctgaaaggattaaccaccagcagcggcgagccggtacagggtgtctacggctttgcaaagtcgctcctgaaagctctgaaagaagacggtgatgtggtgattgttgtctttgatgcgaaagcgccaagttttcgccacgaagcgtacgaagcttacaaagccgggcgtgctccaacgccggaagactttcctcgccaattggcgcttatgaaggaattagtggatttgcttggcctcgaacgcttggaagttcccggtttcgaggcagacgacgtattagcgactctcgcaaagaaagccgaacgtgagggctatgaagtccagatcttgacagcagatcgcgatcttttccagcttttatctccgcgcatctcggtgttacacccggaagggcatcgtatcaccccggaatggctctgggagaaatatggtttgcgtcccgaacaatgggtggattttcgcgccttagcaggcgatccgagcgacaatattccgggagttaaaggtatcggcgagaagacggcgctcaagctccttaaagaatgggggtcgttggagaacttgcttaaaaatttagatcaggtcaaaccagagtcagtgcgtgagaagattcttgctcacctcgaagacctcaaattaagccgcgaattgtcccgtgtacgcaccgatttgccgctcgaagttgatttccgtcgccgccgcgaacctgactgggagggtcttaaagcgtttttagagcgtcttgaatttggttcgctcttgcatgaattcggccttttagaaagcccgttaccagccgaagaagcaccttggccaccgcccgagggcgcgtttttaggttaccgtttgagtcgcccggaaccgatgtgggccgaattactggctcttgcagcgtctgcccagggaaccgtgtatcgcgcggaagaccctcatggtgcgctccgcggcctcttcgaagtccgtggactccttgccaaagacttagctgttgttgcattgcgcgaaggtcttgatttacctccgactgatgatccaatgcttcttgcgtacctcttggacccgtcaaacacgacgcccgaaggcgtagcccgtcgttacggcggcgagtggaccgaagatgcagcgaaacgcgcgttattggccgaacgtttgcacgccaatttattaggacgtttgcaaggcgaggaacgtctcctctggctttacgaagaagtggagaaaccattgagtcgcgtgctcgggcatatggaagctaccggtgtcaaattagacgtggcgtatttggaggctctcagccttgaagttgctgcccacatgcgccgcttggaggaagaagtattccgtttagcaggccactcctttcgccttgtgtctcgcgatcagttagaacgtgtgttgttcgatgaacttggtctccctcctatcggcaagacagagaagaccggtaaacgtagcacttcacgcgcggttttagaagctcttcgcgaagtccatcccattgtggacaagatcttgcagtaccgcgaactcgcgaaattgaaaggcacctatattgaccgtcttccggcattagtccacccgaaaacgggacgcctccatacccgcttcaaccaaacagccacggcgaccggtcgtttgtcctcctctgatccaaaccttcagaatattccagtacgtaccccattgggccagaagatccgccgcgcgtttgtagctgaggagggttggcgtttagtggccctcgattatagtcaaattgaattacgtgtccttgcccatctttctggcgatgagaacctcatccgcgtgtttcaggaaggcaaagacattcacactcaaacggcaagctggatgtttggattaagcgctgaagcgatcgatcctttgatgcgtcgtgcagcgaagaccatcaatttcggtgttctctacggtatgagtgcctttcgtttgtcgcaggaattaggcattccctatgaagaagctgcggcgttcattcagaaatactttcaaagctatcccaaagttaaagcatggatcgagaagactctcgaagaaggccgcacacgtggttacgtagagaccttatttggacgtcgccgctatgttcccgatttaaacgctcgcgtgaaaggcaagcgtgaagccgccgaacgcatggcgttcaacatgcctgtacagggcacggcagctgacctcatgaaacttgcaatggtgcgcctttttccacaattgcgtgaagttggtgcccgcatgctcttgcaggtccacgatgaactcttgttagaagcgccaaaagagcgtgcggaagaggtggcagccctcgcgaaagaagttatggaaggcgtgtggcccttagcggtgcctcttgaagtcgaagttggtattggcgaggattggctggctgccaaaggataatga

SEQ ID NO: 3150 - protein, 841 aa, synthetic construct
  REGION 1..841: note = Variant of DNA polymerase I from Thermus sp. strain 2.9
MHHHHHHGGSGVLPVFEPKGRVLLVDGHHLAYRNFFALKGLTTSSGEPVQGVYGFAKSLLKALKEDGDVVIVVFDAKAPSFRHEAYEAYKAGRAPTPEDFPRQLALMKELVDLLGLERLEVPGFEADDVLATLAKKAEREGYEVQILTADRDLFQLLSPRISVLHPEGHRITPEWLWEKYGLRPEQWVDFRALAGDPSDNIPGVKGIGEKTALKLLKEWGSLENLLKNLDQVKPESVREKILAHLEDLKLSRELSRVRTDLPLEVDFRRRREPDWEGLKAFLERLEFGSLLHEFGLLESPLPAEEAPWPPPEGAFLGYRLSRPEPMWAELLALAASAQGTVYRAEDPHGALRGLFEVRGLLAKDLAVVALREGLDLPPTDDPMLLAYLLDPSNTTPEGVARRYGGEWTEDAAKRALLAERLHANLLGRLQGEERLLWLYEEVEKPLSRVLGHMEATGVKLDVAYLEALSLEVAAHMRRLEEEVFRLAGHSFRLVSRDQLERVLFDELGLPPIGKTEKTGKRSTSRAVLEALREVHPIVDKILQYRELAKLKGTYIDRLPALVHPKTGRLHTRFNQTATATGRLSSSDPNLQNIPVRTPLGQKIRRAFVAEEGWRLVALDYSQIELRVLAHLSGDENLIRVFQEGKDIHTQTASWMFGLSAEAIDPLMRRAAKTINFGVLYGMSAFRLSQELGIPYEEAAAFIQKYFQSYPKVKAWIEKTLEEGRTRGYVETLFGRRRYVPDLNARVKGKREAAERMAFNMPVQGTAADLMKLAMVRLFPQLREVGARMLLQVHDELLLEAPKERAEEVAALAKEVMEGVWPLAVPLEVEVGIGEDWLAAKG

SEQ ID NO: 3151 - DNA, 2529 bp, synthetic construct
  misc_feature 1..2529: note = Variant of DNA polymerase I from Thermus sp. strain 2.9
  source 1..2529: mol_type = other DNA
atgcaccatcatcatcatcatggcggtagcggcgtgttaccggtgttcgagcctaaaggtcgcgtgcttctggttgatggccatcatctcgcgtatcgtaacttctttgccctgaaaggattaaccaccagctcgggcgagccggtacagggtgtctacggctttgcaaagtcgctcctgaaagctctgaaagaagacggtgatgtggtgattgttgtctttgatgcgaaagcgccaagttttcgccacgaagcgtacgaagcttacaaagccgggcgtgctccaacgccggaagactttcctcgccaattggcgcttatgaaggaattagtggatttgcttggcctcgaacgcttggaagttcccggtttcgaggcagacgacgtattagcgactctcgcaaagaaagccgaacgtgagggctatgaagtccagatcttgacagcagatcgcgatcttttccagcttttatctccgcgcatctcggtgttacacccggaagggcatcgtatcaccccggaatggctctgggagaaatatggtttgcgtcccgaacaatgggtggattttcgcgccttagcaggcgatccgagcgacaatattccgggagttaaaggtatcggcgagaagacggcgctcaagctccttaaagaatgggggtcgttggagaacttgcttaaaaatttagatcaggtcaaaccagagtcagtgcgtgagaagattcttgctcacctcgaagacctcaaattaagccgcgaattgtcccgtgtacgcaccgatttgccgctcgaagttgatttccgtcgccgccgcgaacctgactgggagggtcttaaagcgtttttagagcgtcttgaatttggttcgctcttgcatgaattcggccttttagaaagcccgttaccagccgaagaagcaccttggccaccgcccgaaggcgcgtttttaggttaccgtttgagtcgcccggaaccgatgtgggccgaattactggctcttgcagcgtctgcccagggacgtgtgtatcgcgcggaagaccctcatggtgcgctccgcggcctcttcgaagtccgcggactccttgccaaagacttagctgttgttgcattgcgcgaaggtcttgatttacctccgactgatgatccaatgcttcttgcgtacctcttggacccgtcaaacacgacgcccgaaggcgtagcccgtcgttacggcggcgagtggaccgaagatgcagcgaaacgcgcgttattggccgaacgtttgcacgccaatttattaggacgtttgcaaggcgaggaacgtctcctctggctttacgaagaagtggagaaaccattgagtcgcgtgctcgcgcatatggaagctaccggtgtcaaattagacgtggcgtatttggaggctctcagccttgaagttgctgcccacatgcgccgcttggaggaagaagtattccgtttagcaggccattcctttcgccttaattctcgcgatcagttagaacgtgtgttgttcgatgaacttggtctccgtcctatcggcaagacagagaagaccggtaaacgtagcacttcagcggcggttttagaagctcttcgcgaagtccatcccattgtggacaagatcttgcagtaccgcgaactcgcgaaattgaaaggcacctatattgaccgtcttccggcattagtccacccgaaaacgggacgcctccatacccgcttcaaccaaacagccacggcgaccggtcgtttgtcctcctctgatccaaaccttcagaatattccagtacgtaccccattgggccagaagatccgcaaagcgtttgtagctgaggagggttggcgtttagtggccctcgattatagtcaaattgaattacgtgtccttgcccatctttctggcgatgagaacctcatccgcgtgtttcaggaaggcaaagacattcacactcaaacggcaagctggatgtttggattaggcgctgaagcgatcgatcctttgatgcgtcgtgcagcgaagaccatcaatttcggtgttctctacggtatgagtgcctttcgtttgtcgcaggaattaggcattccctatgaagaagctgcggcgttcattcagaaatactttcaaagctatcccaaagttaaagcatggatcgagaagactctcgaagaaggccgcacacgtggttacgtagagaccttatttggacgtcgccgctatgttcccgatttaaacgctcgcgtgaaaggcaagcgtgaagccgccgaacgcatggcgttcaacatgcctgtacagggcacggcagctgacctcatgaaacttgcaatggtgcgcctttttccacaattgcgtgaagttggtgcccgcatgctcttgcaggtccacgatgaactcttgttagaagcgccaaaagagcgtgcggaagaggtggcagccctcgcgaaagaagttatggaaggcgtgtggcccttagcggtgcctcttgaagtcgaagttggtattggcgaggattggctggctgccaaaggataatga

SEQ ID NO: 3152 - protein, 841 aa, synthetic construct
  REGION 1..841: note = Variant of DNA polymerase I from Thermus sp. strain 2.9
MHHHHHHGGSGVLPVFEPKGRVLLVDGHHLAYRNFFALKGLTTSSGEPVQGVYGFAKSLLKALKEDGDVVIVVFDAKAPSFRHEAYEAYKAGRAPTPEDFPRQLALMKELVDLLGLERLEVPGFEADDVLATLAKKAEREGYEVQILTADRDLFQLLSPRISVLHPEGHRITPEWLWEKYGLRPEQWVDFRALAGDPSDNIPGVKGIGEKTALKLLKEWGSLENLLKNLDQVKPESVREKILAHLEDLKLSRELSRVRTDLPLEVDFRRRREPDWEGLKAFLERLEFGSLLHEFGLLESPLPAEEAPWPPPEGAFLGYRLSRPEPMWAELLALAASAQGRVYRAEDPHGALRGLFEVRGLLAKDLAVVALREGLDLPPTDDPMLLAYLLDPSNTTPEGVARRYGGEWTEDAAKRALLAERLHANLLGRLQGEERLLWLYEEVEKPLSRVLAHMEATGVKLDVAYLEALSLEVAAHMRRLEEEVFRLAGHSFRLNSRDQLERVLFDELGLRPIGKTEKTGKRSTSAAVLEALREVHPIVDKILQYRELAKLKGTYIDRLPALVHPKTGRLHTRFNQTATATGRLSSSDPNLQNIPVRTPLGQKIRKAFVAEEGWRLVALDYSQIELRVLAHLSGDENLIRVFQEGKDIHTQTASWMFGLGAEAIDPLMRRAAKTINFGVLYGMSAFRLSQELGIPYEEAAAFIQKYFQSYPKVKAWIEKTLEEGRTRGYVETLFGRRRYVPDLNARVKGKREAAERMAFNMPVQGTAADLMKLAMVRLFPQLREVGARMLLQVHDELLLEAPKERAEEVAALAKEVMEGVWPLAVPLEVEVGIGEDWLAAKG

SEQ ID NO: 3153 - DNA, 2529 bp, synthetic construct
  misc_feature 1..2529: note = Variant of DNA polymerase I from Thermus sp. strain 2.9
  source 1..2529: mol_type = other DNA
atgcaccatcatcatcatcatggcggtagcggcgtgttaccggtgttcgagcctaaaggtcgcgtgcttctggttgatggccatcatctcgcgtatcgtaacttctttgccctgaaaggattaaccaccagcagcggcgagccggtacagggtgtctacggctttgcaaagtcgctcctgaaagctctgaaagaagacggtgatgtggtgattgttgtctttgatgcgaaagcgccaagttttcgccacgaagcgtacgaagcttacaaagccgggcgtgctccaacgccggaagactttcctcgccaattggcgcttatgaaggaattagtggatttgcttggcctcgaacgcttggaagttcccggtttcgaggcagacgacgtattagcgactctcgcaaagaaagccgaacgtgagggctatgaagtccagatcttgacagcagatcgcgatcttttccagcttttatctccgcgcatctcggtgttacacccggaagggcatcgtatcaccccggaatggctctgggagaaatatggtttgcgtcccgaacaatgggtggattttcgcgccttagcaggcgatccgagcgacaatattccgggagttaaaggtatcggcgagaagacggcgctcaagctccttaaagaatgggggtcgttggagaacttgcttaagaatttagatcaggtcaaaccagagtcagtgcgtgagaagattcttgctcacctcgaagacctcaaattaagccgcgaattgtcccgtgtacgcaccgatttgccgctcgaagttgatttccagcgccgccgcgaacctgactgggagggtcttaaagcgtttttagagcgtcttgaatttggttcgctcttgcatgaattcggccttttagaaagcccgttaccggccgaagaagcaccttggccaccgcccgagggcgcgtttttaggttaccgtttgagtcgcccggaaccgatgtgggccgaattactggctcttgcagcgtctgcccagggacgtgtgtatcgcgcggaagaccctcatggtgcgctccgcggcctcttcgaagtccgtggactccttgccaaagacttagctgttgttgcattgcgcgaaggtcttgatttacctccgactgatgatccaatgcttcttgcgtacctcttggacccgtcaaacacgacgcccgaaggcgtagcccgtcgttacggcggcgagtggaccgaagatgcagcgaaacgcgcgttattggccgaacgtttgcacgagaatttattaggacgtttgcaaggcgaggaacgtctcctctggctttacgaagaagtggagaaaccattgagtcgcgtgctcgcgcatatggaagctaccggtgtcaaattagacgtggcgtatttggaggctctcagccttgaagttgctgcccacatgcgccgcttggaggaagaagtattccgtttagcaggccgttcctttcgccttagctctcgcgatcagttagaacgtgtgttgttcgatgaacttggtctccctcctatcggcaagacagagaagaccggtaaacgtagcacttcagcagcggttttagaagctcttcgcgaagtccatcccattgtggacaagatcttgcagtaccgcgaactcgcgaaattgaaaggcacctatattgaccgtcttccggcattagtccacccgaaaacgggacgcctccatacccgcttcaaccaaacagccacggcgaccggtcgtttgtcctcctctgatccaaaccttcagaatattccagtacgtaccccattgggccagaagatccgcaaagcgtttgtagctgaggagggttggcgtttagtggccctcgattatagccaaattgaattacgtgtccttgcccatctttctggcgatgagaacctcatccgcgtgtttcaggaaggcaaagacattcacactcaaacggcaagctggatgtttggattaggtgctgaagcgatcgatcctttgatgcgtcgtgcagcgaagaccatcaatttcggtgttctctacggtatgagtgcctttcgtttgtcgcaggaattaggcattccctatgaagaagctgcggcgttcattcagaaatactttcaaagctatcccaaagttaaagcatggatcgagaagactctcgaagaaggccgcacacgtggttacgtagagaccttatttggacgtcgccgctatgttcccgatttaaacgctcgcgtgaaaggcaagcgtgaagccgccgaacgcatggcgttcaacatgcctgtacagggcacggcagctgacctcatgaaacttgcaatggtgcgcctttttccacaattgcgtgaagttggtgcccgcatgctcttgcaggtccacgatgaactcttgttagaagcgccaaaagagcgtgcggaagaggtggcagccctcgcgaaagaagttatggaaggcgtgtggcccttagcggtgcctcttgaagtcgaagttggtattggcgaggattggctggctgccaaaggataatga

SEQ ID NO: 3154 - protein, 841 aa, synthetic construct
  REGION 1..841: note = Variant of DNA polymerase I from Thermus sp. strain 2.9
MHHHHHHGGSGVLPVFEPKGRVLLVDGHHLAYRNFFALKGLTTSSGEPVQGVYGFAKSLLKALKEDGDVVIVVFDAKAPSFRHEAYEAYKAGRAPTPEDFPRQLALMKELVDLLGLERLEVPGFEADDVLATLAKKAEREGYEVQILTADRDLFQLLSPRISVLHPEGHRITPEWLWEKYGLRPEQWVDFRALAGDPSDNIPGVKGIGEKTALKLLKEWGSLENLLKNLDQVKPESVREKILAHLEDLKLSRELSRVRTDLPLEVDFQRRREPDWEGLKAFLERLEFGSLLHEFGLLESPLPAEEAPWPPPEGAFLGYRLSRPEPMWAELLALAASAQGRVYRAEDPHGALRGLFEVRGLLAKDLAVVALREGLDLPPTDDPMLLAYLLDPSNTTPEGVARRYGGEWTEDAAKRALLAERLHENLLGRLQGEERLLWLYEEVEKPLSRVLAHMEATGVKLDVAYLEALSLEVAAHMRRLEEEVFRLAGRSFRLSSRDQLERVLFDELGLPPIGKTEKTGKRSTSAAVLEALREVHPIVDKILQYRELAKLKGTYIDRLPALVHPKTGRLHTRFNQTATATGRLSSSDPNLQNIPVRTPLGQKIRKAFVAEEGWRLVALDYSQIELRVLAHLSGDENLIRVFQEGKDIHTQTASWMFGLGAEAIDPLMRRAAKTINFGVLYGMSAFRLSQELGIPYEEAAAFIQKYFQSYPKVKAWIEKTLEEGRTRGYVETLFGRRRYVPDLNARVKGKREAAERMAFNMPVQGTAADLMKLAMVRLFPQLREVGARMLLQVHDELLLEAPKERAEEVAALAKEVMEGVWPLAVPLEVEVGIGEDWLAAKG

SEQ ID NO: 3155 - DNA, 2529 bp, synthetic construct
  misc_feature 1..2529: note = Variant of DNA polymerase I from Thermus sp. strain 2.9
  source 1..2529: mol_type = other DNA
atgcaccatcatcatcatcatggcggtagcggcgtgttaccggtgttcgagcctaaaggtcgcgtgcttctggttgatggccatcatctcgcgtatcgtaacttctttgccctgaaaggattaaccaccagcagcggcgagccggtacagggtgtctacggctttgcaaagtcgctcctgaaagctctgaaagaagacggtgatgtggtgattgttgtctttgatgcgaaagcgccaagttttcgccacgaagcgtacgaagcttacaaagccgggcgtgctccaacgccggaagactttcctcgccaattggcgcttatgaaggaattagtggatttgcttggcctcgaacgcttggaagttcccggtttcgaggcagacgacgtattagcgactctcgcaaagaaagccgaacgtgagggctatgaagtccagatcttgacagcagatcgcgatcttttccagcttttatctccgcgcatctcggtgttacacccggaagggcatcgtatcaccccggaatggctctgggagaaatatggtttgcgtcccgaacaatgggtggattttcgcgccttagcaggcgatccgagcgacaatattccgggagttaaaggtatcggcgagaagacggcgctcaagctccttaaagaatgggggtcgttggagaacttgcttaagaatttagatcaggtcaaaccagagtcagtgcgtgagaagattcttgctcacctcgaagacctcaaattaagccgcgaattgtcccgtgtacgcaccgatttgccgctcgaagttgatttccaacgccgccgcgaacctgactgggagggtcttaaagcgtttttagagcgtcttgaatttggttcgctcttgcatgaattcggccttttagaaagcccgttaccagccgaagaagcaccttggccaccgcccgagggcgcgtttttaggttaccgtttgagtcgcccggaaccgatgtgggccgaattactggctcttgcagcgtctgcccagggacgtgtgtatcgcgcggaagaccctcatggtgcgctccgcggcctcttcgaagtccgtggactccttgccaaagacttagctgttgttgcattgcgcgaaggtcttgatttacctccgactgatgatccaatgcttcttgcgtacctcttggacccgtcaaacacgacgcccgaaggcgtagcccgtcgttacggcggcgagtggaccgaagatgcagcgaaacgcgcgttattggccgaacgtttgcacgccaatttattaggacgtttgcaaggcgaggaacgtctcctctggctttacgaagaagtggagaaaccattgagtcgcgtgctcgcgcatatggaagctaccggtgtcaaattagacgtggcgtatttggagaatctcagccttgaagttgctgcccacatgcgccgcttggaggaagaagtattccgtttagcaggccgttcctttcgccttaattctcgcgatcagttagaacgtgtgttgttcgatgaacttggtctccctcctatcggcaagacagagaagaccggtaaacgtagcacttcagcggcggttttagaagctcttcgcgaagtccatcccattgtggacaagatcttgcagtaccgcgaactcgcgaaattgaaaggcacctatattgaccgtcttccggcattagtccacccgaaaacgggacgcctccatacccgcttcaaccaaacagccacggcgaccggtcgtttgtcctcctctgatccaaaccttcagaatattccagtacgtaccccattgggccagaagatccgccgtgcgtttgtagctgaggagggttggcgtttagtggccctcgattatagccaaattgaattacgtgtccttgcccatctttctggcgatgagaacctcatccgcgtgtttcaggaaggcaaagacattcacactcaaacggcaagctggatgtttggattatcagctgaagcgatcgatcctttgatgcgtcgtgcagcgaagaccatcaatttcggtgttctctacggtatgagtgcctttcgtttgtcgcaggaattaggcattccctatgaagaagcttcggcgttcattcagaaatactttcaaagctatcccaaagttaaagcatggatcgagaagactctcgaagaaggccgcacacgtggttacgtagagaccttatttggacgtcgccgctatgttcccgatttaaacgctcgcgtgaaaggcaagcgtgaagccgccgaacgcatggcgttcaacatgcctgtacagggcacggcagctgacctcatgaaacttgcaatggtgcgcctttttccacaattgcgtgaagttggtgcccgcatgctcttgcaggtccacgatgaactcttgttagaagcgccaaaagagcgtgcggaagaggtggcagccctcgcgaaaaccgttatggaaggcgtgtggcccttagcggtgcctcttgaagtcgaagttggtattggcgaggattggctggctgccaaaggataatga

SEQ ID NO: 3156 - protein, 841 aa, synthetic construct
  REGION 1..841: note = Variant of DNA polymerase I from Thermus sp. strain 2.9
MHHHHHHGGSGVLPVFEPKGRVLLVDGHHLAYRNFFALKGLTTSSGEPVQGVYGFAKSLLKALKEDGDVVIVVFDAKAPSFRHEAYEAYKAGRAPTPEDFPRQLALMKELVDLLGLERLEVPGFEADDVLATLAKKAEREGYEVQILTADRDLFQLLSPRISVLHPEGHRITPEWLWEKYGLRPEQWVDFRALAGDPSDNIPGVKGIGEKTALKLLKEWGSLENLLKNLDQVKPESVREKILAHLEDLKLSRELSRVRTDLPLEVDFQRRREPDWEGLKAFLERLEFGSLLHEFGLLESPLPAEEAPWPPPEGAFLGYRLSRPEPMWAELLALAASAQGRVYRAEDPHGALRGLFEVRGLLAKDLAVVALREGLDLPPTDDPMLLAYLLDPSNTTPEGVARRYGGEWTEDAAKRALLAERLHANLLGRLQGEERLLWLYEEVEKPLSRVLAHMEATGVKLDVAYLENLSLEVAAHMRRLEEEVFRLAGRSFRLNSRDQLERVLFDELGLPPIGKTEKTGKRSTSAAVLEALREVHPIVDKILQYRELAKLKGTYIDRLPALVHPKTGRLHTRFNQTATATGRLSSSDPNLQNIPVRTPLGQKIRRAFVAEEGWRLVALDYSQIELRVLAHLSGDENLIRVFQEGKDIHTQTASWMFGLSAEAIDPLMRRAAKTINFGVLYGMSAFRLSQELGIPYEEASAFIQKYFQSYPKVKAWIEKTLEEGRTRGYVETLFGRRRYVPDLNARVKGKREAAERMAFNMPVQGTAADLMKLAMVRLFPQLREVGARMLLQVHDELLLEAPKERAEEVAALAKTVMEGVWPLAVPLEVEVGIGEDWLAAKG

SEQ ID NO: 3157 - DNA, 2529 bp, synthetic construct
  misc_feature 1..2529: note = Variant of DNA polymerase I from Thermus sp. strain 2.9
  source 1..2529: mol_type = other DNA
atgcaccatcatcatcatcatggcggtagcggcgtgttaccggtgttcgagcctaaaggtcgcgtgcttctggttgatggccatcatctcgcgtatcgtaacttctttgccctgaaaggattaaccaccagcctgggcgagccggtacagggtgtctacggctttgcaaagtcgctcctgaaagctctgaaagaagacggtgatgtggtgattgttgtctttgatgcgaaagcgccaagttttcgccacgaagcgtacgaagcttacaaagccgggcgtgctccaacgccggaagactttcctcgccaattggcgcttatgaaggaattagtggatttgcttggcctcgaacgcttggaagttcccggtttcgaggcagacgacgtattagcgactctcgcaaagaaagccgaacgtgagggctatgaagtccagatcttgacagcagatcgcgatcttttccagcttttatctccgcgcatctcggtgttacacccggaagggcatcgtatcaccccggaatggctctgggagaaatatggtttgcgtcccgaacaatgggtggattttcgcgccttagcaggcgatccgagcgacaatattccgggagttaaaggtatcggcgagaagacggcgctcaagctccttaaagaatgggggtcgttggagaacttgcttgaaaatttagatcaggtcaaaccagagtcagtgcgtgagaagattcttgctcacctcgaagacctcaaattaagccgcgaattgtcccgtgtacgcaccgatttgccgctcgaagttgatttccagcgccgccgcgaacctgactgggagggtcttaaagcgtttttagagcgtcttgaatttggttcgctcttgcatgaattcggccttttagaaagcccgttaccggccgaagaagcaccttggccaccgcccgagggcgcgtttttaggttaccgtttgagtcgcccggaaccgatgtgggccgaattactggctcttgcagcgtctgcccagggacgtgtgtatcgcgcggaagaccctcatggtgcgctccgcggcctcttcgaagtccgtggactccttgccaaagacttagctgttgttgcattgcgcgaaggtcttgatttacctccgactgatgatccaatgcttcttgcgtacctcttggacccgtcaaacacgacgcccgaaggcgtagcccgtcgttacggcggcgagtggaccgaagatgcagcgaaacgcgcgttattggccgaacgtttgcacgaaaatttattaggacgtttgcaaggcgaggaacgtctcctctggctttacgaagaagtggagaaaccattgagtcgcgtgctcgcgcatatggaagctaccggtgtcaaattagacgtggcgtatttggaggctctcagccttgaagttgctgcccacatgcgccgcttggaggaagaagtattccgtttagcaggccgctcctttcgccttaactctcgcgatcagttagaacgtgtgttgttcgatgaacttggtctccgtcctatcggcaagacagagaagaccggtaaacgtagcacttcagccgcggttttagaagctcttcgcgaagtccatcccattgtggacaagatcttgcagtaccgcgaactcgcgaaattgaaaggcacctatattgaccgtcttccggcattagtccacccgaaaacgggacgcctccatacccgcttcaaccaaacagccacggcgaccggtcgtttgtcctcctctgatccaaaccttcagaatattccagtacgtaccccattgggccagaagatccgcaaagcgtttgtagctgaggagggttggcgtttagtggccctcgattatagccaaattgaattacgtgtccttgcccatctttctggcgatgagaacctcatccgcgtgtttcaggaaggcaaagacattcacactcaaacggcaagctggatgtttggattatcagctgaagcgatcgatcctttgatgcgtcgtgcagcgaagaccatcaatttcggtgttctctacggtatgagtgcctttcgtttgtcgcaggaattaggcattccctatgaagaagctgcggcgttcattcagaaatactttcaaagctatcccaaagttaaagcatggatcgagaagactctcgaagaaggccgcacacgtggttacgtagagaccttatttggacgtcgccgctatgttcccgatttaaacgctcgcgtgaaaggcaagcgtgaagccgccgaacgcatggcgttcaacatgcctgtacagggcacggcagctgacctcatgaaacttgcaatggtgcgcctttttccacaattgcgtgaagttggtgcccgcatgctcttgcaggtccacgatgaactcttgttagaagcgccaaaagagcgtgcggaagaggtggcagccctcgcgaaagaagttatggaaggcgtgtggcccttagcggtgcctcttgaagtcgaagttggtattggcgaggattggctggctgccaaaggataatga

SEQ ID NO: 3158 - protein, 841 aa, synthetic construct
  REGION 1..841: note = Variant of DNA polymerase I from Thermus sp. strain 2.9
MHHHHHHGGSGVLPVFEPKGRVLLVDGHHLAYRNFFALKGLTTSLGEPVQGVYGFAKSLLKALKEDGDVVIVVFDAKAPSFRHEAYEAYKAGRAPTPEDFPRQLALMKELVDLLGLERLEVPGFEADDVLATLAKKAEREGYEVQILTADRDLFQLLSPRISVLHPEGHRITPEWLWEKYGLRPEQWVDFRALAGDPSDNIPGVKGIGEKTALKLLKEWGSLENLLENLDQVKPESVREKILAHLEDLKLSRELSRVRTDLPLEVDFQRRREPDWEGLKAFLERLEFGSLLHEFGLLESPLPAEEAPWPPPEGAFLGYRLSRPEPMWAELLALAASAQGRVYRAEDPHGALRGLFEVRGLLAKDLAVVALREGLDLPPTDDPMLLAYLLDPSNTTPEGVARRYGGEWTEDAAKRALLAERLHENLLGRLQGEERLLWLYEEVEKPLSRVLAHMEATGVKLDVAYLEALSLEVAAHMRRLEEEVFRLAGRSFRLNSRDQLERVLFDELGLRPIGKTEKTGKRSTSAAVLEALREVHPIVDKILQYRELAKLKGTYIDRLPALVHPKTGRLHTRFNQTATATGRLSSSDPNLQNIPVRTPLGQKIRKAFVAEEGWRLVALDYSQIELRVLAHLSGDENLIRVFQEGKDIHTQTASWMFGLSAEAIDPLMRRAAKTINFGVLYGMSAFRLSQELGIPYEEAAAFIQKYFQSYPKVKAWIEKTLEEGRTRGYVETLFGRRRYVPDLNARVKGKREAAERMAFNMPVQGTAADLMKLAMVRLFPQLREVGARMLLQVHDELLLEAPKERAEEVAALAKEVMEGVWPLAVPLEVEVGIGEDWLAAKG

SEQ ID NO: 3159 - DNA, 2529 bp, synthetic construct
  misc_feature 1..2529: note = Variant of DNA polymerase I from Thermus sp. strain 2.9
  source 1..2529: mol_type = other DNA
atgcaccatcatcatcatcatggcggtagcggcgtgttaccggtgttcgagcctaaaggtcgcgtgcttctggttgatggccatcatctcgcgtatcgtaacttctttgccctgaaaggattaaccaccagcagcggcgagccggtacagggtgtctacggctttgcaaagtcgctcctgaaagctctgaaagaagacggtgatgtggtgattgttgtctttgatgcgaaagcgccaagttttcgccacgaagcgtacgaagcttacaaagccgggcgtgctccaacgccggaagactttcctcgccaattggcgcttatgaaggaattagtggatttgcttggcctcgaacgcttggaagttcccggtttcgaggcagacgacgtattagcgactctcgcaaagaaagccgaacgtgagggctatgaagtccagatcttgacagcagatcgcgatcttttccagcttttatctccgcgcatctcggtgttacacccggaagggcatcgtatcaccccggaatggctctgggagaaatatggtttgcgtcccgaacaatgggtggattttcgcgccttagcaggcgatccgagcgacaatattccgggagttaaaggtatcggcgagaagacggcgctcaagctccttaaagaatgggggtcgttggagaacttgcttaagaatttagatcaggtcaaaccagagtcagtgcgtgagaagattcttgctcacctcgaagacctcaaattaagccgcgaattgtcccgtgtacgcaccgatttgccgctcgaagttgatttccgtcgccgccgcgaacctgactgggagggtcttaaagcgtttttagagcgtcttgaatttggttcgctcttgcatgaattcggccttttagaaagcccgttaccagccgaagaagcaccttggccaccgcccgagggcgcgtttttaggttaccgtttgagtcgcccggaaccgatgtgggccgaattactggctcttgcagcgtctgcccagggacgtgtgtatcgcgcggaagaccctcatggtgcgctccgcggcctcttcgaagtccgtggactccttgccaaagacttagctgttgttgcattgcgcgaaggtcttgatttacctccgactgatgatccaatgcttcttgcgtacctcttggacccgtcaaacacgacgcccgaaggcgtagcccgtcgttacggcggcgagtggaccgaagatgcagcgaaacgcgcgttattggccgaacgtttgcacgccaatttattaggacgtttgcaaggcgaggaacgtctcctctggctttacgaagaagtggagaaaccattgagtcgcgtgctcgcgcatatggaagctaccggtgtcaaattagacgtggcgtatttggaggctctcagccttgaagttgctgcccacatgcgccgcttggaggaagaagtattccgtttagcaggccattcctttcgccttaattctcgcgatcagttagaacgtgtgttgttcgatgaacttggtctccctcctatcggcaagacagagaagaccggtaaacgtagcacttcagcggcggttttagaagctcttcgcgaagtccatcccattgtggacaagatcttgcagtaccgcgaactcgcgaaattgaaaggcacctatattgaccgtcttccggcattagtccacccgaaaacgggacgcctccatacccgcttcaaccaaacaagtacggcgaccggtcgtttgtcctcctctgatccaaaccttcagaatattccagtacgtaccccattgggccagaagatccgccgtgcgtttgtagctgaggagggttggtgtttagtggccctcgattatagccaaattgaattacgtgtccttgcccatctttctggcgatgagaacctcatccgcgtgtttcaggaaggcaaagacattcacactcaaacggcaagctggatgtttggattatcagctgaagcgatcgatcctttgatgcgtcgtgcagcgaagaccatcaatttcggtgttctctacggtatgagtgcctttcgtttgtcgcaggaattaggcattccctatgaagaagctgcggcgttcattcagaaatactttcaaagctatcccaaagttaaagcatggatcgagaagactctcgaagaaggccgcacacgtggttacgtagagaccttatttggacgtcgccgctatgttcccgatttaaacgctcgcgtgaaaggcaagcgtgaagccgccgaacgcatggcgttcaacatgcctgtacagggcacggcagctgacctcatgaaacttgcaatggtgcgcctttttccacaattgcgtgaagttggtgcccgcatgctcttgcaggtccacgatgaactcttgttagaagcgccaaaagagcgtgcggaagaggtggcagccctcgcgaaagaagttatggaaggcgtgtggcccttagcggtgcctcttgaagtcgaagttggtattggcgaggattggctggctgccaaaggataatga

SEQ ID NO: 3160 - protein, 841 aa, synthetic construct
  REGION 1..841: note = Variant of DNA polymerase I from Thermus sp. strain 2.9
MHHHHHHGGSGVLPVFEPKGRVLLVDGHHLAYRNFFALKGLTTSSGEPVQGVYGFAKSLLKALKEDGDVVIVVFDAKAPSFRHEAYEAYKAGRAPTPEDFPRQLALMKELVDLLGLERLEVPGFEADDVLATLAKKAEREGYEVQILTADRDLFQLLSPRISVLHPEGHRITPEWLWEKYGLRPEQWVDFRALAGDPSDNIPGVKGIGEKTALKLLKEWGSLENLLKNLDQVKPESVREKILAHLEDLKLSRELSRVRTDLPLEVDFRRRREPDWEGLKAFLERLEFGSLLHEFGLLESPLPAEEAPWPPPEGAFLGYRLSRPEPMWAELLALAASAQGRVYRAEDPHGALRGLFEVRGLLAKDLAVVALREGLDLPPTDDPMLLAYLLDPSNTTPEGVARRYGGEWTEDAAKRALLAERLHANLLGRLQGEERLLWLYEEVEKPLSRVLAHMEATGVKLDVAYLEALSLEVAAHMRRLEEEVFRLAGHSFRLNSRDQLERVLFDELGLPPIGKTEKTGKRSTSAAVLEALREVHPIVDKILQYRELAKLKGTYIDRLPALVHPKTGRLHTRFNQTSTATGRLSSSDPNLQNIPVRTPLGQKIRRAFVAEEGWCLVALDYSQIELRVLAHLSGDENLIRVFQEGKDIHTQTASWMFGLSAEAIDPLMRRAAKTINFGVLYGMSAFRLSQELGIPYEEAAAFIQKYFQSYPKVKAWIEKTLEEGRTRGYVETLFGRRRYVPDLNARVKGKREAAERMAFNMPVQGTAADLMKLAMVRLFPQLREVGARMLLQVHDELLLEAPKERAEEVAALAKEVMEGVWPLAVPLEVEVGIGEDWLAAKG

SEQ ID NO: 3161 - DNA, 2529 bp, synthetic construct
  misc_feature 1..2529: note = Variant of DNA polymerase I from Thermus sp. strain 2.9
  source 1..2529: mol_type = other DNA
atgcaccatcatcatcatcatggcggtagcggcgtgttaccggtgttcgagcctaaaggtcgcgtgcttctggttgatggccatcatctcgcgtatcgtaacttctttgccctgaaaggattaaccaccagctcgggcgagccggtacagggtgtctacggctttgcaaagtcgctcctgaaagctctgaaagaagacggtgatgtggtgattgttgtctttgatgcgaaagcgccaagttttcgccacgaagcgtacgaagcttacaaagccgggcgtgctccaacgccggaagactttcctcgccaattggcgcttatgaaggaattagtggatttgcttggcctcgaacgcttggaagttcccggtttcgaggcagacgacgtattagcgactctcgcaaagaaagccgaacgtgagggctatgaagtccagatcttgacagcagatcgcgatcttttccagcttttatctccgcgcatctcggtgttacacccggaagggcatcgtatcaccccggaatggctctgggagaaatatggtttgcgtcccgaacaatgggtggattttcgcgccttagcaggcgatccgagcgacaatattccgggagttaaaggtatcggcgagaagacggcgctcaagctccttaaagaatgggggtcgttggagaacttgcttaaaaatttagatcaggtcaaaccagagtcagtgcgtgagaagattcttgctcacctcgaagacctcaaattaagccgcgaattgtcccgtgtacgcaccgatttgccgctcgaagttgatttccgtcgccgccgcgaacctgactgggagggtcttaaagcgtttttagagcgtcttgaatttggttcgctcttgcatgaattcggccttttagaaagcccgttaccagccgaagaagcaccttggccaccgccccaaggcgcgtttttaggttaccgtttgagtcgcccggaaccgatgtgggccgaattagcggctcttgcagcgtctgcccagggacgcgtgtatcgcgcggaagaccctcatggtgcgctccgcggcctcttcgaagtccgcggactccttgccaaagacttagctgttgttgcattgcgcgaaggtcttgatttacctccgactgatgatccaatgcttcttgcgtacctcttggacccgtcaaacacgacgcccgaaggcgtagcccgtcgttacggcggcgagtggaccgaagatgcagcgaaacgcgcgttattggccgaacgtttgcacgccaatttattaggacgtttgcaaggcgaggaacgtctcctctggctttacgaagaagtggagaaaccattgagtcgcgtgctcgggcatatggaagctaccggtgtcaaattagacgtggcgtatttggaggctctcagccttgaagttgctgcccacatgcgccgcttggaggaagaagtattccgtttagcaggccattcctttcgccttaattctcgcgatcagttagaacgtgtgttgttcgatgaacttggtctccctcctatcggcaagacagagaagaccggtaaacgtagcacttcagcggcggttttagaagctcttcgcgaagtccatcccattgtggacaagatcttgcagtaccgcgaactcgcgaaattgaaaggcacctatattgaccgtcttccggcattagtccacccgaaaacgggacgcctccatacccgcttcaaccaaacagccacggcgaccggtcgtttgtcctcctctgatccaaaccttcagaatattccagtacgtaccccattgggccagaagatccgccgtgcgtttgtagctgaggagggttggcgtttagtggccctcgattatcgtcaaattgaattacgtgtccttgcccatctttctggcgatgagaacctcatccgcgtgtttcaggaaggcaaagacattcacactcaaacggcaagctggatgtttggattatcagctgaagcgatcgatcctttgatgcgtcgtgcagcgaagaccatcaatttcggtgttctctacggtatgagtgcctttcgtttgtcgcaggaattaggcattccctatcaggaagctcaagcgttcattcagaaatactttcaaagctatcccaaagttaaagcatggatcgagaagactctcgaagaaggccgcacacgtggttacgtagagaccttatttggacgtcgccgctatgttcccgatttaaacgctcgcgtgaaaggcaagcgtgaagccgccgaacgcatggcgttcaacatgcctgtacagggcacggcagctgacctcatgaaacttgcaatggtgcgcctttttccacaattgcgtgaagttggtgcccgcatgctcttgcaggtccacgatgaactcttgttagaagcgccaaaagagcgtgcggaagaggtggcagccctcgcgaaagaagttatggaaggcgtgtggcccttagcggtgcctcttgaagtcgaagttggtattggcgaggattggctggctgccaaaggataatga

SEQ ID NO: 3162 - protein, 841 aa, synthetic construct
  REGION 1..841: note = Variant of DNA polymerase I from Thermus sp. strain 2.9
MHHHHHHGGSGVLPVFEPKGRVLLVDGHHLAYRNFFALKGLTTSSGEPVQGVYGFAKSLLKALKEDGDVVIVVFDAKAPSFRHEAYEAYKAGRAPTPEDFPRQLALMKELVDLLGLERLEVPGFEADDVLATLAKKAEREGYEVQILTADRDLFQLLSPRISVLHPEGHRITPEWLWEKYGLRPEQWVDFRALAGDPSDNIPGVKGIGEKTALKLLKEWGSLENLLKNLDQVKPESVREKILAHLEDLKLSRELSRVRTDLPLEVDFRRRREPDWEGLKAFLERLEFGSLLHEFGLLESPLPAEEAPWPPPQGAFLGYRLSRPEPMWAELAALAASAQGRVYRAEDPHGALRGLFEVRGLLAKDLAVVALREGLDLPPTDDPMLLAYLLDPSNTTPEGVARRYGGEWTEDAAKRALLAERLHANLLGRLQGEERLLWLYEEVEKPLSRVLGHMEATGVKLDVAYLEALSLEVAAHMRRLEEEVFRLAGHSFRLNSRDQLERVLFDELGLPPIGKTEKTGKRSTSAAVLEALREVHPIVDKILQYRELAKLKGTYIDRLPALVHPKTGRLHTRFNQTATATGRLSSSDPNLQNIPVRTPLGQKIRRAFVAEEGWRLVALDYRQIELRVLAHLSGDENLIRVFQEGKDIHTQTASWMFGLSAEAIDPLMRRAAKTINFGVLYGMSAFRLSQELGIPYQEAQAFIQKYFQSYPKVKAWIEKTLEEGRTRGYVETLFGRRRYVPDLNARVKGKREAAERMAFNMPVQGTAADLMKLAMVRLFPQLREVGARMLLQVHDELLLEAPKERAEEVAALAKEVMEGVWPLAVPLEVEVGIGEDWLAAKG

SEQ ID NO: 3163 - DNA, 2529 bp, synthetic construct
  misc_feature 1..2529: note = Variant of DNA polymerase I from Thermus sp. strain 2.9
  source 1..2529: mol_type = other DNA
atgcaccatcatcatcatcatggcggtagcggcgtgttaccggtgttcgagcctaaaggtcgcgtgcttctggttgatggccatcatctcgcgtatcgtaacttctttgccctgaaaggattaaccaccagcagcggcgagccggtacagggtgtctacggctttgcaaagtcgctcctgaaagctctgaaagaagacggtgatgtggtgattgttgtctttgatgcgaaagcgccaagttttcgccacgaagcgtacgaagcttacaaagccgggcgtgctccaacgccggaagactttcctcgccaattggcgcttatgaaggaattagtggatttgcttggcctcgaacgcttggaagttcccggtttcgaggcagacgacgtattagcgactctcgcaaagaaagccgaacgtgagggctatgaagtccagatcttgacagcagatcgcgatcttttccagcttttatctccgcgcatctcggtgttacacccggaagggcatcgtatcaccccggaatggctctgggagaaatatggtttgcgtcccgaacaatgggtggattttcgcgccttagcaggcgatccgagcgacaatattccgggagttaaaggtatcggcgagaagacggcgctcaagctccttaaagaatgggggtcgttggagaacttgcttgaaaatttagatcaggtcaaaccagagtcagtgcgtgagaagattcttgctcacctcgaagacctcaaattaagccgcgaattgtcccgtgtacgcaccgatttgccgctcgaagttgatttccgtcgccgccgcgaacctgactgggagggtcttaaagcgtttttagagcgtcttgaatttggttcgctcttgcatgaattcggccttttagaaagcccgttaccagccgaagaagcaccttggccaccgcccgagggcgcgtttttaggttaccgtttgagtcgcccggaaccgatgtgggccgaattactggctcttgcagcgtctgcccagggacgtgtgtatcgcgcggaagaccctcatggtgcgctccgcggcctcttcgaagtccgtggactccttgccaaagacttagctgttgttgcattgcgcgaaggtcttgatttacctccgactgatgatccaatgcttcttgcgtacctcttggacccgtcaaacacgacgcccgaaggcgtagcccgtcgttacggcggcgagtggaccgaagatgcagcgaaacgcgcgttattggccgaacgtttgcacgccaatttattaggacgtttgcaaggcgaggaacgtctcctctggctttacgaagaagtggagaaaccattgagtcgcgtgctcgcgcatatggaagctaccggtgtcaaattagacgtggcgtatttggaggctctcagccttgaagttgctgcccacatgcgccgcttggaggaagaagtattccgtttagcaggccactcctttcgccttaactctcgcgatcagttagaacgtgtgttgttcgatgaacttggtctccctcctatcggcaagacagagaagaccggtaaacgtagcacttcagcggcggttttagaagctcttcgcgaagtccatcccattgtggacaagatcttggtttaccgcgaactcgcgaaattgaaaggcacctatattgaccgtcttccggcattagtccacccgaaaacgggacgcctccatacccgcttcaaccaaacagccacggcgaccggtcgtttgtcctcctctgatccaaaccttcagaatattccagtacgtaccccattgggccagaagatccgccgcgcgtttgtagctgaggagggttggcgtttagtggccctcgattatagtcaaattgaattacgtgtccttgcccatctttctggcgatgagaacctcatccgcgtgtttcaggaaggcaaagacattcacactcaaacggcaagctggatgtttggattaggcgctgaagcgatcgatcctttgatgcgtcgtgcagcgaagaccatcaatttcggtgttctctacggtatgagtgcctttcgtttgtcgcaggaattaggcattccctatgaggaagcttcggcgttcattcagaaatactttcaaagctatcccaaagttaaagcatggatcgagaagactctcgaagaaggccgcacacgtggttacgtagagaccttatttggacgtcgccgctatgttcccgatttaaacgctcgcgtgaaaggcaagcgtgaagccgccgaacgcatggcgttcaacatgcctgtacagggcacggcagctgacctcatgaaacttgcaatggtgcgcctttttccacaattgcgtgaagttggtgcccgcatgctcttgcaggtccacgatgaactcttgttagaagcgccaaaagagcgtgcggaagaggtggcagccctcgcgaaagaagttatggaaggcgtgtggcccttagcggtgcctcttgaagtcgaagttggtattggcgaggattggctggctgccaaaggataatga

SEQ ID NO: 3164 - protein, 841 aa, synthetic construct
  REGION 1..841: note = Variant of DNA polymerase I from Thermus sp. strain 2.9
MHHHHHHGGSGVLPVFEPKGRVLLVDGHHLAYRNFFALKGLTTSSGEPVQGVYGFAKSLLKALKEDGDVVIVVFDAKAPSFRHEAYEAYKAGRAPTPEDFPRQLALMKELVDLLGLERLEVPGFEADDVLATLAKKAEREGYEVQILTADRDLFQLLSPRISVLHPEGHRITPEWLWEKYGLRPEQWVDFRALAGDPSDNIPGVKGIGEKTALKLLKEWGSLENLLENLDQVKPESVREKILAHLEDLKLSRELSRVRTDLPLEVDFRRRREPDWEGLKAFLERLEFGSLLHEFGLLESPLPAEEAPWPPPEGAFLGYRLSRPEPMWAELLALAASAQGRVYRAEDPHGALRGLFEVRGLLAKDLAVVALREGLDLPPTDDPMLLAYLLDPSNTTPEGVARRYGGEWTEDAAKRALLAERLHANLLGRLQGEERLLWLYEEVEKPLSRVLAHMEATGVKLDVAYLEALSLEVAAHMRRLEEEVFRLAGHSFRLNSRDQLERVLFDELGLPPIGKTEKTGKRSTSAAVLEALREVHPIVDKILVYRELAKLKGTYIDRLPALVHPKTGRLHTRFNQTATATGRLSSSDPNLQNIPVRTPLGQKIRRAFVAEEGWRLVALDYSQIELRVLAHLSGDENLIRVFQEGKDIHTQTASWMFGLGAEAIDPLMRRAAKTINFGVLYGMSAFRLSQELGIPYEEASAFIQKYFQSYPKVKAWIEKTLEEGRTRGYVETLFGRRRYVPDLNARVKGKREAAERMAFNMPVQGTAADLMKLAMVRLFPQLREVGARMLLQVHDELLLEAPKERAEEVAALAKEVMEGVWPLAVPLEVEVGIGEDWLAAKG

SEQ ID NO: 3165 - DNA, 2529 bp, synthetic construct
  misc_feature 1..2529: note = Variant of DNA polymerase I from Thermus sp. strain 2.9
  source 1..2529: mol_type = other DNA
atgcaccatcatcatcatcatggcggtagcggcgtgttaccggtgttcgagcctaaaggtcgcgtgcttctggttgatggccatcatctcgcgtatcgtaacttctttgccctgaaaggattaaccaccagctcgggcgagccggtacagggtgtctacggctttgcaaagtcgctcctgaaagctctgaaagaagacggtgatgtggtgattgttgtctttgatgcgaaagcgccaagttttcgccacgaagcgtacgaagcttacaaagccgggcgtgctccaacgccggaagactttcctcgccaattggcgcttatgaaggaattagtggatttgcttggcctcgaacgcttggaagttcccggtttcgaggcagacgacgtattagcgactctcgcaaagaaagccgaacgtgagggctatgaagtccagatcttgacagcagatcgcgatcttttccagcttttatctccgcgcatctcggtgttacacccggaagggcatcgtatcaccccggaatggctctgggagaaatatggtttgcgtcccgaacaatgggtggattttcgcgccttagcaggcgatccgagcgacaatattccgggagttaaaggtatcggcgagaagacggcgctcaagctccttaaagaatgggggtcgttggagaacttgcttgaaaatttagatcaggtcaaaccagagtcagtgcgtgagaagattcttgctcacctcgaagacctcaaattaagccgcgaattgtcccgtgtacgcaccgatttgccgctcgaagttgatttccgtcgccgccgcgaacctgactgggagggtcttaaagcgtttttagagcgtcttgaatttggttcgctcttgcatgaattcggccttttagaaagcccgttaccagccgaagaagcaccttggccaccgcccgagggcgcgtttttaggttaccgtttgagtcgcccggaaccgatgtgggccgaattactggctcttgcagcgtctgcccagggacgtgtgtatcgcgcggaagaccctcatggtgcgctccgcggcctcttcgaagtccgcggactccttgccaaagacttagctgttgttgcattgcgcgaaggtcttgatttacctccgactgatgatccaatgcttcttgcgtacctcttggacccgtcaaacacgacgcccgaaggcgtagcccgtcgttacggcggcgagtggaccgaagatgcagcgaaacgcgcgttattggccgaacgtttgcacgaaaatttattaggacgtttgcaaggcgaggaacgtctcctctggctttacgaagaagtggagaaaccattgagtcgcgtgctcgggcatatggaagctaccggtgtcaaattagacgtggcgtatttggaggctctcagccttgaagttgctgcccacatgcgccgcttggaggaagaagtattccgtttagcaggccactcctttcgccttaactctcgcgatcagttagaacgtgtgttgttcgatgaacttggtctccctcctatcggcaagacagagaagaccggtaaacgtagcacttcagcggcggttttagaagctcttcgcgaagtccatcccattgtggacaagatcttgcagtaccgcgaactcgcgaaattgaaaggcacctatattgaccgtcttccggcattagtccacccgaaaacgggacgcctccatacccgcttcaaccaaacagccacggcgaccggtcgtttgtcctcctctgatccaaaccttcagaatattccagtacgtaccccattgggccagaagatccgccgcgcgtttgtagctgaggagggttggcgtttagtggccctcgattatagccaaattgaattacgtgtccttgcccatctttctggcgatgagaacctcatccgcgtgtttcaggaaggcaaagacattcacactcaaacggcaagctggatgtttggattatcagctgaagcgatcgatcctttgatgcgtcgtgcagcgaagaccatcaatttcggtgttctctacggtatgagtgcctttcgtttgtcgcaggaattaggcattccctatgaagaagctgcggcgttcattcagaaatactttcaaagctatcccaaagttaaagcatggatcgagaagactctcgaagaaggccgcacacgtggttacgtagagaccttatttggacgtcgccgctatgttcccgatttaaacgctcgcgtgaaaggcaagcgtgaagccgccgaacgcatggcgttcaacatgcctgtacagggcacggcagctgacctcatgaaacttgcaatggtgcgcctttttccacaattgcgtgaagttggtgcccgcatgctcttgcaggtccacgatgaactcttgttagaagcgccaaaagagcgtgcggaagaggtggcagccctcgcgaaagaagttatggaaggcgtgtggcccttagcggtgcctcttgaagtcgaagttggtattggcgaggattggctggctgccaaaggataatga

SEQ ID NO: 3166 - protein, 841 aa, synthetic construct
  REGION 1..841: note = Variant of DNA polymerase I from Thermus sp. strain 2.9
MHHHHHHGGSGVLPVFEPKGRVLLVDGHHLAYRNFFALKGLTTSSGEPVQGVYGFAKSLLKALKEDGDVVIVVFDAKAPSFRHEAYEAYKAGRAPTPEDFPRQLALMKELVDLLGLERLEVPGFEADDVLATLAKKAEREGYEVQILTADRDLFQLLSPRISVLHPEGHRITPEWLWEKYGLRPEQWVDFRALAGDPSDNIPGVKGIGEKTALKLLKEWGSLENLLENLDQVKPESVREKILAHLEDLKLSRELSRVRTDLPLEVDFRRRREPDWEGLKAFLERLEFGSLLHEFGLLESPLPAEEAPWPPPEGAFLGYRLSRPEPMWAELLALAASAQGRVYRAEDPHGALRGLFEVRGLLAKDLAVVALREGLDLPPTDDPMLLAYLLDPSNTTPEGVARRYGGEWTEDAAKRALLAERLHENLLGRLQGEERLLWLYEEVEKPLSRVLGHMEATGVKLDVAYLEALSLEVAAHMRRLEEEVFRLAGHSFRLNSRDQLERVLFDELGLPPIGKTEKTGKRSTSAAVLEALREVHPIVDKILQYRELAKLKGTYIDRLPALVHPKTGRLHTRFNQTATATGRLSSSDPNLQNIPVRTPLGQKIRRAFVAEEGWRLVALDYSQIELRVLAHLSGDENLIRVFQEGKDIHTQTASWMFGLSAEAIDPLMRRAAKTINFGVLYGMSAFRLSQELGIPYEEAAAFIQKYFQSYPKVKAWIEKTLEEGRTRGYVETLFGRRRYVPDLNARVKGKREAAERMAFNMPVQGTAADLMKLAMVRLFPQLREVGARMLLQVHDELLLEAPKERAEEVAALAKEVMEGVWPLAVPLEVEVGIGEDWLAAKG

SEQ ID NO: 3167 - DNA, 2529 bp, synthetic construct
  misc_feature 1..2529: note = Variant of DNA polymerase I from Thermus sp. strain 2.9
  source 1..2529: mol_type = other DNA
atgcaccatcatcatcatcatggcggtagcggcgtgttaccggtgttcgagcctaaaggtcgcgtgcttctggttgatggccatcatctcgcgtatcgtaacttctttgccctgaaaggattaaccaccagcagcggcgagccggtacagggtgtctacggctttgcaaagtcgctcctgaaagctctgaaagaagacggtgatgtggtgattgttgtctttgatgcgaaagcgccaagttttcgccacgaagcgtacgaagcttacaaagccgggcgtgctccaacgccggaagactttcctcgccaattggcgcttatgaaggaattagtggatttgcttggcctcgaacgcttggaagttcccggtttcgaggcagacgacgtattagcgactctcgcaaagaaagccgaacgtgagggctatgaagtccagatcttgacagcagatcgcgatcttttccagcttttatctccgcgcatctcggtgttacacccggaagggcatcgtatcaccccggaatggctctgggagaaatatggtttgcgtcccgaacaatgggtggattttcgcgccttagcaggcgatccgagcgacaatattccgggagttaaaggtatcggcgagaagacggcgctcaagctccttaaagaatgggggtcgttggagaacttgcttaagaatttagatcaggtcaaaccagagtcagtgcgtgagaagattcttgctcacctcgaagacctcaaattaagccgcgaattgtcccgtgtacgcaccgatttgccgctcgaagttgatttcggtcgccgccgcgaacctgactgggagggtcttaaagcgtttttagagcgtcttgaatttggttcgctcttgcatgaattcggccttttagaaagcccgttactggccgaagaagcaccttggccaccgcccgagggcgcgtttttaggttaccgtttgagtcgcccggaaccgatgtgggccgaattactggctcttgcagcgtctgcccagggacgtgtgtatcgcgcggaagaccctcatggtgcgctccgcggcctcttcgaagtccgtggactccttgccaaagacttagctgttgttgcattgcgcgaaggtcttgatttacctccgactgatgatccaatgcttcttgcgtacctcttggacccgtcaaacacgacgcccgaaggcgtagcccgtcgttacggcggcgagtggaccgaagatgcagcgaaacgcgcgttattggccgaacgtttgcacgaaaatttattaggacgtttgcaaggcgaggaacgtctcctctggctttacgaagaagtggagaaaccattgagtcgcgtgctcgcgcatatggaagctaccggtgtcaaattagacgtggcgtatttggaggctctcagccttgaagttgctgcccacatgcgccgcttggaggaagaagtattccgtttagcaggccattcctttcgccttaattctcgcgatcagttagaacgtgtgttgttcgatgaacttggtctccctcctatcggcaagacagagaagaccggtaaacgtagcacttcagccgcggttttagaagctcttcgcgaagtccatcccattgtggacaagatcttgcagtaccgcgaactcgcgaaattgaaaggcacctatattgaccgtcttccggcattagtccacccgaaaacgggacgcctccatacccgcttcaaccaaacagccacggcgaccggtcgtttgtcctcctctgatccaaaccttcagaatattccagtacgtaccccattgggccagaagatccgcaaagcgtttgtagctgaggagggttggcgtttagtggccctcgattatagtcaaattgaattacgtgtccttgcccatctttctggcgatgagaacctcatccgcgtgtttcaggaaggcaaagacattcacactcaaacggcaagctggatgtttggattatcagctgaagcgatcgatcctttgatgcgtcgtgcagcgaagaccatcaatttcggtgttctctacggtatgagtgcctttcgtttgtcgcaggaattaggcattccctatgaagaagctgcggcgttcattcagaaatactttcaaagctatcccaaagttaaagcatggatcgagaagactctcgaagaaggccgcacacgtggttacgtagagaccttatttggacgtcgccgctatgttcccgatttaaacgctcgcgtgaaaggcaagcgtgaagccgccgaacgcatggcgttcaacatgcctgtacagggcacggcagctgacctcatgaaacttgcaatggtgcgcctttttccacaattgcgtgaagttggtgcccgcatgctcttgcaggtccacgatgaactcttgttagaagcgccaaaagagcgtgcggaagaggtggcagccctcgcgaaagaagttatggaaggcgtgtggcccttagcggtgcctcttgaagtcgaagttggtattggcgaggattggctggctgccaaaggataatga

SEQ ID NO: 3168 - protein, 841 aa, synthetic construct
  REGION 1..841: note = Variant of DNA polymerase I from Thermus sp. strain 2.9
MHHHHHHGGSGVLPVFEPKGRVLLVDGHHLAYRNFFALKGLTTSSGEPVQGVYGFAKSLLKALKEDGDVVIVVFDAKAPSFRHEAYEAYKAGRAPTPEDFPRQLALMKELVDLLGLERLEVPGFEADDVLATLAKKAEREGYEVQILTADRDLFQLLSPRISVLHPEGHRITPEWLWEKYGLRPEQWVDFRALAGDPSDNIPGVKGIGEKTALKLLKEWGSLENLLKNLDQVKPESVREKILAHLEDLKLSRELSRVRTDLPLEVDFGRRREPDWEGLKAFLERLEFGSLLHEFGLLESPLLAEEAPWPPPEGAFLGYRLSRPEPMWAELLALAASAQGRVYRAEDPHGALRGLFEVRGLLAKDLAVVALREGLDLPPTDDPMLLAYLLDPSNTTPEGVARRYGGEWTEDAAKRALLAERLHENLLGRLQGEERLLWLYEEVEKPLSRVLAHMEATGVKLDVAYLEALSLEVAAHMRRLEEEVFRLAGHSFRLNSRDQLERVLFDELGLPPIGKTEKTGKRSTSAAVLEALREVHPIVDKILQYRELAKLKGTYIDRLPALVHPKTGRLHTRFNQTATATGRLSSSDPNLQNIPVRTPLGQKIRKAFVAEEGWRLVALDYSQIELRVLAHLSGDENLIRVFQEGKDIHTQTASWMFGLSAEAIDPLMRRAAKTINFGVLYGMSAFRLSQELGIPYEEAAAFIQKYFQSYPKVKAWIEKTLEEGRTRGYVETLFGRRRYVPDLNARVKGKREAAERMAFNMPVQGTAADLMKLAMVRLFPQLREVGARMLLQVHDELLLEAPKERAEEVAALAKEVMEGVWPLAVPLEVEVGIGEDWLAAKG

SEQ ID NO: 3169 - DNA, 2529 bp, synthetic construct
  misc_feature 1..2529: note = Variant of DNA polymerase I from Thermus sp. strain 2.9
  source 1..2529: mol_type = other DNA
atgcaccatcatcatcatcatggcggtagcggcgtgttaccggtgttcgagcctaaaggtcgcgtgcttctggttgatggccatcatctcgcgtatcgtaacttctttgccctgaaaggattaaccaccagcctgggcgagccggtacagggtgtctacggctttgcaaagtcgctcctgaaagctctgaaagaagacggtgatgtggtgattgttgtctttgatgcgaaagcgccaagttttcgccacgaagcgtacgaagcttacaaagccgggcgtgctccaacgccggaagactttcctcgccaattggcgcttatgaaggaattagtggatttgcttggcctcgaacgcttggaagttcccggtttcgaggcagacgacgtattagcgactctcgcaaagaaagccgaacgtgagggctatgaagtccagatcttgacagcagatcgcgatcttttccagcttttatctccgcgcatctcggtgttacacccggaagggcatcgtatcaccccggaatggctctgggagaaatatggtttgcgtcccgaacaatgggtggattttcgcgccttagcaggcgatccgagcgacaatattccgggagttaaaggtatcggcgagaagacggcgctcaagctccttaaagaatgggggtcgttggagaacttgcttaagaatttagatcaggtcaaaccagagtcagtgcgtgagaagattcttgctcacctcgaagacctcaaattaagccgcgaattgtcccgtgtacgcaccgatttgccgctcgaagttgatttccgtcgccgccgcgaacctgactgggagggtcttaaagcgtttttagagcgtcttgaatttggttcgctcttgcatgaattcggccttttagaaagcccgttaccagccgaagaagcaccttggccaccgcccgagggcgcgtttttaggttaccgtttgagtcgcccggaaccgatgtgggccgaattactggctcttgcagcgtctgcccagggacgtgtgtatcgcgcggaagaccctcatggtgcgctccgcggcctcttcgaagtccgtggactccttgccaaagacttagctgttgttgcattgcgcgaaggtcttgatttacctccgactgatgatccaatgcttcttgcgtacctcttggacccgtcaaacacgacgcccgaaggcgtagcccgtcgttacggcggcgagtggaccgaagatgcagcgaaacgcgcgttattggccgaacgtttgcacgcaaatttattaggacgtttgcaaggcgaggaacgtctcctctggctttacgaagaagtggagaaaccattgagtcgcgtgctcgcgcatatggaagctaccggtgtcaaattagacgtggcgtatttggaggctctcagccttgaagttgctgcccacatgcgccgcttggaggaagaagtattccgtttagcaggccattcctttcgccttaattctcgcgatcagttagaacgtgtgttgttcgatgaacttggtctccctcctatcggcaagacagagaagaccggtaaacgtagcacttcagcggcggttttagaagctcttcgcgaagtccatcccattgtggacaagatcttgcagtaccgcgaactcgcgaaattgaaaggcacctatattgaccgtcttccggcattagtccacccgaaaacgggacgcctccatacccgcttcaaccaaacagccacggcgaccggtcgtttgtcctcctctgatccaaaccttcagaatattccagtacgtaccccattgggccagaagatccgcaaagcgtttgtagctgaggagggttggcgtttagtggccctcgattatagccaaattgaattacgtgtccttgcccatctttctggcgatgagaacctcatccgcgtgtttcaggaaggcaaagacattcacactcaaacggcaagctggatgtttggattatcagctgaagcgatcgatcctttgatgcgtcgtgcagcgaagaccatcaatttcggtgttctctacggtatgagtgcctttcgtttgtcgcaggaattaggcattccctatgaggaagctgcggcgttcattcagaaatactttcaaagctatcccaaagttaaagcatggatcgagaagactctcgaagaaggccgcacacgtggttacgtagagaccttatttggacgtcgccgctatgttcccgatttaaacgctcgcgtgaaaggcaagcgtgaagccgccgaacgcatggcgttcaacatgcctgtacagggcacggcagctgacctcatgaaacttgcaatggtgcgcctttttccacaattgcgtgaagttggtgcccgcatgctcttgcaggtccacgatgaactcttgttagaagcgccaaaagagcgtgcggaagaggtggcagccctcgcgaaagaagttatggaaggcgtgtggcccttagcggtgcctcttgaagtcgaagttggtattggcgaggattggctggctgccaaaggataatga

SEQ ID NO: 3170 - protein, 841 aa, synthetic construct
  REGION 1..841: note = Variant of DNA polymerase I from Thermus sp. strain 2.9
MHHHHHHGGSGVLPVFEPKGRVLLVDGHHLAYRNFFALKGLTTSLGEPVQGVYGFAKSLLKALKEDGDVVIVVFDAKAPSFRHEAYEAYKAGRAPTPEDFPRQLALMKELVDLLGLERLEVPGFEADDVLATLAKKAEREGYEVQILTADRDLFQLLSPRISVLHPEGHRITPEWLWEKYGLRPEQWVDFRALAGDPSDNIPGVKGIGEKTALKLLKEWGSLENLLKNLDQVKPESVREKILAHLEDLKLSRELSRVRTDLPLEVDFRRRREPDWEGLKAFLERLEFGSLLHEFGLLESPLPAEEAPWPPPEGAFLGYRLSRPEPMWAELLALAASAQGRVYRAEDPHGALRGLFEVRGLLAKDLAVVALREGLDLPPTDDPMLLAYLLDPSNTTPEGVARRYGGEWTEDAAKRALLAERLHANLLGRLQGEERLLWLYEEVEKPLSRVLAHMEATGVKLDVAYLEALSLEVAAHMRRLEEEVFRLAGHSFRLNSRDQLERVLFDELGLPPIGKTEKTGKRSTSAAVLEALREVHPIVDKILQYRELAKLKGTYIDRLPALVHPKTGRLHTRFNQTATATGRLSSSDPNLQNIPVRTPLGQKIRKAFVAEEGWRLVALDYSQIELRVLAHLSGDENLIRVFQEGKDIHTQTASWMFGLSAEAIDPLMRRAAKTINFGVLYGMSAFRLSQELGIPYEEAAAFIQKYFQSYPKVKAWIEKTLEEGRTRGYVETLFGRRRYVPDLNARVKGKREAAERMAFNMPVQGTAADLMKLAMVRLFPQLREVGARMLLQVHDELLLEAPKERAEEVAALAKEVMEGVWPLAVPLEVEVGIGEDWLAAKG

SEQ ID NO: 3171 - DNA, 2529 bp, synthetic construct
  misc_feature 1..2529: note = Variant of DNA polymerase I from Thermus sp. strain 2.9
  source 1..2529: mol_type = other DNA
atgcaccatcatcatcatcatggcggtagcggcgtgttaccggtgttcgagcctaaaggtcgcgtgcttctggttgatggccatcatctcgcgtatcgtaacttctttgccctgaaaggattaaccaccagcagcggcgagccggtacagggtgtctacggctttgcaaagtcgctcctgaaagctctgaaagaagacggtgatgtggtgattgttgtctttgatgcgaaagcgccaagttttcgccacgaagcgtacgaagcttacaaagccgggcgtgctccaacgccggaagactttcctcgccaattggcgcttatgaaggaattagtggatttgcttggcctcgaacgcttggaagttcccggtttcgaggcagacgacgtattagcgactctcgcaaagaaagccgaacgtgagggctatgaagtccagatcttgacagcagatcgcgatcttttccagcttttatctccgcgcatctcggtgttacacccggaagggcatcgtatcaccccggaatggctctgggagaaatatggtttgcgtcccgaacaatgggtggattttcgcgccttagcaggcgatccgagcgacaatattccgggagttaaaggtatcggcgagaagacggcgctcaagctccttaaagaatgggggtcgttggagaacttgcttaagaatttagatcaggtcaaaccagagtcagtgcgtgagaagattcttgctcacctcgaagacctcaaattaagccgcgaattgtcccgtgtacgcaccgatttgccgctcgaagttgatttccagcgccgccgcgaacctgactgggagggtcttaaagcgtttttagagcgtcttgaatttggttcgctcttgcatgaattcggccttttagaaagcccgttaccggccgaagaagcaccttggccaccgcccgagggcgcgtttttaggttaccgtttgagtcgcccggaaccgatgtgggccgaattactggctcttgcagcgtctgcccagggacgtgtgtatcgcgcggaagaccctcatggtgcgctccgcggcctcttcgaagtccgtggactccttgccaaagacttagctgttgttgcattgcgcgaaggtcttgatttacctccgactgatgatccaatgcttcttgcgtacctcttggacccgtcaaacacgacgcccgaaggcgtagcccgtcgttacggcggcgagtggaccgaagatgcagcgaaacgcgcgttattggccgaacgtttgcacgccaatttattaggacgtttgcaaggcgaggaacgtctcctctggctttacgaagaagtggagaaaccattgagtcgcgtgctcgcgcatatggaagctaccggtgtcaaattagacgtggcgtatttggaggctctcagccttgaagttgctgcccacatgcgccgcttggaggaagaagtattccgtttagcaggccattcctttcgccttaattctcgcgatcagttagaacgtgtgttgttcgatgaacttggtctccctcctatcggcaagacagagaagaccggtaaacgtagcacttcacgcgcggttttagaagctcttcgcgaagtccatcccattgtggacaagatcttgcagtaccgcgaactcgcgaaattgaaaggcacctatattgaccgtcttccggcattagtccacccgaaaacgggacgcctccatacccgcttcaaccaaacagccacggcgaccggtcgtttgtcctcctctgatccaaaccttcagaatattccagtacgtaccccattgggccagaagatccgcaaagcgtttgtagctgaggagggttggcgtttagtggccctcgattatagtcaaattgaattacgtgtccttgcccatctttctggcgatgagaacctcatccgcgtgtttcaggaaggcaaagacattcacactcaaacggcaagctggatgtttggattatcagctgaagcgatcgatcctttgatgcgtcgtgcagcgaagaccatcaatttcggtgttctctacggtatgagtgcctttcgtttgtcgcaggaattaggcattccctatgaagaagctgcggcgttcattcagaaatactttcaaagctatcccaaagttaaagcatggatcgagaagactctcgaagaaggccgcacacgtggttacgtagagaccttatttggacgtcgccgctatgttcccgatttaaacgctcgcgtgaaaggcaagcgtgaagccgccgaacgcatggcgttcaacatgcctgtacagggcacggcagctgacctcatgaaacttgcaatggtgcgcctttttccacaattgcgtgaagttggtgcccgcatgctcttgcaggtccacgatgaactcttgttagaagcgccaaaagagcgtgcggaagaggtggcagccctcgcgaaagaagttatggaaggcgtgtggcccttagcggtgcctcttgaagtcgaagttggtattggcgaggattggctggctgccaaaggataatga

SEQ ID NO: 3172 - protein, 841 aa, synthetic construct
  REGION 1..841: note = Variant of DNA polymerase I from Thermus sp. strain 2.9
MHHHHHHGGSGVLPVFEPKGRVLLVDGHHLAYRNFFALKGLTTSSGEPVQGVYGFAKSLLKALKEDGDVVIVVFDAKAPSFRHEAYEAYKAGRAPTPEDFPRQLALMKELVDLLGLERLEVPGFEADDVLATLAKKAEREGYEVQILTADRDLFQLLSPRISVLHPEGHRITPEWLWEKYGLRPEQWVDFRALAGDPSDNIPGVKGIGEKTALKLLKEWGSLENLLKNLDQVKPESVREKILAHLEDLKLSRELSRVRTDLPLEVDFQRRREPDWEGLKAFLERLEFGSLLHEFGLLESPLPAEEAPWPPPEGAFLGYRLSRPEPMWAELLALAASAQGRVYRAEDPHGALRGLFEVRGLLAKDLAVVALREGLDLPPTDDPMLLAYLLDPSNTTPEGVARRYGGEWTEDAAKRALLAERLHANLLGRLQGEERLLWLYEEVEKPLSRVLAHMEATGVKLDVAYLEALSLEVAAHMRRLEEEVFRLAGHSFRLNSRDQLERVLFDELGLPPIGKTEKTGKRSTSRAVLEALREVHPIVDKILQYRELAKLKGTYIDRLPALVHPKTGRLHTRFNQTATATGRLSSSDPNLQNIPVRTPLGQKIRKAFVAEEGWRLVALDYSQIELRVLAHLSGDENLIRVFQEGKDIHTQTASWMFGLSAEAIDPLMRRAAKTINFGVLYGMSAFRLSQELGIPYEEAAAFIQKYFQSYPKVKAWIEKTLEEGRTRGYVETLFGRRRYVPDLNARVKGKREAAERMAFNMPVQGTAADLMKLAMVRLFPQLREVGARMLLQVHDELLLEAPKERAEEVAALAKEVMEGVWPLAVPLEVEVGIGEDWLAAKG

SEQ ID NO: 3173 - DNA, 2529 bp, synthetic construct
  misc_feature 1..2529: note = Variant of DNA polymerase I from Thermus sp. strain 2.9
  source 1..2529: mol_type = other DNA
atgcaccatcatcatcatcatggcggtagcggcgtgttaccggtgttcgagcctaaaggtcgcgtgcttctggttgatggccatcatctcgcgtatcgtaacttctttgccctgaaaggattaaccaccagcagcggcgagccggtacagggtgtctacggctttgcaaagtcgctcctgaaagctctgaaagaagacggtgatgtggtgattgttgtctttgatgcgaaagcgccaagttttcgccacgaagcgtacgaagcttacaaagccgggcgtgctccaacgccggaagactttcctcgccaattggcgcttatgaaggaattagtggatttgcttggcctcgaacgcttggaagttcccggtttcgaggcagacgacgtattagcgactctcgcaaagaaagccgaacgtgagggctatgaagtccagatcttgacagcagatcgcgatcttttccagcttttatctccgcgcatctcggtgttacacccggaagggcatcgtatcaccccggaatggctctgggagaaatatggtttgcgtcccgaacaatgggtggattttcgcgccttagcaggcgatccgagcgacaatattccgggagttaaaggtatcggcgagaagacggcgctcaagctccttaaagaatgggggtcgttggagaacttgcttaagaatttagatcaggtcaaaccagagtcagtgcgtgagaagattcttgctcacctcgaagacctcaaattaagccgcgaattgtcccgtgtacgcaccgatttgccgctcgaagttgatttccgtcgccgccgcgaacctgactgggagggtcttaaagcgtttttagagcgtcttgaatttggttcgctcttgcatgaattcggccttttagaaagcccgttactggccgaagaagcaccttggccaccgcccgagggcgcgtttttaggttaccgtttgagtcgcccggaaccgatgtgggccgaattactggctcttgcagcgtctgcccagggacgtgtgtatcgcgcggaagaccctcatggtgcgctccgcggcctcttcgaagtccgtggactccttgccaaagacttagctgttgttgcattgcgcgaaggtcttgatttacctccgactgatgatccaatgcttcttgcgtacctcttggacccgtcaaacacgacgcccgaaggcgtagcccgtcgttacggcggcgagtggaccgaagatgcagcgaaacgcgcgttattggccgaacgtttgcacgaaaatttattaggacgtttgcaaggcgaggaacgtctcctctggctttacgaagaagtggagaaaccattgagtcgcgtgctcgcgcatatggaagctaccggtgtcaaattagacgtggcgtatttggaggctctcagccttgaagttgctgcccacatgcgccgcttggaggaagaagtattccgtttagcaggccattcctttcgccttaattctcgcgatcagttagaacgtgtgttgttcgatgaacttggtctccctcctatcggcaagacagagaagaccggtaaacgtagcacttcagcggcggttttagaagctcttcgcgaagtccatcccattgtggacaagatcttgcagtaccgcgaactcgcgaaattgaaaggcacctatattgaccgtcttccggcattagtccacccgaaaacgggacgcctccatacccgcttcaaccaaacagccacggcgaccggtcgtttgtcctcctctgatccaaaccttcagaatattccagtacgtaccccattgggccagaagatccgccgtgcgtttgtagctgaggagggttggcgtttagtggccctcgattatagccaaattgaattacgtgtccttgcccatctttctggcgatgagaacctcatccgcgtgtttcaggaaggcaaagacattcacactcaaacggcaagctggatgtttggattatcagctgaagcgatcgatcctttgatgcgtcgtgcagcgaagaccatcaatttcggtgttctctacggtatgagtgcctttcgtttgtcgcaggaattaggcattccctatgaagaagctgcggcgttcattcagaaatactttcaaagctatcccaaagttaaagcatggatcgagaagactctcgaagaaggccgcacacgtggttacgtagagaccttatttggacgtcgccgctatgttcccgatttaaacgctcgcgtgaaaggcaagcgtgaagccgccgaacgcatggcgttcaacatgcctgtacagggcacggcagctgacctcatgaaacttgcaatggtgcgcctttttccacaattgcgtgaagttggtgcccgcatgctcttgcaggtccacgatgaactcttgttagaagcgccaaaagagcgtgcggaagaggtggcagccctcgcgaaagaagttatggaaggcgtgtggcccttagcggtgcctcttgaagtcgaagttggtattggcgaggattggctggctgccaaaggataatga

SEQ ID NO: 3174 - protein, 841 aa, synthetic construct
  REGION 1..841: note = Variant of DNA polymerase I from Thermus sp. strain 2.9
MHHHHHHGGSGVLPVFEPKGRVLLVDGHHLAYRNFFALKGLTTSSGEPVQGVYGFAKSLLKALKEDGDVVIVVFDAKAPSFRHEAYEAYKAGRAPTPEDFPRQLALMKELVDLLGLERLEVPGFEADDVLATLAKKAEREGYEVQILTADRDLFQLLSPRISVLHPEGHRITPEWLWEKYGLRPEQWVDFRALAGDPSDNIPGVKGIGEKTALKLLKEWGSLENLLKNLDQVKPESVREKILAHLEDLKLSRELSRVRTDLPLEVDFRRRREPDWEGLKAFLERLEFGSLLHEFGLLESPLLAEEAPWPPPEGAFLGYRLSRPEPMWAELLALAASAQGRVYRAEDPHGALRGLFEVRGLLAKDLAVVALREGLDLPPTDDPMLLAYLLDPSNTTPEGVARRYGGEWTEDAAKRALLAERLHENLLGRLQGEERLLWLYEEVEKPLSRVLAHMEATGVKLDVAYLEALSLEVAAHMRRLEEEVFRLAGHSFRLNSRDQLERVLFDELGLPPIGKTEKTGKRSTSAAVLEALREVHPIVDKILQYRELAKLKGTYIDRLPALVHPKTGRLHTRFNQTATATGRLSSSDPNLQNIPVRTPLGQKIRRAFVAEEGWRLVALDYSQIELRVLAHLSGDENLIRVFQEGKDIHTQTASWMFGLSAEAIDPLMRRAAKTINFGVLYGMSAFRLSQELGIPYEEAAAFIQKYFQSYPKVKAWIEKTLEEGRTRGYVETLFGRRRYVPDLNARVKGKREAAERMAFNMPVQGTAADLMKLAMVRLFPQLREVGARMLLQVHDELLLEAPKERAEEVAALAKEVMEGVWPLAVPLEVEVGIGEDWLAAKG

SEQ ID NO: 3175 - DNA, 2529 bp, synthetic construct
  misc_feature 1..2529: note = Variant of DNA polymerase I from Thermus sp. strain 2.9
  source 1..2529: mol_type = other DNA
atgcaccatcatcatcatcatggcggtagcggcgtgttaccggtgttcgagcctaaaggtcgcgtgcttctggttgatggccatcatctcgcgtatcgtaacttctttgccctgaaaggattaaccaccagcagcggcgagccggtacagggtgtctacggctttgcaaagtcgctcctgaaagctctgaaagaagacggtgatgtggtgattgttgtctttgatgcgaaagcgccaagttttcgccacgaagcgtacgaagcttacaaagccgggcgtgctccaacgccggaagactttcctcgccaattggcgcttatgaaggaattagtggatttgcttggcctcgaacgcttggaagttcccggtttcgaggcagacgacgtattagcgactctcgcaaagaaagccgaacgtgagggctatgaagtccagatcttgacagcagatcgcgatcttttccagcttttatctccgcgcatctcggtgttacacccggaagggcatcgtatcaccccggaatggctctgggagaaatatggtttgcgtcccgaacaatgggtggattttcgcgccttagcaggcgatccgagcgacaatattccgggagttaaaggtatcggcgagaagacggcgctcaagctccttaaagaatgggggtcgttggagaacttgcttaagaatttagatcaggtcaaaccagagtcagtgcgtgagaagattcttgctcacctcgaagacctcaaattaagccgcgaattgtcccgtgtacgcaccgatttgccgctcgaagttgatttccgccgccgccgcgaacctgactgggagggtcttaaagcgtttttagagcgtcttgaatttggttcgctcttgcatgaattcggccttttagaaagcccgttaccagccgaagaagcaccttggccaccgcccgagggcgcgtttttaggttaccgtttgagtcgcccggaaccgatgtgggccgaattactggctcttgcagcgtctgcccagggacgtgtgtatcgcgcggaagaccctcatggtgcgctccgcggcctcttcgaagtccgtggactccttgccaaagacttagctgttgttgcattgcgcgaaggtcttgatttacctccgactgatgatccaatgcttcttgcgtacctcttggacccgtcaaacacgacgcccgaaggcgtagcccgtcgttacggcggcgagtggaccgaagatgcagcgaaacgcgcgttattggccgaacgtttgcacgccaatttattaggacgtttgcaaggcgaggaacgtctcctctggctttacgaagaagtggagaaaccattgagtcgcgtgctcgcgcatatggaagctaccggtgtcaaattagacgtggcgtatttggaggcactcagccttgaagttgctgcccacatgcgccgcttggaggaagaagtattccgtttagcaggccgttcctttcgccttaattctcgcgatcagttagaacgtgtgttgttcgatgaacttggtctccctcctatcggcaagacagagaagaccggtaaacgtagcacttcagcggcggttttagaagctcttcgcgaagtccatcccattgtggacaagatcttgcagtaccgcgaactcgcgaaattgaaaggcacctatattgaccgtcttccggcattagtccacccgaaaacgggacgcctccatacccgcttcaaccaaacagccacggcgaccggtcgtttgtcctcctctgatccaaaccttcagaatattccagtacgtaccccattgggccagaagatccgccgtgcgtttgtagctgaggagggttggcgtttagtggccctcgattatagccaaattgaattacgtgtccttgcccatctttctggcgatgagaacctcatccgcgtgtttcaggaaggcaaagacattcacactcaaacggcaagctggatgtttggattatcagctgaagcgatcgatcctttgatgcgtcgtgcagcgaagaccatcaatttcggtgttctctacggtatgagtgcctttcgtttgtcgcaggaattaggcattccctatgaagaagctgcggcgttcattcagaaatactttcaaagctatcccaaagttaaagcatggatcgagaagactctcgaagaaggccgcacacgtggttacgtagagaccttatttggacgtcgccgctatgttcccgatttaaacgctcgcgtgaaaggcaagcgtgaagccgccgaacgcatggcgttcaacatgcctgtacagggcacggcagctgacctcatgaaacttgcaatggtgcgcctttttccacaattgcgtgaagttggtgcccgcatgctcttgcaggtccacgatgaactcttgttagaagcgccaaaagagcgtgcggaagaggtggcagccctcgcgaaagaagttatggaaggcgtgtggcccttagcggtgcctcttgaagtcgaagttggtattggcgaggattggctggctgccaaaggataatga

SEQ ID NO: 3176 - protein, 841 aa, synthetic construct
  REGION 1..841: note = Variant of DNA polymerase I from Thermus sp. strain 2.9
MHHHHHHGGSGVLPVFEPKGRVLLVDGHHLAYRNFFALKGLTTSSGEPVQGVYGFAKSLLKALKEDGDVVIVVFDAKAPSFRHEAYEAYKAGRAPTPEDFPRQLALMKELVDLLGLERLEVPGFEADDVLATLAKKAEREGYEVQILTADRDLFQLLSPRISVLHPEGHRITPEWLWEKYGLRPEQWVDFRALAGDPSDNIPGVKGIGEKTALKLLKEWGSLENLLKNLDQVKPESVREKILAHLEDLKLSRELSRVRTDLPLEVDFRRRREPDWEGLKAFLERLEFGSLLHEFGLLESPLPAEEAPWPPPEGAFLGYRLSRPEPMWAELLALAASAQGRVYRAEDPHGALRGLFEVRGLLAKDLAVVALREGLDLPPTDDPMLLAYLLDPSNTTPEGVARRYGGEWTEDAAKRALLAERLHANLLGRLQGEERLLWLYEEVEKPLSRVLAHMEATGVKLDVAYLEALSLEVAAHMRRLEEEVFRLAGRSFRLNSRDQLERVLFDELGLPPIGKTEKTGKRSTSAAVLEALREVHPIVDKILQYRELAKLKGTYIDRLPALVHPKTGRLHTRFNQTATATGRLSSSDPNLQNIPVRTPLGQKIRRAFVAEEGWRLVALDYSQIELRVLAHLSGDENLIRVFQEGKDIHTQTASWMFGLSAEAIDPLMRRAAKTINFGVLYGMSAFRLSQELGIPYEEAAAFIQKYFQSYPKVKAWIEKTLEEGRTRGYVETLFGRRRYVPDLNARVKGKREAAERMAFNMPVQGTAADLMKLAMVRLFPQLREVGARMLLQVHDELLLEAPKERAEEVAALAKEVMEGVWPLAVPLEVEVGIGEDWLAAKG

SEQ ID NO: 3177 - DNA, 2529 bp, synthetic construct
  misc_feature 1..2529: note = Variant of DNA polymerase I from Thermus sp. strain 2.9
  source 1..2529: mol_type = other DNA
atgcaccatcatcatcatcatggcggtagcggcgtgttaccggtgttcgagcctaaaggtcgcgtgcttctggttgatggccatcatctcgcgtatcgtaacttctttgccctgaaaggattaaccaccagcagcggcgagccggtacagggtgtctacggctttgcaaagtcgctcctgaaagctctgaaagaagacggtgatgtggtgattgttgtctttgatgcgaaagcgccaagttttcgccacgaagcgtacgaagcttacaaagccgggcgtgctccaacgccggaagactttcctcgccaattggcgcttatgaaggaattagtggatttgcttggcctcgaacgcttggaagttcccggtttcgaggcagacgacgtattagcgactctcgcaaagaaagccgaacgtgagggctatgaagtccagatcttgacagcagatcgcgatcttttccagcttttatctccgcgcatctcggtgttacacccggaagggcatcgtatcaccccggaatggctctgggagaaatatggtttgcgtcccgaacaatgggtggattttcgcgccttagcaggcgatccgagcgacaatattccgggagttaaaggtatcggcgagaagacggcgctcaagctccttaaagaatgggggtcgttggagaacttgcttaagaatttagatcaggtcaaaccagagtcagtgcgtgagaagattcttgctcacctcgaagacctcaaattaagccgcgaattgtcccgtgtacgcaccgatttgccgctcgaagttgatttccagcgccgccgcgaacctgactgggagggtcttaaagcgtttttagagcgtcttgaatttggttcgctcttgcatgaattcggccttttagaaagcccgttaccagccgaagaagcaccttggccaccgcccgaaggcgcgtttttaggttaccgtttgagtcgcccggaaccgatgtgggccgaattactggctcttgcagcgtctgcccagggacgtgtgtatcgcgcggaagaccctcatggtgcgctccgcggcctcttcgaagtccgtggactccttgccaaagacttagctgttgttgcattgcgcgaaggtcttgatttacctccgactgatgatccaatgcttcttgcgtacctcttggacccgtcaaacacgacgcccgaaggcgtagcccgtcgttacggcggcgagtggaccgaagatgcagcgaaacgcgcgttattggccgaacgtttgcacgccaatttattaggacgtttgcaaggcgaggaacgtctcctctggctttacgaagaagtggagaaaccattgagtcgcgtgctcgcgcatatggaagctaccggtgtcaaattagacgtggcgtatttggaggctctcagccttgaagttgctgcccacatgcgccgcttggaggaagaagtattccgtttagcaggccattcctttcgccttaattctcgcgatcagttagaacgtgtgttgttcgatgaacttggtctccctcctatcggcaagacagagaagaccggtaaacgtagcacttcacgcgcggttttagaagctcttcgcgaagtccatcccattgtggacaagatcttgcagtaccgcgaactcgcgaaattgaaaggcacctatattgaccgtcttccggcattagtccacccgaaaacgggacgcctccatacccgcttcaaccaaacagccacggcgaccggtcgtttgtcctcctctgatccaaaccttcagaatattccagtacgtaccccattgggccagaagatccgccgcgcgtttgtagctgaggagggttggcgtttagtggccctcgattatagccaaattgaattacgtgtccttgcccatctttctggcgatgagaacctcatccgcgtgtttcaggaaggcaaagacattcacactcaaacggcaagctggatgtttggattatcagctgaagcgatcgatcctttgatgcgtcgtgcagcgaagaccatcaatttcggtgttctctacggtatgagtgcctttcgtttgtcgcaggaattaggcattccctatgaagaagctgcggcgttcattcagaaatactttcaaagctatcccaaagttaaagcatggatcgagaagactctcgaagaaggccgcacacgtggttacgtagagaccttatttggacgtcgccgctatgttcccgatttaaacgctcgcgtgaaaggcaagcgtgaagccgccgaacgcatggcgttcaacatgcctgtacagggcacggcagctgacctcatgaaacttgcaatggtgcgcctttttccacaattgcgtgaagttggtgcccgcatgctcttgcaggtccacgatgaactcttgttagaagcgccaaaagagcgtgcggaagaggtggcagccctcgcgaaagaagttatggaaggcgtgtggcccttagcggtgcctcttgaagtcgaagttggtattggcgaggattggctggctgccaaaggataatga

SEQ ID NO: 3178 - protein, 841 aa, synthetic construct
  REGION 1..841: note = Variant of DNA polymerase I from Thermus sp. strain 2.9
MHHHHHHGGSGVLPVFEPKGRVLLVDGHHLAYRNFFALKGLTTSSGEPVQGVYGFAKSLLKALKEDGDVVIVVFDAKAPSFRHEAYEAYKAGRAPTPEDFPRQLALMKELVDLLGLERLEVPGFEADDVLATLAKKAEREGYEVQILTADRDLFQLLSPRISVLHPEGHRITPEWLWEKYGLRPEQWVDFRALAGDPSDNIPGVKGIGEKTALKLLKEWGSLENLLKNLDQVKPESVREKILAHLEDLKLSRELSRVRTDLPLEVDFQRRREPDWEGLKAFLERLEFGSLLHEFGLLESPLPAEEAPWPPPEGAFLGYRLSRPEPMWAELLALAASAQGRVYRAEDPHGALRGLFEVRGLLAKDLAVVALREGLDLPPTDDPMLLAYLLDPSNTTPEGVARRYGGEWTEDAAKRALLAERLHANLLGRLQGEERLLWLYEEVEKPLSRVLAHMEATGVKLDVAYLEALSLEVAAHMRRLEEEVFRLAGHSFRLNSRDQLERVLFDELGLPPIGKTEKTGKRSTSRAVLEALREVHPIVDKILQYRELAKLKGTYIDRLPALVHPKTGRLHTRFNQTATATGRLSSSDPNLQNIPVRTPLGQKIRRAFVAEEGWRLVALDYSQIELRVLAHLSGDENLIRVFQEGKDIHTQTASWMFGLSAEAIDPLMRRAAKTINFGVLYGMSAFRLSQELGIPYEEAAAFIQKYFQSYPKVKAWIEKTLEEGRTRGYVETLFGRRRYVPDLNARVKGKREAAERMAFNMPVQGTAADLMKLAMVRLFPQLREVGARMLLQVHDELLLEAPKERAEEVAALAKEVMEGVWPLAVPLEVEVGIGEDWLAAKG

SEQ ID NO: 3179 - DNA, 2529 bp, synthetic construct
  misc_feature 1..2529: note = Variant of DNA polymerase I from Thermus sp. strain 2.9
  source 1..2529: mol_type = other DNA
atgcaccatcatcatcatcatggcggtagcggcgtgttaccggtgttcgagcctaaaggtcgcgtgcttctggttgatggccatcatctcgcgtatcgtaacttctttgccctgaaaggattaaccaccagcagcggcgagccggtacagggtgtctacggctttgcaaagtcgctcctgaaagctctgaaagaagacggtgatgtggtgattgttgtctttgatgcgaaagcgccaagttttcgccacgaagcgtacgaagcttacaaagccgggcgtgctccaacgccggaagactttcctcgccaattggcgcttatgaaggaattagtggatttgcttggcctcgaacgcttggaagttcccggtttcgaggcagacgacgtattagcgactctcgcaaagaaagccgaacgtgagggctatgaagtccagatcttgacagcagatcgcgatcttttccagcttttatctccgcgcatctcggtgttacacccggaagggcatcgtatcaccccggaatggctctgggagaaatatggtttgcgtcccgaacaatgggtggattttcgcgccttagcaggcgatccgagcgacaatattccgggagttaaaggtatcggcgagaagacggcgctcaagctccttaaagaatgggggtcgttggagaacttgcttaagaatttagatcaggtcaaaccagagtcagtgcgtgagaagattcttgctcacctcgaagacctcaaattaagccgcgaattgtcccgtgtacgcaccgatttgccgctcgaagttgatttccgccgccgccgcgaacctgactgggagggtcttaaagcgtttttagagcgtcttgaatttggttcgctcttgcatgaattcggccttttagaaagcccgttaccagccgaagaagcaccttggccaccgcccgagggcgcgtttttaggttaccgtttgagtcgcccggaaccgatgtgggccgaattactggctcttgcagcgtctgcccagggacgtgtgtatcgcgcggaagaccctcatggtgcgctccgcggcctcttcgaagtccgtggactccttgccaaagacttagctgttgttgcattgcgcgaaggtcttgatttacctccgactgatgatccaatgcttcttgcgtacctcttggacccgtcaaacacgacgcccgaaggcgtagcccgtcgttacggcggcgagtggaccgaagatgcagcgaaacgcgcgttattggccgaacgtttgcacgccaatttattaggacgtttgcaaggcgaggaacgtctcctctggctttacgaagaagtggagaaaccattgagtcgcgtgctcgcgcatatggaagctaccggtgtcaaattagacgtggcgtatttggaggcactcagccttgaagttgctgcccacatgcgccgcttggaggaagaagtattccgtttagcaggccattcctttcgccttaattctcgcgatcagttagaacgtgtgttgttcgatgaacttggtctccctcctatcggcaagacagagaagaccggtaaacgtagcacttcagcggcggttttagaagctcttcgcgaagtccatcccattgtggacaagatcttggtttaccgcgaactcgcgaaattgaaaggcacctatattgaccgtcttccggcattagtccacccgaaaacgggacgcctccatacccgcttcaaccaaacagccacggcgaccggtcgtttgtcctcctctgatccaaaccttcagaatattccagtacgtaccccattgggccagaagatccgccgtgcgtttgtagctgaggagggttggcgtttagtggccctcgattatagccaaattgaattacgtgtccttgcccatctttctggcgatgagaacctcatccgcgtgtttcaggaaggcaaagacattcacactcaaacggcaagctggatgtttggattatcagctgaagcgatcgatcctttgatgcgtcgtgcagcgaagaccatcaatttcggtgttctctacggtatgagtgcctttcgtttgtcgcaggaattaggcattccctatgaagaagcttcggcgttcattcagaaatactttcaaagctatcccaaagttaaagcatggatcgagaagactctcgaagaaggccgcacacgtggttacgtagagaccttatttggacgtcgccgctatgttcccgatttaaacgctcgcgtgaaaggcaagcgtgaagccgccgaacgcatggcgttcaacatgcctgtacagggcacggcagctgacctcatgaaacttgcaatggtgcgcctttttccacaattgcgtgaagttggtgcccgcatgctcttgcaggtccacgatgaactcttgttagaagcgccaaaagagcgtgcggaagaggtggcagccctcgcgaaaaccgttatggaaggcgtgtggcccttagcggtgcctcttgaagtcgaagttggtattggcgaggattggctggctgccaaaggataatga

SEQ ID NO: 3180 - protein, 841 aa, synthetic construct
  REGION 1..841: note = Variant of DNA polymerase I from Thermus sp. strain 2.9
MHHHHHHGGSGVLPVFEPKGRVLLVDGHHLAYRNFFALKGLTTSSGEPVQGVYGFAKSLLKALKEDGDVVIVVFDAKAPSFRHEAYEAYKAGRAPTPEDFPRQLALMKELVDLLGLERLEVPGFEADDVLATLAKKAEREGYEVQILTADRDLFQLLSPRISVLHPEGHRITPEWLWEKYGLRPEQWVDFRALAGDPSDNIPGVKGIGEKTALKLLKEWGSLENLLKNLDQVKPESVREKILAHLEDLKLSRELSRVRTDLPLEVDFRRRREPDWEGLKAFLERLEFGSLLHEFGLLESPLPAEEAPWPPPEGAFLGYRLSRPEPMWAELLALAASAQGRVYRAEDPHGALRGLFEVRGLLAKDLAVVALREGLDLPPTDDPMLLAYLLDPSNTTPEGVARRYGGEWTEDAAKRALLAERLHANLLGRLQGEERLLWLYEEVEKPLSRVLAHMEATGVKLDVAYLEALSLEVAAHMRRLEEEVFRLAGHSFRLNSRDQLERVLFDELGLPPIGKTEKTGKRSTSAAVLEALREVHPIVDKILVYRELAKLKGTYIDRLPALVHPKTGRLHTRFNQTATATGRLSSSDPNLQNIPVRTPLGQKIRRAFVAEEGWRLVALDYSQIELRVLAHLSGDENLIRVFQEGKDIHTQTASWMFGLSAEAIDPLMRRAAKTINFGVLYGMSAFRLSQELGIPYEEASAFIQKYFQSYPKVKAWIEKTLEEGRTRGYVETLFGRRRYVPDLNARVKGKREAAERMAFNMPVQGTAADLMKLAMVRLFPQLREVGARMLLQVHDELLLEAPKERAEEVAALAKTVMEGVWPLAVPLEVEVGIGEDWLAAKG

SEQ ID NO: 3181 - DNA, 2529 bp, synthetic construct
  misc_feature 1..2529: note = Variant of DNA polymerase I from Thermus sp. strain 2.9
  source 1..2529: mol_type = other DNA
atgcaccatcatcatcatcatggcggtagcggcgtgttaccggtgttcgagcctaaaggtcgcgtgcttctggttgatggccatcatctcgcgtatcgtaacttctttgccctgaaaggattaaccaccagcagcggcgagccggtacagggtgtctacggctttgcaaagtcgctcctgaaagctctgaaagaagacggtgatgtggtgattgttgtctttgatgcgaaagcgccaagttttcgccacgaagcgtacgaagcttacaaagccgggcgtgctccaacgccggaagactttcctcgccaattggcgcttatgaaggaattagtggatttgcttggcctcgaacgcttggaagttcccggtttcgaggcagacgacgtattagcgactctcgcaaagaaagccgaacgtgagggctatgaagtccagatcttgacagcagatcgcgatcttttccagcttttatctccgcgcatctcggtgttacacccggaagggcatcgtatcaccccggaatggctctgggagaaatatggtttgcgtcccgaacaatgggtggattttcgcgccttagcaggcgatccgagcgacaatattccgggagttaaaggtatcggcgagaagacggcgctcaagctccttaaagaatgggggtcgttggagaacttgcttaagaatttagatcaggtcaaaccagagtcagtgcgtgagaagattcttgctcacctcgaagacctcaaattaagccgcgaattgtcccgtgtacgcaccgatttgccgctcgaagttgatttccgtcgccgccgcgaacctgactgggagggtcttaaagcgtttttagagcgtcttgaatttggttcgctcttgcatgaattcggccttttagaaagcccgttaccagccgaagaagcaccttggccaccgcccgagggcgcgtttttaggttaccgtttgagtcgcccggaaccgatgtgggccgaattactggctcttgcagcgtctgcccagggacgtgtgtatcgcgcggaagaccctcatggtgcgctccgcggcctcttcgaagtccgtggactccttgccaaagacttagctgttgttgcattgcgcgaaggtcttgatttacctccgactgatgatccaatgcttcttgcgtacctcttggacccgtcaaacacgacgcccgaaggcgtagcccgtcgttacggcggcgagtggaccgaagatgcagcgaaacgcgcgttattggccgaacgtttgcacgccaatttattaggacgtttgcaaggcgaggaacgtctcctctggctttacgaagaagtggagaaaccattgagtcgcgtgctcgcgcatatggaagctaccggtgtcaaattagacgtggcgtatttggaggctctcagccttgaagttgctgcccacatgcgccgcttggaggaagaagtattccgtttagcaggccattcctttcgccttaattctcgcgatcagttagaacgtgtgttgttcgatgaacttggtctccctcctatcggcaagacagagaagaccggtaaacgtagcacttcagcggcggttttagaagctcttcgcgaagtccatcccattgtggacaagatcttgcagtaccgcgaactcgcgaaattgaaaggcacctatattgaccgtcttccggcattagtccacccgaaaacgggacgcctccatacccgcttcaaccaaacagccacggcgaccggtcgtttgtcctcctctgatccaaaccttcagaatattccagtacgtaccccattgggccagaagatccgccgtgcgtttgtagctgaggagggttggcgtttagtggccctcgattatagccaaattgaattacgtgtccttgcccatctttctggcgatgagaacctcatccgcgtgtttcaggaaggcaaagacattcacactcaaacggcaagctggatgtttggattatcagctgaagcgatcgatcctttgatgcgtcgtgcagcgaagaccatcaatttcggtgttctctacggtatgagtgcctttcgtttgtcgcaggaattaggcattccctatgaagaagctgcggcgttcaagcagaaatactttcaaagctatcccaaagttaaagcatggatcgagaagactctcgaagaaggccgcacacgtggttacgtagagaccttatttggacgtcgccgctatgttcccgatttaaacgctcgcgtgaaaggcaagcgtgaagccgccgaacgcatggcgttcaacatgcctgtacagggcacggcagctgacctcatgaaacttgcaatggtgcgcctttttccacaattgcgtgaagttggtgcccgcatgctcttgcaggtccacgatgaactcttgttagaagcgccaaaagagcgtgcggaagaggtggcagccctcgcgaaagaagttatggaaggcgtgtggcccttagcggtgcctcttgaagtcgaagttggtattggcgaggattggctggctgccaaaggataatga

SEQ ID NO: 3182 - protein, 841 aa, synthetic construct
  REGION 1..841: note = Variant of DNA polymerase I from Thermus sp. strain 2.9
MHHHHHHGGSGVLPVFEPKGRVLLVDGHHLAYRNFFALKGLTTSSGEPVQGVYGFAKSLLKALKEDGDVVIVVFDAKAPSFRHEAYEAYKAGRAPTPEDFPRQLALMKELVDLLGLERLEVPGFEADDVLATLAKKAEREGYEVQILTADRDLFQLLSPRISVLHPEGHRITPEWLWEKYGLRPEQWVDFRALAGDPSDNIPGVKGIGEKTALKLLKEWGSLENLLKNLDQVKPESVREKILAHLEDLKLSRELSRVRTDLPLEVDFRRRREPDWEGLKAFLERLEFGSLLHEFGLLESPLPAEEAPWPPPEGAFLGYRLSRPEPMWAELLALAASAQGRVYRAEDPHGALRGLFEVRGLLAKDLAVVALREGLDLPPTDDPMLLAYLLDPSNTTPEGVARRYGGEWTEDAAKRALLAERLHANLLGRLQGEERLLWLYEEVEKPLSRVLAHMEATGVKLDVAYLEALSLEVAAHMRRLEEEVFRLAGHSFRLNSRDQLERVLFDELGLPPIGKTEKTGKRSTSAAVLEALREVHPIVDKILQYRELAKLKGTYIDRLPALVHPKTGRLHTRFNQTATATGRLSSSDPNLQNIPVRTPLGQKIRRAFVAEEGWRLVALDYSQIELRVLAHLSGDENLIRVFQEGKDIHTQTASWMFGLSAEAIDPLMRRAAKTINFGVLYGMSAFRLSQELGIPYEEAAAFKQKYFQSYPKVKAWIEKTLEEGRTRGYVETLFGRRRYVPDLNARVKGKREAAERMAFNMPVQGTAADLMKLAMVRLFPQLREVGARMLLQVHDELLLEAPKERAEEVAALAKEVMEGVWPLAVPLEVEVGIGEDWLAAKG

SEQ ID NO: 3183 - DNA, 2529 bp, synthetic construct
  misc_feature 1..2529: note = Variant of DNA polymerase I from Thermus sp. strain 2.9
  source 1..2529: mol_type = other DNA
atgcaccatcatcatcatcatggcggtagcggcgtgttaccggtgttcgagcctaaaggtcgcgtgcttctggttgatggccatcatctcgcgtatcgtaacttctttgccctgaaaggattaaccaccagcagcggcgagccggtacagggtgtctacggctttgcaaagtcgctcctgaaagctctgaaagaagacggtgatgtggtgattgttgtctttgatgcgaaagcgccaagttttcgccacgaagcgtacgaagcttacaaagccgggcgtgctccaacgccggaagactttcctcgccaattggcgcttatgaaggaattagtggatttgcttggcctcgaacgcttggaagttcccggtttcgaggcagacgacgtattagcgactctcgcaaagaaagccgaacgtgagggctatgaagtccagatcttgacagcagatcgcgatcttttccagcttttatctccgcgcatctcggtgttacacccggaagggcatcgtatcaccccggaatggctctgggagaaatatggtttgcgtcccgaacaatgggtggattttcgcgccttagcaggcgatccgagcgacaatattccgggagttaaaggtatcggcgagaagacggcgctcaagctccttaaagaatgggggtcgttggagaacttgcttaagaatttagatcaggtcaaaccagagtcagtgcgtgagaagattcttgctcacctcgaagacctcaaattaagccgcgaattgtcccgtgtacgcaccgatttgccgctcgaagttgatttccgtcgccgccgcgaacctgactgggagggtcttaaagcgtttttagagcgtcttgaatttggttcgctcttgcatgaattcggccttttagaaagcccgttaccagccgaagaagcaccttggccaccgcccgagggcgcgtttttaggttaccgtttgagtcgcccggaaccgatgtgggccgaattactggctcttgcagcgtctgcccagggacgtgtgtatcgcgcggaagaccctcatggtgcgctccgcggcctcttcgaagtccgtggactccttgccaaagacttagctgttgttgcattgcgcgaaggtcttgatttacctccgactgatgatccaatgcttcttgcgtacctcttggacccgtcaaacacgacgcccgaaggcgtagcccgtcgttacggcggcgagtggaccgaagatgcagcgaaacgcgcgttattggccgaacgtttgcacgccaatttattaggacgtttgcaaggcgaggaacgtctcctctggctttacgaagaagtggagaaaccattgagtcgcgtgctcgcgcatatggaagctaccggtgtcaaattagacgtggcgtatttggaggctctcagccttgaagttgctgcccacatgcgccgcttggaggaagaagtattccgtttagcaggccattcctttcgccttaattctcgcgatcagttagaacgtgtgttgttcgatgaacttggtctccctcctatcggcaagacagagaagaccggtaaacgtagcacttcagcggcggttttagaagctcttcgcgaagtccatcccattgtggacaagatccgtcagtaccgcgaactcgcgaaattgaaaggcacctatattgaccgtcttccggcattagtccacccgaaaacgggacgcctccatacccgcttcaaccaaacagccacggcgaccggtcgtttgtcctcctctgatccaaaccttcagaatattccagtacgtaccccattgggccagaagatccgccgtgcgtttgtagctgaggagggttggcgtttagtggccctcgattatagccaaattgaattacgtgtccttgcccatctttctggcgatgagaacctcatccgcgtgtttcaggaaggcaaagacattcacactcaaacggcaagctggatgtttggattatcagctgaagcgatcgatcctttgatgcgtcgtgcagcgaagaccatcaatttcggtgttctctacggtatgagtgcctttcgtttgtcgcaggaattaggcattccctatgaagaagctgcggcgttcattcagaaatactttcaaagctatcccaaagttaaagcatggatcgagaagactctcgaagaaggccgcacacgtggttacgtagagaccttatttggacgtcgccgctatgttcccgatttaaacgctcgcgtgaaaggcaagcgtgaagccgccgaacgcatggcgttcaacatgcctgtacagggcacggcagctgacctcatgaaacttgcaatggtgcgcctttttccacaattgcgtgaagttggtgcccgcatgctcttgcaggtccacgatgaactcttgttagaagcgccaaaagagcgtgcggaagaggtggcagccctcgcgaaagaagttatggaaggcgtgtggcccttagcggtgcctcttgaagtcgaagttggtattggcgaggattggctggctgccaaaggataatga

SEQ ID NO: 3184 - protein, 841 aa, synthetic construct
  REGION 1..841: note = Variant of DNA polymerase I from Thermus sp. strain 2.9
MHHHHHHGGSGVLPVFEPKGRVLLVDGHHLAYRNFFALKGLTTSSGEPVQGVYGFAKSLLKALKEDGDVVIVVFDAKAPSFRHEAYEAYKAGRAPTPEDFPRQLALMKELVDLLGLERLEVPGFEADDVLATLAKKAEREGYEVQILTADRDLFQLLSPRISVLHPEGHRITPEWLWEKYGLRPEQWVDFRALAGDPSDNIPGVKGIGEKTALKLLKEWGSLENLLKNLDQVKPESVREKILAHLEDLKLSRELSRVRTDLPLEVDFRRRREPDWEGLKAFLERLEFGSLLHEFGLLESPLPAEEAPWPPPEGAFLGYRLSRPEPMWAELLALAASAQGRVYRAEDPHGALRGLFEVRGLLAKDLAVVALREGLDLPPTDDPMLLAYLLDPSNTTPEGVARRYGGEWTEDAAKRALLAERLHANLLGRLQGEERLLWLYEEVEKPLSRVLAHMEATGVKLDVAYLEALSLEVAAHMRRLEEEVFRLAGHSFRLNSRDQLERVLFDELGLPPIGKTEKTGKRSTSAAVLEALREVHPIVDKIRQYRELAKLKGTYIDRLPALVHPKTGRLHTRFNQTATATGRLSSSDPNLQNIPVRTPLGQKIRRAFVAEEGWRLVALDYSQIELRVLAHLSGDENLIRVFQEGKDIHTQTASWMFGLSAEAIDPLMRRAAKTINFGVLYGMSAFRLSQELGIPYEEAAAFIQKYFQSYPKVKAWIEKTLEEGRTRGYVETLFGRRRYVPDLNARVKGKREAAERMAFNMPVQGTAADLMKLAMVRLFPQLREVGARMLLQVHDELLLEAPKERAEEVAALAKEVMEGVWPLAVPLEVEVGIGEDWLAAKG

SEQ ID NO: 3185 - DNA, 2529 bp, synthetic construct
  misc_feature 1..2529: note = Variant of DNA polymerase I from Thermus sp. strain 2.9
  source 1..2529: mol_type = other DNA
atgcaccatcatcatcatcatggcggtagcggcgtgttaccggtgttcgagcctaaaggtcgcgtgcttctggttgatggccatcatctcgcgtatcgtaacttctttgccctgaaaggattaaccaccagctcgggcgagccggtacagggtgtctacggctttgcaaagtcgctcctgaaagctctgaaagaagacggtgatgtggtgattgttgtctttgatgcgaaagcgccaagttttcgccacgaagcgtacgaagcttacaaagccgggcgtgctccaacgccggaagactttcctcgccaattggcgcttatgaaggaattagtggatttgcttggcctcgaacgcttggaagttcccggtttcgaggcagacgacgtattagcgactctcgcaaagaaagccgaacgtgagggctatgaagtccagatcttgacagcagatcgcgatcttttccagcttttatctccgcgcatctcggtgttacacccggaagggcatcgtatcaccccggaatggctctgggagaaatatggtttgcgtcccgaacaatgggtggattttcgcgccttagcaggcgatccgagcgacaatattccgggagttaaaggtatcggcgagaagacggcgctcaagctccttaaagaatgggggtcgttggagaacttgcttaagaatttagatcaggtcaaaccagagtcagtgcgtgagaagattcttgctcacctcgaagacctcaaattaagccgcgaattgtcccgtgtacgcaccgatttgccgctcgaagttgatttccagcgccgccgcgaacctgactgggagggtcttaaagcgtttttagagcgtcttgaatttggttcgctcttgcatgaattcggccttttagaaagcccgttaccagccgaagaagcaccttggccaccgcccgagggcgcgtttttaggttaccgtttgagtcgcccggaaccgatgtgggccgaattactggctcttgcagcgtctgcccagggaaccgtgtatcgcgcggaagaccctcatggtgcgctccgcggcctcttcgaagtccgtggactccttgccaaagacttagctgttgttgcattgcgcgaaggtcttgatttacctccgactgatgatccaatgcttcttgcgtacctcttggacccgtcaaacacgacgcccgaaggcgtagcccgtcgttacggcggcgagtggaccgaagatgcagcgaaacgcgcgttattggccgaacgtttgcacgaaaatttattaggacgtttgcaaggcgaggaacgtctcctctggctttacgaagaagtggagaaaccattgagtcgcgtgctcgcgcatatggaagctaccggtgtcaaattagacgtggcgtatttggaggctctcagccttgaagttgctgcccacatgcgccgcttggaggaagaagtattccgtttagcaggccattcctttcgccttaattctcgcgatcagttagaacgtgtgttgttcgatgaacttggtctccctcctatcggcaagacagagaagaccggtaaacgtagcacttcagcggcggttttagaagctcttcgcgaagtccatcccattgtggacaagatcttgcagtaccgcgaactcgcgaaattgaaaggcacctatattgaccgtcttccggcattagtccacccgaaaacgggacgcctccatacccgcttcaaccaaacagccacggcgaccggtcgtttgtcctcctctgatccaaaccttcagaatattccagtacgtaccccattgggccagaagatccgccgcgcgtttgtagctgaggagggttggcgtttagtggccctcgattatcgtcaaattgaattacgtgtccttgcccatctttctggcgatgagaacctcatccgcgtgtttcaggaaggcaaagacattcacactcaaacggcaagctggatgtttggattatcagctgaagcgatcgatcctttgatgcgtcgtgcagcgaagaccatcaatttcggtgttctctacggtatgagtgcctttcgtttgtcgcaggaattaggcattccctatgaagaagctgcggcgttcattcagaaatactttcaaagctatcccaaagttaaagcatggatcgagaagactctcgaagaaggccgcacacgtggttacgtagagaccttatttggacgtcgccgctatgttcccgatttaaacgctcgcgtgaaaggcaagcgtgaagccgccgaacgcatggcgttcaacatgcctgtacagggcacggcagctgacctcatgaaacttgcaatggtgcgcctttttccacaattgcgtgaagttggtgcccgcatgctcttgcaggtccacgatgaactcttgttagaagcgccaaaagagcgtgcggaagaggtggcagccctcgcgaaagaagttatggaaggcgtgtggcccttagcggtgcctcttgaagtcgaagttggtattggcgaggattggctggctgccaaaggataatga

SEQ ID NO: 3186 - protein, 841 aa, synthetic construct
  REGION 1..841: note = Variant of DNA polymerase I from Thermus sp. strain 2.9
MHHHHHHGGSGVLPVFEPKGRVLLVDGHHLAYRNFFALKGLTTSSGEPVQGVYGFAKSLLKALKEDGDVVIVVFDAKAPSFRHEAYEAYKAGRAPTPEDFPRQLALMKELVDLLGLERLEVPGFEADDVLATLAKKAEREGYEVQILTADRDLFQLLSPRISVLHPEGHRITPEWLWEKYGLRPEQWVDFRALAGDPSDNIPGVKGIGEKTALKLLKEWGSLENLLKNLDQVKPESVREKILAHLEDLKLSRELSRVRTDLPLEVDFQRRREPDWEGLKAFLERLEFGSLLHEFGLLESPLPAEEAPWPPPEGAFLGYRLSRPEPMWAELLALAASAQGTVYRAEDPHGALRGLFEVRGLLAKDLAVVALREGLDLPPTDDPMLLAYLLDPSNTTPEGVARRYGGEWTEDAAKRALLAERLHENLLGRLQGEERLLWLYEEVEKPLSRVLAHMEATGVKLDVAYLEALSLEVAAHMRRLEEEVFRLAGHSFRLNSRDQLERVLFDELGLPPIGKTEKTGKRSTSAAVLEALREVHPIVDKILQYRELAKLKGTYIDRLPALVHPKTGRLHTRFNQTATATGRLSSSDPNLQNIPVRTPLGQKIRRAFVAEEGWRLVALDYRQIELRVLAHLSGDENLIRVFQEGKDIHTQTASWMFGLSAEAIDPLMRRAAKTINFGVLYGMSAFRLSQELGIPYEEAAAFIQKYFQSYPKVKAWIEKTLEEGRTRGYVETLFGRRRYVPDLNARVKGKREAAERMAFNMPVQGTAADLMKLAMVRLFPQLREVGARMLLQVHDELLLEAPKERAEEVAALAKEVMEGVWPLAVPLEVEVGIGEDWLAAKG

SEQ ID NO: 3187 - DNA, 2529 bp, synthetic construct
  misc_feature 1..2529: note = Variant of DNA polymerase I from Thermus sp. strain 2.9
  source 1..2529: mol_type = other DNA
atgcaccatcatcatcatcatggcggtagcggcgtgttaccggtgttcgagcctaaaggtcgcgtgcttctggttgatggccatcatctcgcgtatcgtaacttctttgccctgaaaggattaaccaccagcagcggcgagccggtacagggtgtctacggctttgcaaagtcgctcctgaaagctctgaaagaagacggtgatgtggtgattgttgtctttgatgcgaaagcgccaagttttcgccacgaagcgtacgaagcttacaaagccgggcgtgctccaacgccggaagactttcctcgccaattggcgcttatgaaggaattagtggatttgcttggcctcgaacgcttggaagttcccggtttcgaggcagacgacgtattagcgactctcgcaaagaaagccgaacgtgagggctatgaagtccagatcttgacagcagatcgcgatcttttccagcttttatctccgcgcatctcggtgttacacccggaagggcatcgtatcaccccggaatggctctgggagaaatatggtttgcgtcccgaacaatgggtggattttcgcgccttagcaggcgatccgagcgacaatattccgggagttaaaggtatcggcgagaagacggcgctcaagctccttaaagaatgggggtcgttggagaacttgcttaaaaatttagatcaggtcaaaccagagtcagtgcgtgagaagattcttgctcacctcgaagacctcaaattaagccgcgaattgtcccgtgtacgcaccgatttgccgctcgaagttgatttccgtcgccgccgcgaacctgactgggagggtcttaaagcgtttttagagcgtcttgaatttggttcgctcttgcatgaattcggccttttagaaagcccgttaccggccgaagaagcaccttggccaccgcccgagggcgcgtttttaggttaccgtttgagtcgcccggaaccgatgtgggccgaattactggctcttgcagcgtctgcccagggacgtgtgtatcgcgcggaagaccctcatggtgcgctccgcggcctcttcgaagtccgtggactccttgccaaagacttagctgttgttgcattgcgcgaaggtcttgatttacctccgactgatgatccaatgcttcttgcgtacctcttggacccgtcaaacacgacgcccgaaggcgtagcccgtcgttacggcggcgagtggaccgaagatgcagcgaaacgcgcgttattggccgaacgtttgcacgcaaatttattaggacgtttgcaaggcgaggaacgtctcctctggctttacgaagaagtggagaaaccattgagtcgcgtgctcgcgcatatggaagctaccggtgtcaaattagacgtggcgtatttggaggctctcagccttgaagttgctgcccacatgcgccgcttggaggaagaagtattccgtttagcaggccactcctttcgccttaactctcgcgatcagttagaacgtgtgttgttcgatgaacttggtctccctcctatcggcaagacagagaagaccggtaaacgtagcacttcagccgcggttttagaagctcttcgcgaagtccatcccattgtggacaagatcttgcaataccgcgaactcgcgaaattgaaaggcacctatattgaccgtcttccggcattagtccacccgaaaacgggacgcctccatacccgcttcaaccaaacagccacggcgaccggtcgtttgtcctcctctgatccaaaccttcagaatattccagtacgtaccccattgggccagaagatccgcaaagcgtttgtagctgaggagggttggcgtttagtggccctcgattatcgtcaaattgaattacgtgtccttgcccatctttctggcgatgagaacctcatccgcgtgtttcaggaaggcaaagacattcacactcaaacggcaagctggatgtttggattatcagctgaagcgatcgatcctttgatgcgtcgtgcagcgaagaccatcaatttcggtgttctctacggtatgagtgcctttcgtttgtcgcaggaattaggcattccctatcaggaagcttcggcgttcattcagaaatactttcaaagctatcccaaagttaaagcatggatcgagaagactctcgaagaaggccgcacacgtggttacgtagagaccttatttggacgtcgccgctatgttcccgatttaaacgctcgcgtgaaaggcaagcgtgaagccgccgaacgcatggcgttcaacatgcctgtacagggcacggcagctgacctcatgaaacttgcaatggtgcgcctttttccacaattgcgtgaagttggtgcccgcatgctcttgcaggtccacgatgaactcttgttagaagcgccaaaagagcgtgcggaagaggtggcagccctcgcgaaagaagttatggaaggcgtgtggcccttagcggtgcctcttgaagtcgaagttggtattggcgaggattggctggctgccaaaggataatga

SEQ ID NO: 3188 - protein, 841 aa, synthetic construct
  REGION 1..841: note = Variant of DNA polymerase I from Thermus sp. strain 2.9
MHHHHHHGGSGVLPVFEPKGRVLLVDGHHLAYRNFFALKGLTTSSGEPVQGVYGFAKSLLKALKEDGDVVIVVFDAKAPSFRHEAYEAYKAGRAPTPEDFPRQLALMKELVDLLGLERLEVPGFEADDVLATLAKKAEREGYEVQILTADRDLFQLLSPRISVLHPEGHRITPEWLWEKYGLRPEQWVDFRALAGDPSDNIPGVKGIGEKTALKLLKEWGSLENLLKNLDQVKPESVREKILAHLEDLKLSRELSRVRTDLPLEVDFRRRREPDWEGLKAFLERLEFGSLLHEFGLLESPLPAEEAPWPPPEGAFLGYRLSRPEPMWAELLALAASAQGRVYRAEDPHGALRGLFEVRGLLAKDLAVVALREGLDLPPTDDPMLLAYLLDPSNTTPEGVARRYGGEWTEDAAKRALLAERLHANLLGRLQGEERLLWLYEEVEKPLSRVLAHMEATGVKLDVAYLEALSLEVAAHMRRLEEEVFRLAGHSFRLNSRDQLERVLFDELGLPPIGKTEKTGKRSTSAAVLEALREVHPIVDKILQYRELAKLKGTYIDRLPALVHPKTGRLHTRFNQTATATGRLSSSDPNLQNIPVRTPLGQKIRKAFVAEEGWRLVALDYRQIELRVLAHLSGDENLIRVFQEGKDIHTQTASWMFGLSAEAIDPLMRRAAKTINFGVLYGMSAFRLSQELGIPYQEASAFIQKYFQSYPKVKAWIEKTLEEGRTRGYVETLFGRRRYVPDLNARVKGKREAAERMAFNMPVQGTAADLMKLAMVRLFPQLREVGARMLLQVHDELLLEAPKERAEEVAALAKEVMEGVWPLAVPLEVEVGIGEDWLAAKG

SEQ ID NO: 3189 - DNA, 2529 bp, synthetic construct
  misc_feature 1..2529: note = Variant of DNA polymerase I from Thermus sp. strain 2.9
  source 1..2529: mol_type = other DNA
atgcaccatcatcatcatcatggcggtagcggcgtgttaccggtgttcgagcctaaaggtcgcgtgcttctggttgatggccatcatctcgcgtatcgtaacttctttgccctgaaaggattaaccaccagctcgggcgagccggtacagggtgtctacggctttgcaaagtcgctcctgaaagctctgaaagaagacggtgatgtggtgattgttgtctttgatgcgaaagcgccaagttttcgccacgaagcgtacgaagcttacaaagccgggcgtgctccaacgccggaagactttcctcgccaattggcgcttatgaaggaattagtggatttgcttggcctcgaacgcttggaagttcccggtttcgaggcagacgacgtattagcgactctcgcaaagaaagccgaacgtgagggctatgaagtccagatcttgacagcagatcgcgatcttttccagcttttatctccgcgcatctcggtgttacacccggaagggcatcgtatcaccccggaatggctctgggagaaatatggtttgcgtcccgaacaatgggtggattttcgcgccttagcaggcgatccgagcgacaatattccgggagttaaaggtatcggcgagaagacggcgctcaagctccttaaagaatgggggtcgttggagaacttgcttgaaaatttagatcaggtcaaaccagagtcagtgcgtgagaagattcttgctcacctcgaagacctcaaattaagccgcgaattgtcccgtgtacgcaccgatttgccgctcgaagttgatttccgtcgccgccgcgaacctgactgggagggtcttaaagcgtttttagagcgtcttgaatttggttcgctcttgcatgaattcggccttttagaaagcccgttaccagccgaagaagcaccttggccaccgcccgaaggcgcgtttttaggttaccgtttgagtcgcccggaaccgatgtgggccgaattactggctcttgcagcgtctgcccagggacgcgtgtatcgcgcggaagaccctcatggtgcgctccgcggcctcttcgaagtccgtggactccttgccaaagacttagctgttgttgcattgcgcgaaggtcttgatttacctccgactgatgatccaatgcttcttgcgtacctcttggacccgtcaaacacgacgcccgaaggcgtagcccgtcgttacggcggcgagtggaccgaagatgcagcgaaacgcgcgttattggccgaacgtttgcacgccaatttattaggacgtttgcaaggcgaggaacgtctcctctggctttacgaagaagtggagaaaccattgagtcgcgtgctcgcgcatatggaagctaccggtgtcaaattagacgtggcgtatttggaggctctcagccttgaagttgctgcccacatgcgccgcttggaggaagaagtattccgtttagcaggccattcctttcgccttaattctcgcgatcagttagaacgtgtgttgttcgatgaacttggtctccctcctatcggcaagacagagaagaccggtaaacgtagcacttcagcggcggttttagaagctcttcgcgaagtccatcccattgtggacaagatcttgcagtaccgcgaactcgcgaaattgaaaggcacctatattgaccgtcttccggcattagtccacccgaaaacgggacgcctccatacccgcttcaaccaaacagccacggcgaccggtcgtttgtcctcctctgatccaaaccttcagaatattccagtacgtaccccattgggccagaagatccgcaaagcgtttgtagctgaggagggttggcgtttagtggccctcgattatagccaaattgaattacgtgtccttgcccatctttctggcgatgagaacctcatccgcgtgtttcaggaaggcaaagacattcacactcaaacggcaagctggatgtttggattaagcgctgaagcgatcgatcctttgatgcgtcgtgcagcgaagaccatcaatttcggtgttctctacggtatgagtgcctttcgtttgtcgcaggaattaggcattccctatgaggaagctgcggcgttcattcagaaatactttcaaagctatcccaaagttaaagcatggatcgagaagactctccgtgaaggccgcacacgtggttacgtagagaccttatttggacgtcgccgctatgttcccgatttaaacgctcgcgtgaaaggcaagcgtgaagccgccgaacgcatggcgttcaacatgcctgtacagggcacggcagctgacctcatgaaacttgcaatggtgcgcctttttccacaattgcgtgaagttggtgcccgcatgctcttgcaggtccacgatgaactcttgttagaagcgccaaaagagcgtgcggaagaggtggcagccctcgcgaaagaagttatggaaggcgtgtggcccttagcggtgcctcttgaagtcgaagttggtattggcgaggattggctggctgccaaaggataatga

SEQ ID NO: 3190 - protein, 841 aa, synthetic construct
  REGION 1..841: note = Variant of DNA polymerase I from Thermus sp. strain 2.9
MHHHHHHGGSGVLPVFEPKGRVLLVDGHHLAYRNFFALKGLTTSSGEPVQGVYGFAKSLLKALKEDGDVVIVVFDAKAPSFRHEAYEAYKAGRAPTPEDFPRQLALMKELVDLLGLERLEVPGFEADDVLATLAKKAEREGYEVQILTADRDLFQLLSPRISVLHPEGHRITPEWLWEKYGLRPEQWVDFRALAGDPSDNIPGVKGIGEKTALKLLKEWGSLENLLENLDQVKPESVREKILAHLEDLKLSRELSRVRTDLPLEVDFRRRREPDWEGLKAFLERLEFGSLLHEFGLLESPLPAEEAPWPPPEGAFLGYRLSRPEPMWAELLALAASAQGRVYRAEDPHGALRGLFEVRGLLAKDLAVVALREGLDLPPTDDPMLLAYLLDPSNTTPEGVARRYGGEWTEDAAKRALLAERLHANLLGRLQGEERLLWLYEEVEKPLSRVLAHMEATGVKLDVAYLEALSLEVAAHMRRLEEEVFRLAGHSFRLNSRDQLERVLFDELGLPPIGKTEKTGKRSTSAAVLEALREVHPIVDKILQYRELAKLKGTYIDRLPALVHPKTGRLHTRFNQTATATGRLSSSDPNLQNIPVRTPLGQKIRKAFVAEEGWRLVALDYSQIELRVLAHLSGDENLIRVFQEGKDIHTQTASWMFGLSAEAIDPLMRRAAKTINFGVLYGMSAFRLSQELGIPYEEAAAFIQKYFQSYPKVKAWIEKTLREGRTRGYVETLFGRRRYVPDLNARVKGKREAAERMAFNMPVQGTAADLMKLAMVRLFPQLREVGARMLLQVHDELLLEAPKERAEEVAALAKEVMEGVWPLAVPLEVEVGIGEDWLAAKG

SEQ ID NO: 3191 - DNA, 2529 bp, synthetic construct
  misc_feature 1..2529: note = Variant of DNA polymerase I from Thermus sp. strain 2.9
  source 1..2529: mol_type = other DNA
atgcaccatcatcatcatcatggcggtagcggcgtgttaccggtgttcgagcctaaaggtcgcgtgcttctggttgatggccatcatctcgcgtatcgtaacttctttgccctgaaaggattaaccaccagcagcggcgagccggtacagggtgtctacggctttgcaaagtcgctcctgaaagctctgaaagaagacggtgatgtggtgattgttgtctttgatgcgaaagcgccaagttttcgccacgaagcgtacgaagcttacaaagccgggcgtgctccaacgccggaagactttcctcgccaattggcgcttatgaaggaattagtggatttgcttggcctcgaacgcttggaagttcccggtttcgaggcagacgacgtattagcgactctcgcaaagaaagccgaacgtgagggctatgaagtccagatcttgacagcagatcgcgatcttttccagcttttatctccgcgcatctcggtgttacacccggaagggcatcgtatcaccccggaatggctctgggagaaatatggtttgcgtcccgaacaatgggtggattttcgcgccttagcaggcgatccgagcgacaatattccgggagttaaaggtatcggcgagaagacggcgctcaagctccttaaagaatgggggtcgttggagaacttgcttaagaatttagatcaggtcaaaccagagtcagtgcgtgagaagattcttgctcacctcgaagacctcaaattaagccgcgaattgtcccgtgtacgcaccgatttgccgctcgaagttgatttccgccgccgccgcgaacctgactgggagggtcttaaagcgtttttagagcgtcttgaatttggttcgctcttgcatgaattcggccttttagaaagcccgttaccagccgaagaagcaccttggccaccgcccgagggcgcgtttttaggttaccgtttgagtcgcccggaaccgatgtgggccgaattactggctcttgcagcgtctgcccagggacgtgtgtatcgcgcggaagaccctcatggtgcgctccgcggcctcttcgaagtccgtggactccttgccaaagacttagctgttgttgcattgcgcgaaggtcttgatttacctccgactgatgatccaatgcttcttgcgtacctcttggacccgtcaaacacgacgcccgaaggcgtagcccgtcgttacggcggcgagtggaccgaagatgcagcgaaacgcgcgttattggccgaacgtttgcacgccaatttattaggacgtttgcaaggcgaggaacgtctcctctggctttacgaagaagtggagaaaccattgagtcgcgtgctcgcgcatatggaagctaccggtgtcaaattagacgtggcgtatttggaggcactcagccttgaagttgctgcccacatgcgccgcttggaggaagaagtattccgtttagcaggccgttcctttcgccttaattctcgcgatcagttagaacgtgtgttgttcgatgaacttggtctccctcctatcggcaagacagagaagaccggtaaacgtagcacttcagcggcggttttagaagctcttcgcgaagtccatcccattgtggacaagatcttgcagtaccgcgaactcgcgaaattgaaaggcacctatattgaccgtcttccggcattagtccacccgaaaacgggacgcctccatacccgcttcaaccaaacagccacggcgaccggtcgtttgtcctcctctgatccaaaccttcagaatattccagtacgtaccccattgggccagaagatccgccgtgcgtttgtagctgaggagggttggcgtttagtggccctcgattatagccaaattgaattacgtgtccttgcccatctttctggcgatgagaacctcatccgcgtgtttcaggaaggcaaagacattcacactcaaacggcaagctggatgtttggattatcagctgaagcgatcgatcctttgatgcgtcgtgcagcgaagaccatcaatttcggtgttctctacggtatgagtgcctttcgtttgtcgcaggaattaggcattccctatgaagaagctcaggcgttcattcagaaatactttcaaagctatcccaaagttaaagcatggatcgagaagactctcgaagaaggccgcacacgtggttacgtagagaccttatttggacgtcgccgctatgttcccgatttaaacgctcgcgtgaaaggcaagcgtgaagccgccgaacgcatggcgttcaacatgcctgtacagggcacggcagctgacctcatgaaacttgcaatggtgcgcctttttccacaattgcgtgaagttggtgcccgcatgctcttgcaggtccacgatgaactcttgttagaagcgccaaaagagcgtgcggaagaggtggcagccctcgcgaaaaccgttatggaaggcgtgtggcccttagcggtgcctcttgaagtcgaagttggtattggcgaggattggctggctgccaaaggataatga

SEQ ID NO: 3192 - protein, 841 aa, synthetic construct
  REGION 1..841: note = Variant of DNA polymerase I from Thermus sp. strain 2.9
MHHHHHHGGSGVLPVFEPKGRVLLVDGHHLAYRNFFALKGLTTSSGEPVQGVYGFAKSLLKALKEDGDVVIVVFDAKAPSFRHEAYEAYKAGRAPTPEDFPRQLALMKELVDLLGLERLEVPGFEADDVLATLAKKAEREGYEVQILTADRDLFQLLSPRISVLHPEGHRITPEWLWEKYGLRPEQWVDFRALAGDPSDNIPGVKGIGEKTALKLLKEWGSLENLLKNLDQVKPESVREKILAHLEDLKLSRELSRVRTDLPLEVDFRRRREPDWEGLKAFLERLEFGSLLHEFGLLESPLPAEEAPWPPPEGAFLGYRLSRPEPMWAELLALAASAQGRVYRAEDPHGALRGLFEVRGLLAKDLAVVALREGLDLPPTDDPMLLAYLLDPSNTTPEGVARRYGGEWTEDAAKRALLAERLHANLLGRLQGEERLLWLYEEVEKPLSRVLAHMEATGVKLDVAYLEALSLEVAAHMRRLEEEVFRLAGRSFRLNSRDQLERVLFDELGLPPIGKTEKTGKRSTSAAVLEALREVHPIVDKILQYRELAKLKGTYIDRLPALVHPKTGRLHTRFNQTATATGRLSSSDPNLQNIPVRTPLGQKIRRAFVAEEGWRLVALDYSQIELRVLAHLSGDENLIRVFQEGKDIHTQTASWMFGLSAEAIDPLMRRAAKTINFGVLYGMSAFRLSQELGIPYEEAQAFIQKYFQSYPKVKAWIEKTLEEGRTRGYVETLFGRRRYVPDLNARVKGKREAAERMAFNMPVQGTAADLMKLAMVRLFPQLREVGARMLLQVHDELLLEAPKERAEEVAALAKTVMEGVWPLAVPLEVEVGIGEDWLAAKG

SEQ ID NO: 3193 - DNA, 2529 bp, synthetic construct
  misc_feature 1..2529: note = Variant of DNA polymerase I from Thermus sp. strain 2.9
  source 1..2529: mol_type = other DNA
atgcaccatcatcatcatcatggcggtagcggcgtgttaccggtgttcgagcctaaaggtcgcgtgcttctggttgatggccatcatctcgcgtatcgtaacttctttgccctgaaaggattaaccaccagcagcggcgagccggtacagggtgtctacggctttgcaaagtcgctcctgaaagctctgaaagaagacggtgatgtggtgattgttgtctttgatgcgaaagcgccaagttttcgccacgaagcgtacgaagcttacaaagccgggcgtgctccaacgccggaagactttcctcgccaattggcgcttatgaaggaattagtggatttgcttggcctcgaacgcttggaagttcccggtttcgaggcagacgacgtattagcgactctcgcaaagaaagccgaacgtgagggctatgaagtccagatcttgacagcagatcgcgatcttttccagcttttatctccgcgcatctcggtgttacacccggaagggcatcgtatcaccccggaatggctctgggagaaatatggtttgcgtcccgaacaatgggtggattttcgcgccttagcaggcgatccgagcgacaatattccgggagttaaaggtatcggcgagaagacggcgctcaagctccttaaagaatgggggtcgttggagaacttgcttaagaatttagatcaggtcaaaccagagtcagtgcgtgagaagattcttgctcacctcgaagacctcaaattaagccgcgaattgtcccgtgtacgcaccgatttgccgctcgaagttgatttccagcgccgccgcgaacctgactgggagggtcttaaagcgtttttagagcgtcttgaatttggttcgctcttgcatgaattcggccttttagaaagcccgttaccggccgaagaagcaccttggccaccgcccgagggcgcgtttttaggttaccgtttgagtcgcccggaaccgatgtgggccgaattactggctcttgcagcgtctgcccagggaacggtgtatcgcgcggaagaccctcatggtgcgctccgcggcctcttcgaagtccgtggactccttgccaaagacttagctgttgttgcattgcgcgaaggtcttgatttacctccgactgatgatccaatgcttcttgcgtacctcttggacccgtcaaacacgacgcccgaaggcgtagcccgtcgttacggcggcgagtggaccgaagatgcagcgaaacgcgcgttattggccgaacgtttgcacgccaatttattaggacgtttgcaaggcgaggaacgtctcctctggctttacgaagaagtggagaaaccattgagtcgcgtgctcgcgcatatggaagctaccggtgtcaaattagacgtggcgtatttggaggctctcagccttgaagttgctgcccacatgcgccgcttggaggaagaagtattccgtttagcaggccattcctttcgccttaattctcgcgatcagttagaacgtgtgttgttcgatgaacttggtctccctcctatcggcaagacagagaagaccggtaaacgtagcacttcacgtgcggttttagaagctcttcgcgaagtccatcccattgtggacaagatcttgcagtaccgcgaactcgcgaaattgaaaggcacctatattgaccgtcttccggcattagtccacccgaaaacgggacgcctccatacccgcttcaaccaaacagccacggcgaccggtcgtttgtcctcctctgatccaaaccttcagaatattccagtacgtaccccattgggccagaagatccgcaaagcgtttgtagctgaggagggttggcgtttagtggccctcgattatagccaaattgaattacgtgtccttgcccatctttctggcgatgagaacctcatccgcgtgtttcaggaaggcaaagacattcacactcaaacggcaagctggatgtttggattatcagctgaagcgatcgatcctttgatgcgtcgtgcagcgaagaccatcaatttcggtgttctctacggtatgagtgcctttcgtttgtcgcaggaattaggcattccctatgaagaagctgcggcgttcattcagaaatactttcaaagctatcccaaagttaaagcatggatcgagaagactctcgaagaaggccgcacacgtggttacgtagagaccttatttggacgtcgccgctatgttcccgatttaaacgctcgcgtgaaaggcaagcgtgaagccgccgaacgcatggcgttcaacatgcctgtacagggcacggcagctgacctcatgaaacttgcaatggtgcgcctttttccacaattgcgtgaagttggtgcccgcatgctcttgcaggtccacgatgaactcttgttagaagcgccaaaagagcgtgcggaagaggtggcagccctcgcgaaagaagttatggaaggcgtgtggcccttagcggtgcctcttgaagtcgaagttggtattggcgaggattggctggctgccaaaggataatga

SEQ ID NO: 3194 - protein, 841 aa, synthetic construct
  REGION 1..841: note = Variant of DNA polymerase I from Thermus sp. strain 2.9
MHHHHHHGGSGVLPVFEPKGRVLLVDGHHLAYRNFFALKGLTTSSGEPVQGVYGFAKSLLKALKEDGDVVIVVFDAKAPSFRHEAYEAYKAGRAPTPEDFPRQLALMKELVDLLGLERLEVPGFEADDVLATLAKKAEREGYEVQILTADRDLFQLLSPRISVLHPEGHRITPEWLWEKYGLRPEQWVDFRALAGDPSDNIPGVKGIGEKTALKLLKEWGSLENLLKNLDQVKPESVREKILAHLEDLKLSRELSRVRTDLPLEVDFQRRREPDWEGLKAFLERLEFGSLLHEFGLLESPLPAEEAPWPPPEGAFLGYRLSRPEPMWAELLALAASAQGTVYRAEDPHGALRGLFEVRGLLAKDLAVVALREGLDLPPTDDPMLLAYLLDPSNTTPEGVARRYGGEWTEDAAKRALLAERLHANLLGRLQGEERLLWLYEEVEKPLSRVLAHMEATGVKLDVAYLEALSLEVAAHMRRLEEEVFRLAGHSFRLNSRDQLERVLFDELGLPPIGKTEKTGKRSTSRAVLEALREVHPIVDKILQYRELAKLKGTYIDRLPALVHPKTGRLHTRFNQTATATGRLSSSDPNLQNIPVRTPLGQKIRKAFVAEEGWRLVALDYSQIELRVLAHLSGDENLIRVFQEGKDIHTQTASWMFGLSAEAIDPLMRRAAKTINFGVLYGMSAFRLSQELGIPYEEAAAFIQKYFQSYPKVKAWIEKTLEEGRTRGYVETLFGRRRYVPDLNARVKGKREAAERMAFNMPVQGTAADLMKLAMVRLFPQLREVGARMLLQVHDELLLEAPKERAEEVAALAKEVMEGVWPLAVPLEVEVGIGEDWLAAKG

SEQ ID NO: 3195 - DNA, 2529 bp, synthetic construct
  misc_feature 1..2529: note = Variant of DNA polymerase I from Thermus sp. strain 2.9
  source 1..2529: mol_type = other DNA
atgcaccatcatcatcatcatggcggtagcggcgtgttaccggtgttcgagcctaaaggtcgcgtgcttctggttgatggccatcatctcgcgtatcgtaacttctttgccctgaaaggattaaccaccagctcgggcgagccggtacagggtgtctacggctttgcaaagtcgctcctgaaagctctgaaagaagacggtgatgtggtgattgttgtctttgatgcgaaagcgccaagttttcgccacgaagcgtacgaagcttacaaagccgggcgtgctccaacgccggaagactttcctcgccaattggcgcttatgaaggaattagtggatttgcttggcctcgaacgcttggaagttcccggtttcgaggcagacgacgtattagcgactctcgcaaagaaagccgaacgtgagggctatgaagtccagatcttgacagcagatcgcgatcttttccagcttttatctccgcgcatctcggtgttacacccggaagggcatcgtatcaccccggaatggctctgggagaaatatggtttgcgtcccgaacaatgggtggattttcgcgccttagcaggcgatccgagcgacaatattccgggagttaaaggtatcggcgagaagacggcgctcaagctccttaaagaatgggggtcgttggagaacttgcttaagaatttagatcaggtcaaaccagagtcagtgcgtgagaagattcttgctcacctcgaagacctcaaattaagccgcgaattgtcccgtgtacgcaccgatttgccgctcgaagttgatttcggtcgccgccgcgaacctgactgggagggtcttaaagcgtttttagagcgtcttgaatttggttcgctcttgcatgaattcggccttttagaaagcccgttaccagccgaagaagcaccttggccaccgcccgaaggcgcgtttttaggttaccgtttgagtcgcccggaaccgatgtgggccgaattactggctcttgcagcgtctgcccagggaaccgtgtatcgcgcggaagaccctcatggtgcgctccgcggcctcttcgaagtccgtggactccttgccaaagacttagctgttgttgcattgcgcgaaggtcttgatttacctccgactgatgatccaatgcttcttgcgtacctcttggacccgtcaaacacgacgcccgaaggcgtagcccgtcgttacggcggcgagtggaccgaagatgcagcgaaacgcgcgttattggccgaacgtttgcacgccaatttattaggacgtttgcaaggcgaggaacgtctcctctggctttacgaagaagtggagaaaccattgagtcgcgtgctcgcgcatatggaagctaccggtgtcaaattagacgtggcgtatttggaggctctcagccttgaagttgctgcccacatgcgccgcttggaggaagaagtattccgtttagcaggccactcctttcgccttaattctcgcgatcagttagaacgtgtgttgttcgatgaacttggtctccctcctatcggcaagacagagaagaccggtaaacgtagcacttcagcggcggttttagaagctcttcgcgaagtccatcccattgtggacaagatcttgcagtaccgcgaactcgcgaaattgaaaggcacctatattgaccgtcttccggcattagtccacccgaaaacgggacgcctccatacccgcttcaaccaaacagccacggcgaccggtcgtttgtcctcctctgatccaaaccttcagaatattccagtacgtaccccattgggccagaagatccgccgtgcgtttgtagctgaggagggttggcgtttagtggccctcgattatagccaaattgaattacgtgtccttgcccatctttctggcgatgagaacctcatccgcgtgtttcaggaaggcaaagacattcacactcaaacggcaagctggatgtttggattatcagctgaagcgatcgatcctttgatgcgtcgtgcagcgaagaccatcaatttcggtgttctctacggtatgagtgcctttcgtttgtcgcaggaattaggcattccctatgaagaagctgcggcgttcattcagaaatactttcaaagctatcccaaagttaaagcatggatcgagaagactctcgaagaaggccgcacacgtggttacgtagagaccttatttggacgtcgccgctatgttcccgatttaaacgctcgcgtgaaaggcaagcgtgaagccgccgaacgcatggcgttcaacatgcctgtacagggcacggcagctgacctcatgaaacttgcaatggtgcgcctttttccacaattgcgtgaagttggtgcccgcatgctcttgcaggtccacgatgaactcttgttagaagcgccaaaagagcgtgcggaagaggtggcagccctcgcgaaagaagttatggaaggcgtgtggcccttagcggtgcctcttgaagtcgaagttggtattggcgaggattggctggctgccaaaggataatga

SEQ ID NO: 3196 - protein, 841 aa, synthetic construct
  REGION 1..841: note = Variant of DNA polymerase I from Thermus sp. strain 2.9
MHHHHHHGGSGVLPVFEPKGRVLLVDGHHLAYRNFFALKGLTTSSGEPVQGVYGFAKSLLKALKEDGDVVIVVFDAKAPSFRHEAYEAYKAGRAPTPEDFPRQLALMKELVDLLGLERLEVPGFEADDVLATLAKKAEREGYEVQILTADRDLFQLLSPRISVLHPEGHRITPEWLWEKYGLRPEQWVDFRALAGDPSDNIPGVKGIGEKTALKLLKEWGSLENLLKNLDQVKPESVREKILAHLEDLKLSRELSRVRTDLPLEVDFGRRREPDWEGLKAFLERLEFGSLLHEFGLLESPLPAEEAPWPPPEGAFLGYRLSRPEPMWAELLALAASAQGTVYRAEDPHGALRGLFEVRGLLAKDLAVVALREGLDLPPTDDPMLLAYLLDPSNTTPEGVARRYGGEWTEDAAKRALLAERLHANLLGRLQGEERLLWLYEEVEKPLSRVLAHMEATGVKLDVAYLEALSLEVAAHMRRLEEEVFRLAGHSFRLNSRDQLERVLFDELGLPPIGKTEKTGKRSTSAAVLEALREVHPIVDKILQYRELAKLKGTYIDRLPALVHPKTGRLHTRFNQTATATGRLSSSDPNLQNIPVRTPLGQKIRRAFVAEEGWRLVALDYSQIELRVLAHLSGDENLIRVFQEGKDIHTQTASWMFGLSAEAIDPLMRRAAKTINFGVLYGMSAFRLSQELGIPYEEAAAFIQKYFQSYPKVKAWIEKTLEEGRTRGYVETLFGRRRYVPDLNARVKGKREAAERMAFNMPVQGTAADLMKLAMVRLFPQLREVGARMLLQVHDELLLEAPKERAEEVAALAKEVMEGVWPLAVPLEVEVGIGEDWLAAKG

SEQ ID NO: 3197 - DNA, 2529 bp, synthetic construct
  misc_feature 1..2529: note = Variant of DNA polymerase I from Thermus sp. strain 2.9
  source 1..2529: mol_type = other DNA
atgcaccatcatcatcatcatggcggtagcggcgtgttaccggtgttcgagcctaaaggtcgcgtgcttctggttgatggccatcatctcgcgtatcgtaacttctttgccctgaaaggattaaccaccagcagcggcgagccggtacagggtgtctacggctttgcaaagtcgctcctgaaagctctgaaagaagacggtgatgtggtgattgttgtctttgatgcgaaagcgccaagttttcgccacgaagcgtacgaagcttacaaagccgggcgtgctccaacgccggaagactttcctcgccaattggcgcttatgaaggaattagtggatttgcttggcctcgaacgcttggaagttcccggtttcgaggcagacgacgtattagcgactctcgcaaagaaagccgaacgtgagggctatgaagtccagatcttgacagcagatcgcgatcttttccagcttttatctccgcgcatctcggtgttacacccggaagggcatcgtatcaccccggaatggctctgggagaaatatggtttgcgtcccgaacaatgggtggattttcgcgccttagcaggcgatccgagcgacaatattccgggagttaaaggtatcggcgagaagacggcgctcaagctccttaaagaatgggggtcgttggagaacttgcttaagaatttagatcaggtcaaaccagagtcagtgcgtgagaagattcttgctcacctcgaagacctcaaattaagccgcgaattgtcccgtgtacgcaccgatttgccgctcgaagttgatttccgtcgccgccgcgaacctgactgggagggtcttaaagcgtttttagagcgtcttgaatttggttcgctcttgcatgaattcggccttttagaaagcccgttaccagccgaagaagcaccttggccaccgcccgagggcgcgtttttaggttaccgtttgagtcgcccggaaccgatgtgggccgaattactggctcttgcagcgtctgcccagggacgtgtgtatcgcgcggaagaccctcatggtgcgctccgcggcctcttcgaagtccgtggactccttgccaaagacttagctgttgttgcattgcgcgaaggtcttgatttacctccgactgatgatccaatgcttcttgcgtacctcttggacccgtcaaacacgacgcccgaaggcgtagcccgtcgttacggcggcgagtggaccgaagatgcagcgaaacgcgcgttattggccgaacgtttgcacgccaatttattaggacgtttgcaaggcgaggaacgtctcctctggctttacgaagaagtggagaaaccattgagtcgcgtgctcgcgcatatggaagctaccggtgtcaaattagacgtggcgtatttggaggctctcagccttgaagttgctgcccacatgcgccgcttggaggaagaagtattccgtttagcaggccattcctttcgccttaattctcgcgatcagttagaacgtgtgttgttcgatgaacttggtctccctcctatcggcaagacagagaagaccggtaaacgtagcacttcagcggcggttttagaagctcttcgcgaagtccatcccattgtggacaagatcttgcagtaccgcgaactcgcgaaattgaaaggcacctatattgaccgtcttccggcattagtccacccgaaaacgggacgcgtgcatacccgcttcaaccaaacagccacggcgaccggtcgtttgtcctcctctgatccaaaccttcagaatattccagtacgtaccccattgggccagaagatccgccgtgcgtttgtagctgaggagggttggcgtttagtggccctcgattatagccaaattgaattacgtgtccttgcccatctttctggcgatgagaacctcatccgcgtgtttcaggaaggcaaagacattcacactcaaacggcaagctggatgtttggattatcagctgaagcgatcgatcctttgatgcgtcgtgcagcgaagaccatcaatttcggtgttctctacggtatgagtgcctttcgtttgtcgcaggaattaggcattccctatgaagaagctgcggcgttcattcagaaatactttcaaagctatcccaaagttaaagcatggatcgagaagactctcgaagaaggccgcacacgtggttacgtagagaccttatttggacgtcgccgctatgttcccgatttaaacgctcgcgtgaaaggcaagcgtgaagccgccgaacgcatggcgttcaacatgcctgtacagggcacggcagctgacctcatgaaacttgcaatggtgcgcctttttccacaattgcgtgaagttggtgcccgcatgctcttgcaggtccacgatgaactcttgttagaagcgccaaaagagcgtgcggaagaggtggcagccctcgcgaaagaagttatggaaggcgtgtggcccttagcggtgcctcttgaagtcgaagttggtattggcgaggattggctggctgccaaaggataatga

SEQ ID NO: 3198 - protein, 841 aa, synthetic construct
  REGION 1..841: note = Variant of DNA polymerase I from Thermus sp. strain 2.9
MHHHHHHGGSGVLPVFEPKGRVLLVDGHHLAYRNFFALKGLTTSSGEPVQGVYGFAKSLLKALKEDGDVVIVVFDAKAPSFRHEAYEAYKAGRAPTPEDFPRQLALMKELVDLLGLERLEVPGFEADDVLATLAKKAEREGYEVQILTADRDLFQLLSPRISVLHPEGHRITPEWLWEKYGLRPEQWVDFRALAGDPSDNIPGVKGIGEKTALKLLKEWGSLENLLKNLDQVKPESVREKILAHLEDLKLSRELSRVRTDLPLEVDFRRRREPDWEGLKAFLERLEFGSLLHEFGLLESPLPAEEAPWPPPEGAFLGYRLSRPEPMWAELLALAASAQGRVYRAEDPHGALRGLFEVRGLLAKDLAVVALREGLDLPPTDDPMLLAYLLDPSNTTPEGVARRYGGEWTEDAAKRALLAERLHANLLGRLQGEERLLWLYEEVEKPLSRVLAHMEATGVKLDVAYLEALSLEVAAHMRRLEEEVFRLAGHSFRLNSRDQLERVLFDELGLPPIGKTEKTGKRSTSAAVLEALREVHPIVDKILQYRELAKLKGTYIDRLPALVHPKTGRVHTRFNQTATATGRLSSSDPNLQNIPVRTPLGQKIRRAFVAEEGWRLVALDYSQIELRVLAHLSGDENLIRVFQEGKDIHTQTASWMFGLSAEAIDPLMRRAAKTINFGVLYGMSAFRLSQELGIPYEEAAAFIQKYFQSYPKVKAWIEKTLEEGRTRGYVETLFGRRRYVPDLNARVKGKREAAERMAFNMPVQGTAADLMKLAMVRLFPQLREVGARMLLQVHDELLLEAPKERAEEVAALAKEVMEGVWPLAVPLEVEVGIGEDWLAAKG

SEQ ID NO: 3199 - DNA, 2529 bp, synthetic construct
  misc_feature 1..2529: note = Variant of DNA polymerase I from Thermus sp. strain 2.9
  source 1..2529: mol_type = other DNA
atgcaccatcatcatcatcatggcggtagcggcgtgttaccggtgttcgagcctaaaggtcgcgtgcttctggttgatggccatcatctcgcgtatcgtaacttctttgccctgaaaggattaaccaccagctcgggcgagccggtacagggtgtctacggctttgcaaagtcgctcctgaaagctctgaaagaagacggtgatgtggtgattgttgtctttgatgcgaaagcgccaagttttcgccacgaagcgtacgaagcttacaaagccgggcgtgctccaacgccggaagactttcctcgccaattggcgcttatgaaggaattagtggatttgcttggcctcgaacgcttggaagttcccggtttcgaggcagacgacgtattagcgactctcgcaaagaaagccgaacgtgagggctatgaagtccagatcttgacagcagatcgcgatcttttccagcttttatctccgcgcatctcggtgttacacccggaagggcatcgtatcaccccggaatggctctgggagaaatatggtttgcgtcccgaacaatgggtggattttcgcgccttagcaggcgatccgagcgacaatattccgggagttaaaggtatcggcgagaagacggcgctcaagctccttaaagaatgggggtcgttggagaacttgcttaagaatttagatcaggtcaaaccagagtcagtgcgtgagaagattcttgctcacctcgaagacctcaaattaagccgcgaattgtcccgtgtacgcaccgatttgccgctcgaagttgatttccgtcgccgccgcgaacctgactgggagggtcttaaagcgtttttagagcgtcttgaatttggttcgctcttgcatgaattcggccttttagaaagcccgttaccggccgaagaagcaccttggccaccgcccgaaggcgcgtttttaggttaccgtttgagtcgcccggaaccgatgtgggccgaattactggctcttgcagcgtctgcccagggacgtgtgtatcgcgcggaagaccctcatggtgcgctccgcggcctcttcgaagtccgtggactccttgccaaagacttagctgttgttgcattgcgcgaaggtcttgatttacctccgactgatgatccaatgcttcttgcgtacctcttggacccgtcaaacacgacgcccgaaggcgtagcccgtcgttacggcggcgagtggaccgaagatgcagcgaaacgcgcgttattggccgaacgtttgcacgcaaatttattaggacgtttgcaaggcgaggaacgtctcctctggctttacgaagaagtggagaaaccattgagtcgcgtgctcgcgcatatggaagctaccggtgtcaaattagacgtggcgtatttggaggctctcagccttgaagttgctgcccacatgcgccgcttggaggaagaagtattccgtttagcaggccactcctttcgccttagctctcgcgatcagttagaacgtgtgttgttcgatgaacttggtctccctcctatcggcaagacagagaagaccggtaaacgtagcacttcagcggcggttttagaagctcttcgcgaagtccatcccattgtggacaagatcttgcaataccgcgaactcgcgaaattgaaaggcacctatattgaccgtcttccggcattagtccacccgaaaacgggacgcctccatacccgcttcaaccaaacagccacggcgaccggtcgtttgtcctcctctgatccaaaccttcagaatattccagtacgtaccccattgggccagaagatccgccgtgcgtttgtagctgaggagggttggcgtttagtggccctcgattatagccaaattgaattacgtgtccttgcccatctttctggcgatgagaacctcatccgcgtgtttcaggaaggcaaagacattcacactcaaacggcaagctggatgtttggattaggcgctgaagcgatcgatcctttgatgcgtcgtgcagcgaagaccatcaatttcggtgttctctacggtatgagtgcctttcgtttgtcgcaggaattaggcattccctatgaagaagctgcggcgttcattcagaaatactttcaaagctatcccaaagttaaagcatggatcgagaagactctcgaagaaggccgcacacgtggttacgtagagaccttatttggacgtcgccgctatgttcccgatttaaacgctcgcgtgaaaggcaagcgtgaagccgccgaacgcatggcgttcaacatgcctgtacagggcacggcagctgacctcatgaaacttgcaatggtgcgcctttttccacaattgcgtgaagttggtgcccgcatgctcttgcaggtccacgatgaactcttgttagaagcgccaaaagagcgtgcggaagaggtggcagccctcgcgaaagaagttatggaaggcgtgtggcccttagcggtgcctcttgaagtcgaagttggtattggcgaggattggctggctgccaaaggataatga

SEQ ID NO: 3200 - protein, 841 aa, synthetic construct
  REGION 1..841: note = Variant of DNA polymerase I from Thermus sp. strain 2.9
MHHHHHHGGSGVLPVFEPKGRVLLVDGHHLAYRNFFALKGLTTSSGEPVQGVYGFAKSLLKALKEDGDVVIVVFDAKAPSFRHEAYEAYKAGRAPTPEDFPRQLALMKELVDLLGLERLEVPGFEADDVLATLAKKAEREGYEVQILTADRDLFQLLSPRISVLHPEGHRITPEWLWEKYGLRPEQWVDFRALAGDPSDNIPGVKGIGEKTALKLLKEWGSLENLLKNLDQVKPESVREKILAHLEDLKLSRELSRVRTDLPLEVDFRRRREPDWEGLKAFLERLEFGSLLHEFGLLESPLPAEEAPWPPPEGAFLGYRLSRPEPMWAELLALAASAQGRVYRAEDPHGALRGLFEVRGLLAKDLAVVALREGLDLPPTDDPMLLAYLLDPSNTTPEGVARRYGGEWTEDAAKRALLAERLHANLLGRLQGEERLLWLYEEVEKPLSRVLAHMEATGVKLDVAYLEALSLEVAAHMRRLEEEVFRLAGHSFRLSSRDQLERVLFDELGLPPIGKTEKTGKRSTSAAVLEALREVHPIVDKILQYRELAKLKGTYIDRLPALVHPKTGRLHTRFNQTATATGRLSSSDPNLQNIPVRTPLGQKIRRAFVAEEGWRLVALDYSQIELRVLAHLSGDENLIRVFQEGKDIHTQTASWMFGLGAEAIDPLMRRAAKTINFGVLYGMSAFRLSQELGIPYEEAAAFIQKYFQSYPKVKAWIEKTLEEGRTRGYVETLFGRRRYVPDLNARVKGKREAAERMAFNMPVQGTAADLMKLAMVRLFPQLREVGARMLLQVHDELLLEAPKERAEEVAALAKEVMEGVWPLAVPLEVEVGIGEDWLAAKG

SEQ ID NO: 3201 - DNA, 2529 bp, synthetic construct
  misc_feature 1..2529: note = Variant of DNA polymerase I from Thermus sp. strain 2.9
  source 1..2529: mol_type = other DNA
atgcaccatcatcatcatcatggcggtagcggcgtgttaccggtgttcgagcctaaaggtcgcgtgcttctggttgatggccatcatctcgcgtatcgtaacttctttgccctgaaaggattaaccaccagcctgggcgagccggtacagggtgtctacggctttgcaaagtcgctcctgaaagctctgaaagaagacggtgatgtggtgattgttgtctttgatgcgaaagcgccaagttttcgccacgaagcgtacgaagcttacaaagccgggcgtgctccaacgccggaagactttcctcgccaattggcgcttatgaaggaattagtggatttgcttggcctcgaacgcttggaagttcccggtttcgaggcagacgacgtattagcgactctcgcaaagaaagccgaacgtgagggctatgaagtccagatcttgacagcagatcgcgatcttttccagcttttatctccgcgcatctcggtgttacacccggaagggcatcgtatcaccccggaatggctctgggagaaatatggtttgcgtcccgaacaatgggtggattttcgcgccttagcaggcgatccgagcgacaatattccgggagttaaaggtatcggcgagaagacggcgctcaagctccttaaagaatgggggtcgttggagaacttgcttaagaatttagatcaggtcaaaccagagtcagtgcgtgagaagattcttgctcacctcgaagacctcaaattaagccgcgaattgtcccgtgtacgcaccgatttgccgctcgaagttgatttccagcgccgccgcgaacctgactgggagggtcttaaagcgtttttagagcgtcttgaatttggttcgctcttgcatgaattcggccttttagaaagcccgttaccggccgaagaagcaccttggccaccgcccgagggcgcgtttttaggttaccgtttgagtcgcccggaaccgatgtgggccgaattactggctcttgcagcgtctgcccagggacgtgtgtatcgcgcggaagaccctcatggtgcgctccgcggcctcttcgaagtccgtggactccttgccaaagacttagctgttgttgcattgcgcgaaggtcttgatttacctccgactgatgatccaatgcttcttgcgtacctcttggacccgtcaaacacgacgcccgaaggcgtagcccgtcgttacggcggcgagtggaccgaagatgcagcgaaacgcgcgttattggccgaacgtttgcacgccaatttattaggacgtttgcaaggcgaggaacgtctcctctggctttacgaagaagtggacaaaccattgagtcgcgtgctcgcgcatatggaagctaccggtgtcaaattagacgtggcgtatttggaggctctcagccttgaagttgctgcccacatgcgccgcttggaggaagaagtattccgtttagcaggccattcctttcgccttaattctcgcgatcagttagaacgtgtgttgttcgatgaacttggtctccctcctatcggcaagacagagaagaccggtaaacgtagcacttcacgcgcggttttagaagctcttcgcgaagtccatcccattgtggacaagatcttgcagtaccgcgaactcgcgaaattgaaaggcacctatattgaccgtcttccggcattagtccacccgaaaacgggacgcctccatacccgcttcaaccaaacagccacggcgaccggtcgtttgtcctcctctgatccaaaccttcagaatattccagtacgtaccccattgggccagaagatccgccgtgcgtttgtagctgaggagggttggcgtttagtggccctcgattatagccaaattgaattacgtgtccttgcccatctttctggcgatgagaacctcatccgcgtgtttcaggaaggcaaagacattcacactcaaacggcaagctggatgtttggattatcagctgaagcgatcgatcctttgatgcgtcgtgcagcgaagaccatcaatttcggtgttctctacggtatgagtgcctttcgtttgtcgcaggaattaggcattccctatcaggaagctgcggcgttcattcagaaatactttcaaagctatcccaaagttaaagcatggatcgagaagactctcgaagaaggccgcacacgtggttacgtagagaccttatttggacgtcgccgctatgttcccgatttaaacgctcgcgtgaaaggcaagcgtgaagccgccgaacgcatggcgttcaacatgcctgtacagggcacggcagctgacctcatgaaacttgcaatggtgcgcctttttccacaattgcgtgaagttggtgcccgcatgctcttgcaggtccacgatgaactcttgttagaagcgccaaaagagcgtgcggaagaggtggcagccctcgcgaaagaagttatggaaggcgtgtggcccttagcggtgcctcttgaagtcgaagttggtattggcgaggattggctggctgccaaaggataatga

SEQ ID NO: 3202 - protein, 841 aa, synthetic construct
  REGION 1..841: note = Variant of DNA polymerase I from Thermus sp. strain 2.9
MHHHHHHGGSGVLPVFEPKGRVLLVDGHHLAYRNFFALKGLTTSLGEPVQGVYGFAKSLLKALKEDGDVVIVVFDAKAPSFRHEAYEAYKAGRAPTPEDFPRQLALMKELVDLLGLERLEVPGFEADDVLATLAKKAEREGYEVQILTADRDLFQLLSPRISVLHPEGHRITPEWLWEKYGLRPEQWVDFRALAGDPSDNIPGVKGIGEKTALKLLKEWGSLENLLKNLDQVKPESVREKILAHLEDLKLSRELSRVRTDLPLEVDFQRRREPDWEGLKAFLERLEFGSLLHEFGLLESPLPAEEAPWPPPEGAFLGYRLSRPEPMWAELLALAASAQGRVYRAEDPHGALRGLFEVRGLLAKDLAVVALREGLDLPPTDDPMLLAYLLDPSNTTPEGVARRYGGEWTEDAAKRALLAERLHANLLGRLQGEERLLWLYEEVDKPLSRVLAHMEATGVKLDVAYLEALSLEVAAHMRRLEEEVFRLAGHSFRLNSRDQLERVLFDELGLPPIGKTEKTGKRSTSRAVLEALREVHPIVDKILQYRELAKLKGTYIDRLPALVHPKTGRLHTRFNQTATATGRLSSSDPNLQNIPVRTPLGQKIRRAFVAEEGWRLVALDYSQIELRVLAHLSGDENLIRVFQEGKDIHTQTASWMFGLSAEAIDPLMRRAAKTINFGVLYGMSAFRLSQELGIPYQEAAAFIQKYFQSYPKVKAWIEKTLEEGRTRGYVETLFGRRRYVPDLNARVKGKREAAERMAFNMPVQGTAADLMKLAMVRLFPQLREVGARMLLQVHDELLLEAPKERAEEVAALAKEVMEGVWPLAVPLEVEVGIGEDWLAAKG

SEQ ID NO: 3203 - DNA, 2529 bp, synthetic construct
  misc_feature 1..2529: note = Variant of DNA polymerase I from Thermus sp. strain 2.9
  source 1..2529: mol_type = other DNA
atgcaccatcatcatcatcatggcggtagcggcgtgttaccggtgttcgagcctaaaggtcgcgtgcttctggttgatggccatcatctcgcgtatcgtaacttctttgccctgaaaggattaaccaccagcagcggcgagccggtacagggtgtctacggctttgcaaagtcgctcctgaaagctctgaaagaagacggtgatgtggtgattgttgtctttgatgcgaaagcgccaagttttcgccacgaagcgtacgaagcttacaaagccgggcgtgctccaacgccggaagactttcctcgccaattggcgcttatgaaggaattagtggatttgcttggcctcgaacgcttggaagttcccggtttcgaggcagacgacgtattagcgactctcgcaaagaaagccgaacgtgagggctatgaagtccagatcttgacagcagatcgcgatcttttccagcttttatctccgcgcatctcggtgttacacccggaagggcatcgtatcaccccggaatggctctgggagaaatatggtttgcgtcccgaacaatgggtggattttcgcgccttagcaggcgatccgagcgacaatattccgggagttaaaggtatcggcgagaagacggcgctcaagctccttaaagaatgggggtcgttggagaacttgcttaagaatttagatcaggtcaaaccagagtcagtgcgtgagaagattcttgctcacctcgaagacctcaaattaagccgcgaattgtcccgtgtacgcaccgatttgccgctcgaagttgatttccaacgccgccgcgaacctgactgggagggtcttaaagcgtttttagagcgtcttgaatttggttcgctcttgcatgaattcggccttttagaaagcccgttaccagccgaagaagcaccttggccaccgcccgagggcgcgtttttaggttaccgtttgagtcgcccggaaccgatgtgggccgaattactggctcttgcagcgtctgcccagggacgtgtgtatcgcgcggaagaccctcatggtgcgctccgcggcctcttcgaagtccgtggactccttgccaaagacttagctgttgttgcattgcgcgaaggtcttgatttacctccgactgatgatccaatgcttcttgcgtacctcttggacccgtcaaacacgacgcccgaaggcgtagcccgtcgttacggcggcgagtggaccgaagatgcagcgaaacgcgcgttattggccgaacgtttgcacgccaatttattaggacgtttgcaaggcgaggaacgtctcctctggctttacgaagaagtggagaaaccattgagtcgcgtgctcgcgcatatggaagctaccggtgtcaaattagacgtggcgtatttggagaatctcagccttgaagttgctgcccacatgcgccgcttggaggaagaagtattccgtttagcaggccattcctttcgccttaattctcgcgatcagttagaacgtgtgttgttcgatgaacttggtctccgtcctatcggcaagacagagaagaccggtaaacgtagcacttcagcggcggttttagaagctcttcgcgaagtccatcccattgtggacaagatcttgcaataccgcgaactcgcgaaattgaaaggcacctatattgaccgtcttccggcattagtccacccgaaaacgggacgcctccatacccgcttcaaccaaacagccacggcgaccggtcgtttgtcctcctctgatccaaaccttcagaatattccagtacgtaccccattgggccagaagatccgccgtgcgtttgtagctgaggagggttggcgtttagtggccctcgattatagccaaattgaattacgtgtccttgcccatctttctggcgatgagaacctcatccgcgtgtttcaggaaggcaaagacattcacactcaaacggcaagctggatgtttggattatcagctgaagcgatcgatcctttgatgcgtcgtgcagcgaagaccatcaatttcggtgttctctacggtatgagtgcctttcgtttgtcgcaggaattaggcattccctatgaagaagcttcggcgttcattcagaaatactttcaaagctatcccaaagttaaagcatggatcgagaagactctcgaagaaggccgcacacgtggttacgtagagaccttatttggacgtcgccgctatgttcccgatttaaacgctcgcgtgaaaggcaagcgtgaagccgccgaacgcatggcgttcaacatgcctgtacagggcacggcagctgacctcatgaaacttgcaatggtgcgcctttttccacaattgcgtgaagttggtgcccgcatgctcttgcaggtccacgatgaactcttgttagaagcgccaaaagagcgtgcggaagaggtggcagccctcgcgaaaaccgttatggaaggcgtgtggcccttagcggtgcctcttgaagtcgaagttggtattggcgaggattggctggctgccaaaggataatga

SEQ ID NO: 3204 - protein, 841 aa, synthetic construct
  REGION 1..841: note = Variant of DNA polymerase I from Thermus sp. strain 2.9
MHHHHHHGGSGVLPVFEPKGRVLLVDGHHLAYRNFFALKGLTTSSGEPVQGVYGFAKSLLKALKEDGDVVIVVFDAKAPSFRHEAYEAYKAGRAPTPEDFPRQLALMKELVDLLGLERLEVPGFEADDVLATLAKKAEREGYEVQILTADRDLFQLLSPRISVLHPEGHRITPEWLWEKYGLRPEQWVDFRALAGDPSDNIPGVKGIGEKTALKLLKEWGSLENLLKNLDQVKPESVREKILAHLEDLKLSRELSRVRTDLPLEVDFQRRREPDWEGLKAFLERLEFGSLLHEFGLLESPLPAEEAPWPPPEGAFLGYRLSRPEPMWAELLALAASAQGRVYRAEDPHGALRGLFEVRGLLAKDLAVVALREGLDLPPTDDPMLLAYLLDPSNTTPEGVARRYGGEWTEDAAKRALLAERLHANLLGRLQGEERLLWLYEEVEKPLSRVLAHMEATGVKLDVAYLENLSLEVAAHMRRLEEEVFRLAGHSFRLNSRDQLERVLFDELGLRPIGKTEKTGKRSTSAAVLEALREVHPIVDKILQYRELAKLKGTYIDRLPALVHPKTGRLHTRFNQTATATGRLSSSDPNLQNIPVRTPLGQKIRRAFVAEEGWRLVALDYSQIELRVLAHLSGDENLIRVFQEGKDIHTQTASWMFGLSAEAIDPLMRRAAKTINFGVLYGMSAFRLSQELGIPYEEASAFIQKYFQSYPKVKAWIEKTLEEGRTRGYVETLFGRRRYVPDLNARVKGKREAAERMAFNMPVQGTAADLMKLAMVRLFPQLREVGARMLLQVHDELLLEAPKERAEEVAALAKTVMEGVWPLAVPLEVEVGIGEDWLAAKG

SEQ ID NO: 3205 - DNA, 2529 bp, synthetic construct
  misc_feature 1..2529: note = Variant of DNA polymerase I from Thermus sp. strain 2.9
  source 1..2529: mol_type = other DNA
atgcaccatcatcatcatcatggcggtagcggcgtgttaccggtgttcgagcctaaaggtcgcgtgcttctggttgatggccatcatctcgcgtatcgtaacttctttgccctgaaaggattaaccaccagcagcggcgagccggtacagggtgtctacggctttgcaaagtcgctcctgaaagctctgaaagaagacggtgatgtggtgattgttgtctttgatgcgaaagcgccaagttttcgccacgaagcgtacgaagcttacaaagccgggcgtgctccaacgccggaagactttcctcgccaattggcgcttatgaaggaattagtggatttgcttggcctcgaacgcttggaagttcccggtttcgaggcagacgacgtattagcgactctcgcaaagaaagccgaacgtgagggctatgaagtccagatcttgacagcagatcgcgatcttttccagcttttatctccgcgcatctcggtgttacacccggaagggcatcgtatcaccccggaatggctctgggagaaatatggtttgcgtcccgaacaatgggtggattttcgcgccttagcaggcgatccgagcgacaatattccgggagttaaaggtatcggcgagaagacggcgctcaagctccttaaagaatgggggtcgttggagaacttgcttaagaatttagatcaggtcaaaccagagtcagtgcgtgagaagattcttgctcacctcgaagacctcaaattaagccgcgaattgtcccgtgtacgcaccgatttgccgctcgaagttgatttccgtcgccgccgcgaacctgactgggagggtcttaaagcgtttttagagcgtcttgaatttggttcgctcttgcatgaattcggccttttagaaagcccgttaccagccgaagaagcaccttggccaccgcccgagggcgcgtttttaggttaccgtttgagtcgcccggaaccgatgtgggccgaattatcggctcttgcagcgtctgcccagggacgtgtgtatcgcgcggaagaccctcatggtgcgctccgcggcctcttcgaagtccgtggactccttgccaaagacttagctgttgttgcattgcgcgaaggtcttgatttacctccgactgatgatccaatgcttcttgcgtacctcttggacccgtcaaacacgacgcccgaaggcgtagcccgtcgttacggcggcgagtggaccgaagatgcagcgaaacgcgcgttattggccgaacgtttgcacgccaatttattaggacgtttgcaaggcgaggaacgtctcctctggctttacgaagaagtggagaaaccattgagtcgcgtgctcgggcatatggaagctaccggtgtcaaattagacgtggcgtatttggaggctctcagccttgaagttgctgcccacatgcgccgcttggaggaagaagtattccgtttagcaggccattcctttcgccttaattctcgcgatcagttagaacgtgtgttgttcgatgaacttggtctccctcctatcggcaagacagagaagaccggtaaacgtagcacttcagcggcggttttagaagctcttcgcgaagtccatcccattgtggacaagatcttgcagtaccgcgaactcgcgaaattgaaaggcacctatattgaccgtcttccggcattagtccacccgaaaacgggacgcctccatacccgcttcaaccaaacagccacggcgaccggtcgtttgtcctcctctgatccaaaccttcagaatattccagtacgtaccccattgggccagaagatccgccgtgcgtttgtagctgaggagggttggcgtttagtggccctcgattatagccaaattgaattacgtgtccttgcccatctttctggcgatgagaacctcatccgcgtgtttcaggaaggcaaagacattcacactcaaacggcaagctggatgtttggattatcagctgaagcgatcgatcctttgatgcgtcgtgcagcgaagaccatcaatttcggtgttctctacggtatgagtgcctttcgtttgtcgcaggaattaggcattccctatgaagaagctgcggcgttcattcagaaatactttcaaagctatcccaaagttaaagcatggatcgagaagactctcgaagaaggccgcacacgtggttacgtagagaccttatttggacgtcgccgctatgttcccgatttaaacgctcgcgtgaaaggcaagcgtgaagccgccgaacgcatggcgttcaacatgcctgtacagggcacggcagctgacctcatgaaacttgcaatggtgcgcctttttccacaattgcgtgaagttggtgcccgcatgctcttgcaggtccacgatgaactcttgttagaagcgccaaaagagcgtgcggaagaggtggcagccctcgcgaaagaagttatggaaggcgtgtggcccttagcggtgcctcttgaagtcgaagttggtattggcgaggattggctggctgccaaaggataatga

SEQ ID NO: 3206 - protein, 841 aa, synthetic construct
  REGION 1..841: note = Variant of DNA polymerase I from Thermus sp. strain 2.9
MHHHHHHGGSGVLPVFEPKGRVLLVDGHHLAYRNFFALKGLTTSSGEPVQGVYGFAKSLLKALKEDGDVVIVVFDAKAPSFRHEAYEAYKAGRAPTPEDFPRQLALMKELVDLLGLERLEVPGFEADDVLATLAKKAEREGYEVQILTADRDLFQLLSPRISVLHPEGHRITPEWLWEKYGLRPEQWVDFRALAGDPSDNIPGVKGIGEKTALKLLKEWGSLENLLKNLDQVKPESVREKILAHLEDLKLSRELSRVRTDLPLEVDFRRRREPDWEGLKAFLERLEFGSLLHEFGLLESPLPAEEAPWPPPEGAFLGYRLSRPEPMWAELSALAASAQGRVYRAEDPHGALRGLFEVRGLLAKDLAVVALREGLDLPPTDDPMLLAYLLDPSNTTPEGVARRYGGEWTEDAAKRALLAERLHANLLGRLQGEERLLWLYEEVEKPLSRVLGHMEATGVKLDVAYLEALSLEVAAHMRRLEEEVFRLAGHSFRLNSRDQLERVLFDELGLPPIGKTEKTGKRSTSAAVLEALREVHPIVDKILQYRELAKLKGTYIDRLPALVHPKTGRLHTRFNQTATATGRLSSSDPNLQNIPVRTPLGQKIRRAFVAEEGWRLVALDYSQIELRVLAHLSGDENLIRVFQEGKDIHTQTASWMFGLSAEAIDPLMRRAAKTINFGVLYGMSAFRLSQELGIPYEEAAAFIQKYFQSYPKVKAWIEKTLEEGRTRGYVETLFGRRRYVPDLNARVKGKREAAERMAFNMPVQGTAADLMKLAMVRLFPQLREVGARMLLQVHDELLLEAPKERAEEVAALAKEVMEGVWPLAVPLEVEVGIGEDWLAAKG

SEQ ID NO: 3207 - DNA, 2529 bp, synthetic construct
  misc_feature 1..2529: note = Variant of DNA polymerase I from Thermus sp. strain 2.9
  source 1..2529: mol_type = other DNA
atgcaccatcatcatcatcatggcggtagcggcgtgttaccggtgttcgagcctaaaggtcgcgtgcttctggttgatggccatcatctcgcgtatcgtaacttctttgccctgaaaggattaaccaccagcagcggcgagccggtacagggtgtctacggctttgcaaagtcgctcctgaaagctctgaaagaagacggtgatgtggtgattgttgtctttgatgcgaaagcgccaagttttcgccacgaagcgtacgaagcttacaaagccgggcgtgctccaacgccggaagactttcctcgccaattggcgcttatgaaggaattagtggatttgcttggcctcgaacgcttggaagttcccggtttcgaggcagacgacgtattagcgactctcgcaaagaaagccgaacgtgagggctatgaagtccagatcttgacagcagatcgcgatcttttccagcttttatctccgcgcatctcggtgttacacccggaagggcatcgtatcaccccggaatggctctgggagaaatatggtttgcgtcccgaacaatgggtggattttcgcgccttagcaggcgatccgagcgacaatattccgggagttaaaggtatcggcgagaagacggcgctcaagctccttaaagaatgggggtcgttggagaacttgcttaagaatttagatcaggtcaaaccagagtcagtgcgtgagaagattcttgctcacctcgaagacctcaaattaagccgcgaattgtcccgtgtacgcaccgatttgccgctcgaagttgatttccgtcgccgccgcgaacctgactgggagggtcttaaagcgtttttagagcgtcttgaatttggttcgctcttgcatgaattcggccttttagaaagcccgttaccagccgaagaagcaccttggccaccgcccgagggcgcgtttttaggttaccgtttgagtcgcccggaaccgatgtgggccgaattactggctcttgcagcgtctgcccagggacgtgtgtatcgcgcggaagaccctcatggtgcgctccgcggcctcttcgaagtccgtggactccttgccaaagacttagctgttgttgcattgcgcgaaggtcttgatttacctccgactgatgatccaatgcttcttgcgtacctcttggacccgtcaaacacgacgcccgaaggcgtagcccgtcgttacggcggcgagtggaccgaagatgcagcgaaacgcgcgttattggccgaacgtttgcacgccaatttattaggacgtttgcaaggcgaggaacgtctcctctggctttacgaagaagtggagaaaccattgagtcgcgtgctcgcgcatatggaagctaccggtgtcaaattagacgtggcgtatttggaggctctcagccttgaagttgctgcccacatgcgccgcttggaggaagaagtattccgtttagcaggccgctcctttcgccttagctctcgcgatcagttagaacgtgtgttgttcgatgaacttggtctccctcctatcggcaagacagagaagaccggtaaacgtagcacttcagccgcggttttagaagctcttcgcgaagtccatcccattgtggacaagatcttgcaataccgcgaactcgcgaaattgaaaggcacctatattgaccgtcttccggcattagtccacccgaaaacgggacgcctccatacccgcttcaaccaaacagccacggcgaccggtcgtttgtcctcctctgatccaaaccttcagaatattccagtacgtaccccattgggccagaagatccgcaaagcgtttgtagctgaggagggttggcgtttagtggccctcgattatagtcaaattgaattacgtgtccttgcccatctttctggcgatgagaacctcatccgcgtgtttcaggaaggcaaagacattcacactcaaacggcaagctggatgtttggattatcagctgaagcgatcgatcctttgatgcgtcgtgcagcgaagaccatcaatttcggtgttctctacggtatgagtgcctttcgtttgtcgcaggaattaggcattccctatgaggaagctgcggcgttcattcagaaatactttcaaagctatcccaaagttaaagcatggatcgagaagactctccgtgaaggccgcacacgtggttacgtagagaccttatttggacgtcgccgctatgttcccgatttaaacgctcgcgtgaaaggcaagcgtgaagccgccgaacgcatggcgttcaacatgcctgtacagggcacggcagctgacctcatgaaacttgcaatggtgcgcctttttccacaattgcgtgaagttggtgcccgcatgctcttgcaggtccacgatgaactcttgttagaagcgccaaaagagcgtgcggaagaggtggcagccctcgcgaaagaagttatggaaggcgtgtggcccttagcggtgcctcttgaagtcgaagttggtattggcgaggattggctggctgccaaaggataatga

SEQ ID NO: 3208 - protein, 841 aa, synthetic construct
  REGION 1..841: note = Variant of DNA polymerase I from Thermus sp. strain 2.9
MHHHHHHGGSGVLPVFEPKGRVLLVDGHHLAYRNFFALKGLTTSSGEPVQGVYGFAKSLLKALKEDGDVVIVVFDAKAPSFRHEAYEAYKAGRAPTPEDFPRQLALMKELVDLLGLERLEVPGFEADDVLATLAKKAEREGYEVQILTADRDLFQLLSPRISVLHPEGHRITPEWLWEKYGLRPEQWVDFRALAGDPSDNIPGVKGIGEKTALKLLKEWGSLENLLKNLDQVKPESVREKILAHLEDLKLSRELSRVRTDLPLEVDFRRRREPDWEGLKAFLERLEFGSLLHEFGLLESPLPAEEAPWPPPEGAFLGYRLSRPEPMWAELLALAASAQGRVYRAEDPHGALRGLFEVRGLLAKDLAVVALREGLDLPPTDDPMLLAYLLDPSNTTPEGVARRYGGEWTEDAAKRALLAERLHANLLGRLQGEERLLWLYEEVEKPLSRVLAHMEATGVKLDVAYLEALSLEVAAHMRRLEEEVFRLAGRSFRLSSRDQLERVLFDELGLPPIGKTEKTGKRSTSAAVLEALREVHPIVDKILQYRELAKLKGTYIDRLPALVHPKTGRLHTRFNQTATATGRLSSSDPNLQNIPVRTPLGQKIRKAFVAEEGWRLVALDYSQIELRVLAHLSGDENLIRVFQEGKDIHTQTASWMFGLSAEAIDPLMRRAAKTINFGVLYGMSAFRLSQELGIPYEEAAAFIQKYFQSYPKVKAWIEKTLREGRTRGYVETLFGRRRYVPDLNARVKGKREAAERMAFNMPVQGTAADLMKLAMVRLFPQLREVGARMLLQVHDELLLEAPKERAEEVAALAKEVMEGVWPLAVPLEVEVGIGEDWLAAKG

SEQ ID NO: 3209 - DNA, 2529 bp, synthetic construct
  misc_feature 1..2529: note = Variant of DNA polymerase I from Thermus sp. strain 2.9
  source 1..2529: mol_type = other DNA
atgcaccatcatcatcatcatggcggtagcggcgtgttaccggtgttcgagcctaaaggtcgcgtgcttctggttgatggccatcatctcgcgtatcgtaacttctttgccctgaaaggattaaccaccagctcgggcgagccggtacagggtgtctacggctttgcaaagtcgctcctgaaagctctgaaagaagacggtgatgtggtgattgttgtctttgatgcgaaagcgccaagttttcgccacgaagcgtacgaagcttacaaagccgggcgtgctccaacgccggaagactttcctcgccaattggcgcttatgaaggaattagtggatttgcttggcctcgaacgcttggaagttcccggtttcgaggcagacgacgtattagcgactctcgcaaagaaagccgaacgtgagggctatgaagtccagatcttgacagcagatcgcgatcttttccagcttttatctccgcgcatctcggtgttacacccggaagggcatcgtatcaccccggaatggctctgggagaaatatggtttgcgtcccgaacaatgggtggattttcgcgccttagcaggcgatccgagcgacaatattccgggagttaaaggtatcggcgagaagacggcgctcaagctccttaaagaatgggggtcgttggagaacttgcttaagaatttagatcaggtcaaaccagagtcagtgcgtgagaagattcttgctcacctcgaagacctcaaattaagccgcgaattgtcccgtgtacgcaccgatttgccgctcgaagttgatttccgtcgccgccgcgaacctgactgggagggtcttaaagcgtttttagagcgtcttgaatttggttcgctcttgcatgaattcggccttttagaaagcccgttactggccgaagaagcaccttggccaccgcccgagggcgcgtttttaggttaccgtttgagtcgcccggaaccgatgtgggccgaattactggctcttgcagcgtctgcccagggacgtgtgtatcgcgcggaagaccctcatggtgcgctccgcggcctcttcgaagtccgtggactccttgccaaagacttagctgttgttgcattgcgcgaaggtcttgatttacctccgactgatgatccaatgcttcttgcgtacctcttggacccgtcaaacacgacgcccgaaggcgtagcccgtcgttacggcggcgagtggaccgaagatgcagcgaaacgcgcgttattggccgaacgtttgcacgccaatttattaggacgtttgcaaggcgaggaacgtctcctctggctttacgaagaagtggagaaaccattgagtcgcgtgctcgcgcatatggaagctaccggtgtcaaattagacgtggcgtatttggaggctctcagccttgaagttgctgcccacatgcgccgcttggaggaagaagtattccgtttagcaggccattcctttcgccttaattctcgcgatcagttagaacgtgtgttgttcgatgaacttggtctccctcctatcggcaagacagagaagaccggtaaacgtagcacttcagccgcggttttagaagctcttcgcgaagtccatcccattgtggacaagatcttgcagtaccgcgaactcgcgaaattgaaaggcacctatattgaccgtcttccggcattagtccacccgaaaacgggacgcctccatacccgcttcaaccaaacagccacggcgaccggtcgtttgtcctcctctgatccaaaccttcagaatattccagtacgtaccccattgggccagaagatccgcaaagcgtttgtagctgaggagggttggcgtttagtggccctcgattatcgtcaaattgaattacgtgtccttgcccatctttctggcgatgagaacctcatccgcgtgtttcaggaaggcaaagacattcacactcaaacggcaagctggatgtttggattatcagctgaagcgatcgatcctttgatgcgtcgtgcagcgaagaccatcaatttcggtgttctctacggtatgagtgcctttcgtttgtcgcaggaattaggcattccctatgaagaagctgcggcgttcattcagaaatactttcaaagctatcccaaagttaaagcatggatcgagaagactctccgtgaaggccgcacacgtggttacgtagagaccttatttggacgtcgccgctatgttcccgatttaaacgctcgcgtgaaaggcaagcgtgaagccgccgaacgcatggcgttcaacatgcctgtacagggcacggcagctgacctcatgaaacttgcaatggtgcgcctttttccacaattgcgtgaagttggtgcccgcatgctcttgcaggtccacgatgaactcttgttagaagcgccaaaagagcgtgcggaagaggtggcagccctcgcgaaagaagttatggaaggcgtgtggcccttagcggtgcctcttgaagtcgaagttggtattggcgaggattggctggctgccaaaggataatga

SEQ ID NO: 3210 - protein, 841 aa, synthetic construct
  REGION 1..841: note = Variant of DNA polymerase I from Thermus sp. strain 2.9
MHHHHHHGGSGVLPVFEPKGRVLLVDGHHLAYRNFFALKGLTTSSGEPVQGVYGFAKSLLKALKEDGDVVIVVFDAKAPSFRHEAYEAYKAGRAPTPEDFPRQLALMKELVDLLGLERLEVPGFEADDVLATLAKKAEREGYEVQILTADRDLFQLLSPRISVLHPEGHRITPEWLWEKYGLRPEQWVDFRALAGDPSDNIPGVKGIGEKTALKLLKEWGSLENLLKNLDQVKPESVREKILAHLEDLKLSRELSRVRTDLPLEVDFRRRREPDWEGLKAFLERLEFGSLLHEFGLLESPLLAEEAPWPPPEGAFLGYRLSRPEPMWAELLALAASAQGRVYRAEDPHGALRGLFEVRGLLAKDLAVVALREGLDLPPTDDPMLLAYLLDPSNTTPEGVARRYGGEWTEDAAKRALLAERLHANLLGRLQGEERLLWLYEEVEKPLSRVLAHMEATGVKLDVAYLEALSLEVAAHMRRLEEEVFRLAGHSFRLNSRDQLERVLFDELGLPPIGKTEKTGKRSTSAAVLEALREVHPIVDKILQYRELAKLKGTYIDRLPALVHPKTGRLHTRFNQTATATGRLSSSDPNLQNIPVRTPLGQKIRKAFVAEEGWRLVALDYRQIELRVLAHLSGDENLIRVFQEGKDIHTQTASWMFGLSAEAIDPLMRRAAKTINFGVLYGMSAFRLSQELGIPYEEAAAFIQKYFQSYPKVKAWIEKTLREGRTRGYVETLFGRRRYVPDLNARVKGKREAAERMAFNMPVQGTAADLMKLAMVRLFPQLREVGARMLLQVHDELLLEAPKERAEEVAALAKEVMEGVWPLAVPLEVEVGIGEDWLAAKG

SEQ ID NO: 3211 - DNA, 2529 bp, synthetic construct
  misc_feature 1..2529: note = Variant of DNA polymerase I from Thermus sp. strain 2.9
  source 1..2529: mol_type = other DNA
atgcaccatcatcatcatcatggcggtagcggcgtgttaccggtgttcgagcctaaaggtcgcgtgcttctggttgatggccatcatctcgcgtatcgtaacttctttgccctgaaaggattaaccaccagcagcggcgagccggtacagggtgtctacggctttgcaaagtcgctcctgaaagctctgaaagaagacggtgatgtggtgattgttgtctttgatgcgaaagcgccaagttttcgccacgaagcgtacgaagcttacaaagccgggcgtgctccaacgccggaagactttcctcgccaattggcgcttatgaaggaattagtggatttgcttggcctcgaacgcttggaagttcccggtttcgaggcagacgacgtattagcgactctcgcaaagaaagccgaacgtgagggctatgaagtccagatcttgacagcagatcgcgatcttttccagcttttatctccgcgcatctcggtgttacacccggaagggcatcgtatcaccccggaatggctctgggagaaatatggtttgcgtcccgaacaatgggtggattttcgcgccttagcaggcgatccgagcgacaatattccgggagttaaaggtatcggcgagaagacggcgctcaagctccttaaagaatgggggtcgttggagaacttgcttaagaatttagatcaggtcaaaccagagtcagtgcgtgagaagattcttgctcacctcgaagacctcaaattaagccgcgaattgtcccgtgtacgcaccgatttgccgctcgaagttgatttccgtcgccgccgcgaacctgactgggagggtcttaaagcgtttttagagcgtcttgaatttggttcgctcttgcatgaattcggccttttagaaagcccgttaccagccgaagaagcaccttggccaccgcccgagggcgcgtttttaggttaccgtttgagtcgcccggaaccgatgtgggccgaattactggctcttgcagcgtctgcccagggacgtgtgtatcgcgcggaagaccctcatggtgcgctccgcggcctcttcgaagtccgtggactccttgccaaagacttagctgttgttgcattgcgcgaaggtcttgatttacctccgactgatgatccaatgcttcttgcgtacctcttggacccgtcaaacacgacgcccgaaggcgtagcccgtcgttacggcggcgagtggaccgaagatgcagcgaaacgcgcgttattggccgaacgtttgcacgccaatttattaggacgtttgcaaggcgaggaacgtctcctctggctttacgaagaagtggagaaaccattgagtcgcgtgctcgcgcatatggaagctaccggtgtcaaattagacgtggcgtatttggaggctctcagccttgaagttgctgcccacatgcgccgcttggaggaagaagtattccgtttagcaggccattcctttcgccttaattctcgcgatcagttagaacgtgtgttgttcgatgaacttggtctccctcctatcggcaagacagagaagaccggtaaacgtagcacttcagcggcggttttagaagctcttcgcgaagtccatcccattgtggacaagatcttgcagtaccgcgaaatggcgaaattgaaaggcacctatattgaccgtcttccggcattagtccacccgaaaacgggacgcctccatacccgcttcaaccaaacagccacggcgaccggtcgtttgtcctcctctgatccaaaccttcagaatattccagtacgtaccccattgggccagaagatccgccgtgcgtttgtagctgaggagggttggcgtttagtggccctcgattatagccaaattgaattacgtgtccttgcccatctttctggcgatgagaacctcatccgcgtgtttcaggaaggcaaagacattcacactcaaacggcaagctggatgtttggattatcagctgaagcgatcgatcctttgatgcgtcgtgcagcgaagaccatcaatttcggtgttctctacggtatgagtgcctttcgtttgtcgcaggaattaggcattccctatgaagaagctgcggcgttcattcagaaatactttcaaagctatcccaaagttaaagcatggatcgagaagactctcgaagaaggccgcacacgtggttacgtagagaccttatttggacgtcgccgctatgttcccgatttaaacgctcgcgtgaaaggcaagcgtgaagccgccgaacgcatggcgttcaacatgcctgtacagggcacggcagctgacctcatgaaacttgcaatggtgcgcctttttccacaattgcgtgaagttggtgcccgcatgctcttgcaggtccacgatgaactcttgttagaagcgccaaaagagcgtgcggaagaggtggcagccctcgcgaaagaagttatggaaggcgtgtggcccttagcggtgcctcttgaagtcgaagttggtattggcgaggattggctggctgccaaaggataatga

SEQ ID NO: 3212 - protein, 841 aa, synthetic construct
  REGION 1..841: note = Variant of DNA polymerase I from Thermus sp. strain 2.9
MHHHHHHGGSGVLPVFEPKGRVLLVDGHHLAYRNFFALKGLTTSSGEPVQGVYGFAKSLLKALKEDGDVVIVVFDAKAPSFRHEAYEAYKAGRAPTPEDFPRQLALMKELVDLLGLERLEVPGFEADDVLATLAKKAEREGYEVQILTADRDLFQLLSPRISVLHPEGHRITPEWLWEKYGLRPEQWVDFRALAGDPSDNIPGVKGIGEKTALKLLKEWGSLENLLKNLDQVKPESVREKILAHLEDLKLSRELSRVRTDLPLEVDFRRRREPDWEGLKAFLERLEFGSLLHEFGLLESPLPAEEAPWPPPEGAFLGYRLSRPEPMWAELLALAASAQGRVYRAEDPHGALRGLFEVRGLLAKDLAVVALREGLDLPPTDDPMLLAYLLDPSNTTPEGVARRYGGEWTEDAAKRALLAERLHANLLGRLQGEERLLWLYEEVEKPLSRVLAHMEATGVKLDVAYLEALSLEVAAHMRRLEEEVFRLAGHSFRLNSRDQLERVLFDELGLPPIGKTEKTGKRSTSAAVLEALREVHPIVDKILQYREMAKLKGTYIDRLPALVHPKTGRLHTRFNQTATATGRLSSSDPNLQNIPVRTPLGQKIRRAFVAEEGWRLVALDYSQIELRVLAHLSGDENLIRVFQEGKDIHTQTASWMFGLSAEAIDPLMRRAAKTINFGVLYGMSAFRLSQELGIPYEEAAAFIQKYFQSYPKVKAWIEKTLEEGRTRGYVETLFGRRRYVPDLNARVKGKREAAERMAFNMPVQGTAADLMKLAMVRLFPQLREVGARMLLQVHDELLLEAPKERAEEVAALAKEVMEGVWPLAVPLEVEVGIGEDWLAAKG

SEQ ID NO: 3213 - DNA, 2529 bp, synthetic construct
  misc_feature 1..2529: note = Variant of DNA polymerase I from Thermus sp. strain 2.9
  source 1..2529: mol_type = other DNA
atgcaccatcatcatcatcatggcggtagcggcgtgttaccggtgttcgagcctaaaggtcgcgtgcttctggttgatggccatcatctcgcgtatcgtaacttctttgccctgaaaggattaaccaccagcagcggcgagccggtacagggtgtctacggctttgcaaagtcgctcctgaaagctctgaaagaagacggtgatgtggtgattgttgtctttgatgcgaaagcgccaagttttcgccacgaagcgtacgaagcttacaaagccgggcgtgctccaacgccggaagactttcctcgccaattggcgcttatgaaggaattagtggatttgcttggcctcgaacgcttggaagttcccggtttcgaggcagacgacgtattagcgactctcgcaaagaaagccgaacgtgagggctatgaagtccagatcttgacagcagatcgcgatcttttccagcttttatctccgcgcatctcggtgttacacccggaagggcatcgtatcaccccggaatggctctgggagaaatatggtttgcgtcccgaacaatgggtggattttcgcgccttagcaggcgatccgagcgacaatattccgggagttaaaggtatcggcgagaagacggcgctcaagctccttaaagaatgggggtcgttggagaacttgcttaagaatttagatcaggtcaaaccagagtcagtgcgtgagaagattcttgctcacctcgaagacctcaaattaagccgcgaattgtcccgtgtacgcaccgatttgccgctcgaagttgatttccgtcgccgccgcgaacctgactgggagggtcttaaagcgtttttagagcgtcttgaatttggttcgctcttgcatgaattcggccttttagaaagcccgttaccagccgaagaagcaccttggccaccgcccgagggcgcgtttttaggttaccgtttgagtcgcccggaaccgatgtgggccgaattactggctcttgcagcgtctgcccagggacgtgtgtatcgcgcggaagaccctcatggtgcgctccgcggcctcttcgaagtccgtggactccttgccaaagacttagctgttgttgcattgcgcgaaggtcttgatttacctccgactgatgatccaatgcttcttgcgtacctcttggacccgtcaaacacgacgcccgaaggcgtagcccgtcgttacggcggcgagtggaccgaagatgcagcgaaacgcgcgttattggccgaacgtttgcacgaaaatttattaggacgtttgcaaggcgaggaacgtctcctctggctttacgaagaagtggagaaaccattgagtcgcgtgctcgcgcatatggaagctaccggtgtcaaattagacgtggcgtatttggaggctctcagccttgaagttgctgcccacatgcgccgcttggaggaagaagtattccgtttagcaggccattcctttcgccttaattctcgcgatcagttagaacgtgtgttgttcgatgaacttggtctccctcctatcggcaagacagagaagaccggtaaacgtagcacttcacgcgcggttttagaagctcttcgcgaagtccatcccattgtggacaagatcttgcagtaccgcgaactcgcgaaattgaaaggcacctatattgaccgtcttccggcattagtccacccgaaaacgggacgcctccatacccgcttcaaccaaacagccacggcgaccggtcgtttgtcctcctctgatccaaaccttcagaatattccagtacgtaccccattgggccagaagatccgccgtgcgtttgtagctgaggagggttggcgtttagtggccctcgattatagccaaattgaattacgtgtccttgcccatctttctggcgatgagaacctcatccgcgtgtttcaggaaggcaaagacattcacactcaaacggcaagctggatgtttggattatcagctgaagcgatcgatcctttgatgcgtcgtgcagcgaagaccatcaatttcggtgttctctacggtatgagtgcctttcgtttgtcgcaggaattaggcattccctatgaagaagctgcggcgttcattcagaaatactttcaaagctatcccaaagttaaagcatggatcgagaagactctcgaagaaggccgcacacgtggttacgtagagaccttatttggacgtcgccgctatgttcccgatttaaacgctcgcgtgaaaggcaagcgtgaagccgccgaacgcatggcgttcaacatgcctgtacagggcacggcagctgacctcatgaaacttgcaatggtgcgcctttttccacaattgcgtgaagttggtgcccgcatgctcttgcaggtccacgatgaactcttgttagaagcgccaaaagagcgtgcggaagaggtggcagccctcgcgaaagaagttatggaaggcgtgtggcccttagcggtgcctcttgaagtcgaagttggtattggcgaggattggctggctgccaaaggataatga

SEQ ID NO: 3214 - protein, 841 aa, synthetic construct
  REGION 1..841: note = Variant of DNA polymerase I from Thermus sp. strain 2.9
MHHHHHHGGSGVLPVFEPKGRVLLVDGHHLAYRNFFALKGLTTSSGEPVQGVYGFAKSLLKALKEDGDVVIVVFDAKAPSFRHEAYEAYKAGRAPTPEDFPRQLALMKELVDLLGLERLEVPGFEADDVLATLAKKAEREGYEVQILTADRDLFQLLSPRISVLHPEGHRITPEWLWEKYGLRPEQWVDFRALAGDPSDNIPGVKGIGEKTALKLLKEWGSLENLLKNLDQVKPESVREKILAHLEDLKLSRELSRVRTDLPLEVDFRRRREPDWEGLKAFLERLEFGSLLHEFGLLESPLPAEEAPWPPPEGAFLGYRLSRPEPMWAELLALAASAQGRVYRAEDPHGALRGLFEVRGLLAKDLAVVALREGLDLPPTDDPMLLAYLLDPSNTTPEGVARRYGGEWTEDAAKRALLAERLHENLLGRLQGEERLLWLYEEVEKPLSRVLAHMEATGVKLDVAYLEALSLEVAAHMRRLEEEVFRLAGHSFRLNSRDQLERVLFDELGLPPIGKTEKTGKRSTSRAVLEALREVHPIVDKILQYRELAKLKGTYIDRLPALVHPKTGRLHTRFNQTATATGRLSSSDPNLQNIPVRTPLGQKIRRAFVAEEGWRLVALDYSQIELRVLAHLSGDENLIRVFQEGKDIHTQTASWMFGLSAEAIDPLMRRAAKTINFGVLYGMSAFRLSQELGIPYEEAAAFIQKYFQSYPKVKAWIEKTLEEGRTRGYVETLFGRRRYVPDLNARVKGKREAAERMAFNMPVQGTAADLMKLAMVRLFPQLREVGARMLLQVHDELLLEAPKERAEEVAALAKEVMEGVWPLAVPLEVEVGIGEDWLAAKG

SEQ ID NO: 3215 - DNA, 2529 bp, synthetic construct
  misc_feature 1..2529: note = Variant of DNA polymerase I from Thermus sp. strain 2.9
  source 1..2529: mol_type = other DNA
atgcaccatcatcatcatcatggcggtagcggcgtgttaccggtgttcgagcctaaaggtcgcgtgcttctggttgatggccatcatctcgcgtatcgtaacttctttgccctgaaaggattaaccaccagcagcggcgagccggtacagggtgtctacggctttgcaaagtcgctcctgaaagctctgaaagaagacggtgatgtggtgattgttgtctttgatgcgaaagcgccaagttttcgccacgaagcgtacgaagcttacaaagccgggcgtgctccaacgccggaagactttcctcgccaattggcgcttatgaaggaattagtggatttgcttggcctcgaacgcttggaagttcccggtttcgaggcagacgacgtattagcgactctcgcaaagaaagccgaacgtgagggctatgaagtccagatcttgacagcagatcgcgatcttttccagcttttatctccgcgcatctcggtgttacacccggaagggcatcgtatcaccccggaatggctctgggagaaatatggtttgcgtcccgaacaatgggtggattttcgcgccttagcaggcgatccgagcgacaatattccgggagttaaaggtatcggcgagaagacggcgctcaagctccttaaagaatgggggtcgttggagaacttgcttaagaatttagatcaggtcaaaccagagtcagtgcgtgagaagattcttgctcacctcgaagacctcaaattaagccgcgaattgtcccgtgtacgcaccgatttgccgctcgaagttgatttccagcgccgccgcgaacctgactgggagggtcttaaagcgtttttagagcgtcttgaatttggttcgctcttgcatgaattcggccttttagaaagcccgttaccagccgaagaagcaccttggccaccgcccgagggcgcgtttttaggttaccgtttgagtcgcccggaaccgatgtgggccgaattactggctcttgcagcgtctgcccagggacgtgtgtatcgcgcggaagaccctcatggtgcgctccgcggcctcttcgaagtccgtggactccttgccaaagacttagctgttgttgcattgcgcgaaggtcttgatttacctccgactgatgatccaatgcttcttgcgtacctcttggacccgtcaaacacgacgcccgaaggcgtagcccgtcgttacggcggcgagtggaccgaagatgcagcgaaacgcgcgttattggccgaacgtttgcacgccaatttattaggacgtttgcaaggcgaggaacgtctcctctggctttacgaagaagtggagaaaccattgagtcgcgtgctcgcgcatatggaagctaccggtgtcaaattagacgtggcgtatttggaggctctcagccttgaagttgctgcccacatgcgccgcttggaggaagaagtattccgtttagcaggccattcctttcgccttaattctcgcgatcagttagaacgtgtgttgttcgatgaacttggtctccctcctatcggcaagacagagaagaccggtaaacgtagcacttcagcagcggttttagaagctcttcgcgaagtccatcccattgtggacaagatcttggtctaccgcgaactcgcgaaattgaaaggcacctatattgaccgtcttccggcattagtccacccgaaaacgggacgcctccatacccgcttcaaccaaacagccacggcgaccggtcgtttgtcctcctctgatccaaaccttcagaatattccagtacgtaccccattgggccagaagatccgccgtgcgtttgtagctgaggagggttggcgtttagtggccctcgattatagccaaattgaattacgtgtccttgcccatctttctggcgatgagaacctcatccgcgtgtttcaggaaggcaaagacattcacactcaaacggcaagctggatgtttggattatcagctgaagcgatcgatcctttgatgcgtcgtgcagcgaagaccatcaatttcggtgttctctacggtatgagtgcctttcgtttgtcgcaggaattaggcattccctatgaagaagctgcggcgttcattcagaaatactttcaaagctatcccaaagttaaagcatggatcgagaagactctcgaagaaggccgcacacgtggttacgtagagaccttatttggacgtcgccgctatgttcccgatttaaacgctcgcgtgaaaggcaagcgtgaagccgccgaacgcatggcgttcaacatgcctgtacagggcacggcagctgacctcatgaaacttgcaatggtgcgcctttttccacaattgcgtgaagttggtgcccgcatgctcttgcaggtccacgatgaactcttgttagaagcgccaaaagagcgtgcggaagaggtggcagccctcgcgaaagaagttatggaaggcgtgtggcccttagcggtgcctcttgaagtcgaagttggtattggcgaggattggctggctgccaaaggataatga

SEQ ID NO: 3216 - protein, 841 aa, synthetic construct
  REGION 1..841: note = Variant of DNA polymerase I from Thermus sp. strain 2.9
MHHHHHHGGSGVLPVFEPKGRVLLVDGHHLAYRNFFALKGLTTSSGEPVQGVYGFAKSLLKALKEDGDVVIVVFDAKAPSFRHEAYEAYKAGRAPTPEDFPRQLALMKELVDLLGLERLEVPGFEADDVLATLAKKAEREGYEVQILTADRDLFQLLSPRISVLHPEGHRITPEWLWEKYGLRPEQWVDFRALAGDPSDNIPGVKGIGEKTALKLLKEWGSLENLLKNLDQVKPESVREKILAHLEDLKLSRELSRVRTDLPLEVDFQRRREPDWEGLKAFLERLEFGSLLHEFGLLESPLPAEEAPWPPPEGAFLGYRLSRPEPMWAELLALAASAQGRVYRAEDPHGALRGLFEVRGLLAKDLAVVALREGLDLPPTDDPMLLAYLLDPSNTTPEGVARRYGGEWTEDAAKRALLAERLHANLLGRLQGEERLLWLYEEVEKPLSRVLAHMEATGVKLDVAYLEALSLEVAAHMRRLEEEVFRLAGHSFRLNSRDQLERVLFDELGLPPIGKTEKTGKRSTSAAVLEALREVHPIVDKILVYRELAKLKGTYIDRLPALVHPKTGRLHTRFNQTATATGRLSSSDPNLQNIPVRTPLGQKIRRAFVAEEGWRLVALDYSQIELRVLAHLSGDENLIRVFQEGKDIHTQTASWMFGLSAEAIDPLMRRAAKTINFGVLYGMSAFRLSQELGIPYEEAAAFIQKYFQSYPKVKAWIEKTLEEGRTRGYVETLFGRRRYVPDLNARVKGKREAAERMAFNMPVQGTAADLMKLAMVRLFPQLREVGARMLLQVHDELLLEAPKERAEEVAALAKEVMEGVWPLAVPLEVEVGIGEDWLAAKG

SEQ ID NO: 3217 - DNA, 2529 bp, synthetic construct
  misc_feature 1..2529: note = Variant of DNA polymerase I from Thermus sp. strain 2.9
  source 1..2529: mol_type = other DNA
atgcaccatcatcatcatcatggcggtagcggcgtgttaccggtgttcgagcctaaaggtcgcgtgcttctggttgatggccatcatctcgcgtatcgtaacttctttgccctgaaaggattaaccaccagcagcggcgagccggtacagggtgtctacggctttgcaaagtcgctcctgaaagctctgaaagaagacggtgatgtggtgattgttgtctttgatgcgaaagcgccaagttttcgccacgaagcgtacgaagcttacaaagccgggcgtgctccaacgccggaagactttcctcgccaattggcgcttatgaaggaattagtggatttgcttggcctcgaacgcttggaagttcccggtttcgaggcagacgacgtattagcgactctcgcaaagaaagccgaacgtgagggctatgaagtccagatcttgacagcagatcgcgatcttttccagcttttatctccgcgcatctcggtgttacacccggaagggcatcgtatcaccccggaatggctctgggagaaatatggtttgcgtcccgaacaatgggtggattttcgcgccttagcaggcgatccgagcgacaatattccgggagttaaaggtatcggcgagaagacggcgctcaagctccttaaagaatgggggtcgttggagaacttgcttaagaatttagatcaggtcaaaccagagtcagtgcgtgagaagattcttgctcacctcgaagacctcaaattaagccgcgaattgtcccgtgtacgcaccgatttgccgctcgaagttgatttccagcgccgccgcgaacctgactgggagggtcttaaagcgtttttagagcgtcttgaatttggttcgctcttgcatgaattcggccttttagaaagcccgttaccagccgaagaagcaccttggccaccgcccgagggcgcgtttttaggttaccgtttgagtcgcccggaaccgatgtgggccgaattactggctcttgcagcgtctgcccagggacgtgtgtatcgcgcggaagaccctcatggtgcgctccgcggcctcttcgaagtccgtggactccttgccaaagacttagctgttgttgcattgcgcgaaggtcttgatttacctccgactgatgatccaatgcttcttgcgtacctcttggacccgtcaaacacgacgcccgaaggcgtagcccgtcgttacggcggcgagtggaccgaagatgcagcgaaacgcgcgttattggccgaacgtttgcacgagaatttattaggacgtttgcaaggcgaggaacgtctcctctggctttacgaagaagtggagaaaccattgagtcgcgtgctcgcgcatatggaagctaccggtgtcaaattagacgtggcgtatttggaggctctcagccttgaagttgctgcccacatgcgccgcttggaggaagaagtattccgtttagcaggccattcctttcgccttaattctcgcgatcagttagaacgtgtgttgttcgatgaacttggtctccctcctatcggcaagacagagaagaccggtaaacgtagcacttcagcggcggttttagaagctcttcgcgaagtccatcccattgtggacaagatcttgcagtaccgcgaactcgcgaaattgaaaggcacctatattgaccgtcttccggcattagtccacccgaaaacgggacgcctccatacccgcttcaaccaaacagccacggcgaccggtcgtttgtcctcctctgatccaaaccttcagaatattccagtacgtaccccattgggccagaagatccgccgtgcgtttgtagctgaggagggttggcgtttagtggccctcgattatagccaaattgaattacgtgtccttgcccatctttctggcgatgagaacctcatccgcgtgtttcaggaaggcaaagacattcacactcaaacggcaagctggatgtttggattatcagctgaagcgatcgatcctttgatgcgtcgtgcagcgaagaccatcaatttcggtgttctctacggtatgagtgcctttcgtttgtcgcaggaattaggcattccctatgaagaagctgcggcgttcattcagaaatactttcaaagctatcccaaagttaaagcatggatcgagaagactctcgaagaaggccgcacacgtggttacgtagagaccttatttggacgtcgccgctatgttcccgatttaaacgctcgcgtgaaaggcaagcgtgaagccgccgaacgcatggcgttcaacatgcctgtacagggcacggcagctgacctcatgaaacttgcaatggtgcgcctttttccacaattgcgtgaagttggtgcccgcatgctcttgcaggtccacgatgaactcttgttagaagcgccaaaagagcgtgcggaagaggtggcagccctcgcgaaagaagttatggaaggcgtgtggcccttagcggtgcctcttgaagtcgaagttggtattggcgaggattggctggctgccaaaggataatga

SEQ ID NO: 3218 - protein, 841 aa, synthetic construct
  REGION 1..841: note = Variant of DNA polymerase I from Thermus sp. strain 2.9
MHHHHHHGGSGVLPVFEPKGRVLLVDGHHLAYRNFFALKGLTTSSGEPVQGVYGFAKSLLKALKEDGDVVIVVFDAKAPSFRHEAYEAYKAGRAPTPEDFPRQLALMKELVDLLGLERLEVPGFEADDVLATLAKKAEREGYEVQILTADRDLFQLLSPRISVLHPEGHRITPEWLWEKYGLRPEQWVDFRALAGDPSDNIPGVKGIGEKTALKLLKEWGSLENLLKNLDQVKPESVREKILAHLEDLKLSRELSRVRTDLPLEVDFQRRREPDWEGLKAFLERLEFGSLLHEFGLLESPLPAEEAPWPPPEGAFLGYRLSRPEPMWAELLALAASAQGRVYRAEDPHGALRGLFEVRGLLAKDLAVVALREGLDLPPTDDPMLLAYLLDPSNTTPEGVARRYGGEWTEDAAKRALLAERLHENLLGRLQGEERLLWLYEEVEKPLSRVLAHMEATGVKLDVAYLEALSLEVAAHMRRLEEEVFRLAGHSFRLNSRDQLERVLFDELGLPPIGKTEKTGKRSTSAAVLEALREVHPIVDKILQYRELAKLKGTYIDRLPALVHPKTGRLHTRFNQTATATGRLSSSDPNLQNIPVRTPLGQKIRRAFVAEEGWRLVALDYSQIELRVLAHLSGDENLIRVFQEGKDIHTQTASWMFGLSAEAIDPLMRRAAKTINFGVLYGMSAFRLSQELGIPYEEAAAFIQKYFQSYPKVKAWIEKTLEEGRTRGYVETLFGRRRYVPDLNARVKGKREAAERMAFNMPVQGTAADLMKLAMVRLFPQLREVGARMLLQVHDELLLEAPKERAEEVAALAKEVMEGVWPLAVPLEVEVGIGEDWLAAKG

SEQ ID NO: 3219 - DNA, 2529 bp, synthetic construct
  misc_feature 1..2529: note = Variant of DNA polymerase I from Thermus sp. strain 2.9
  source 1..2529: mol_type = other DNA
atgcaccatcatcatcatcatggcggtagcggcgtgttaccggtgttcgagcctaaaggtcgcgtgcttctggttgatggccatcatctcgcgtatcgtaacttctttgccctgaaaggattaaccaccagcagcggcgagccggtacagggtgtctacggctttgcaaagtcgctcctgaaagctctgaaagaagacggtgatgtggtgattgttgtctttgatgcgaaagcgccaagttttcgccacgaagcgtacgaagcttacaaagccgggcgtgctccaacgccggaagactttcctcgccaattggcgcttatgaaggaattagtggatttgcttggcctcgaacgcttggaagttcccggtttcgaggcagacgacgtattagcgactctcgcaaagaaagccgaacgtgagggctatgaagtccagatcttgacagcagatcgcgatcttttccagcttttatctccgcgcatctcggtgttacacccggaagggcatcgtatcaccccggaatggctctgggagaaatatggtttgcgtcccgaacaatgggtggattttcgcgccttagcaggcgatccgagcgacaatattccgggagttaaaggtatcggcgagaagacggcgctcaagctccttaaagaatgggggtcgttggagaacttgcttaaaaatttagatcaggtcaaaccagagtcagtgcgtgagaagattcttgctcacctcgaagacctcaaattaagccgcgaattgtcccgtgtacgcaccgatttgccgctcgaagttgatttccagcgccgccgcgaacctgactgggagggtcttaaagcgtttttagagcgtcttgaatttggttcgctcttgcatgaattcggccttttagaaagcccgttactggccgaagaagcaccttggccaccgcccgagggcgcgtttttaggttaccgtttgagtcgcccggaaccgatgtgggccgaattactggctcttgcagcgtctgcccagggaaccgtgtatcgcgcggaagaccctcatggtgcgctccgcggcctcttcgaagtcaatggactccttgccaaagacttagctgttgttgcattgcgcgaaggtcttgatttacctccgactgatgatccaatgcttcttgcgtacctcttggacccgtcaaacacgacgcccgaaggcgtagcccgtcgttacggcggcgagtggaccgaagatgcagcgaaacgcgcgttattggccgaacgtttgcacgccaatttattaggacgtttgcaaggcgaggaacgtctcctctggctttacgaagaagtggagaaaccattgagtcgcgtgctcgcgcatatggaagctaccggtgtcaaattagacgtggcgtatttggaggctctcagccttgaagttgctgcccacatgcgccgcttggaggaagaagtattccgtttagcaggccattcctttcgccttaattctcgcgatcagttagaacgtgtgttgttcgatgaacttggtctccctcctatcggcaagacagagaagaccggtaaacgtagcacttcagcggcggttttagaagctcttcgcgaagtccatcccattgtggacaagatcttgcagtaccgcgaactcgcgaaattgaaaggcacctatattgaccgtcttccggcattagtccacccgaaaacgggacgcctccatacccgcttcaaccaaacagccacggcgaccggtcgtttgtcctcctctgatccaaaccttcagaatattccagtacgtaccccattgggccagaagatccgcaaagcgtttgtagctgaggagggttggcgtttagtggccctcgattatagccaaattgaattacgtgtccttgcccatctttctggcgatgagaacctcatccgcgtgtttcaggaaggcaaagacattcacactcaaacggcaagctggatgtttggattatcagctgaagcgatcgatcctttgatgcgtcgtgcagcgaagaccatcaatttcggtgttctctacggtatgagtgcctttcgtttgtcgcaggaattaggcattccctatgaggaagctcaagcgttcattcagaaatactttcaaagctatcccaaagttaaagcatggatcgagaagactctcgaagaaggccgcacacgtggttacgtagagaccttatttggacgtcgccgctatgttcccgatttaaacgctcgcgtgaaaggcaagcgtgaagccgccgaacgcatggcgttcaacatgcctgtacagggcacggcagctgacctcatgaaacttgcaatggtgcgcctttttccacaattgcgtgaagttggtgcccgcatgctcttgcaggtccacgatgaactcttgttagaagcgccaaaagagcgtgcggaagaggtggcagccctcgcgaaagaagttatggaaggcgtgtggcccttagcggtgcctcttgaagtcgaagttggtattggcgaggattggctggctgccaaaggataatga

SEQ ID NO: 3220 - protein, 841 aa, synthetic construct
  REGION 1..841: note = Variant of DNA polymerase I from Thermus sp. strain 2.9
MHHHHHHGGSGVLPVFEPKGRVLLVDGHHLAYRNFFALKGLTTSSGEPVQGVYGFAKSLLKALKEDGDVVIVVFDAKAPSFRHEAYEAYKAGRAPTPEDFPRQLALMKELVDLLGLERLEVPGFEADDVLATLAKKAEREGYEVQILTADRDLFQLLSPRISVLHPEGHRITPEWLWEKYGLRPEQWVDFRALAGDPSDNIPGVKGIGEKTALKLLKEWGSLENLLKNLDQVKPESVREKILAHLEDLKLSRELSRVRTDLPLEVDFQRRREPDWEGLKAFLERLEFGSLLHEFGLLESPLLAEEAPWPPPEGAFLGYRLSRPEPMWAELLALAASAQGTVYRAEDPHGALRGLFEVNGLLAKDLAVVALREGLDLPPTDDPMLLAYLLDPSNTTPEGVARRYGGEWTEDAAKRALLAERLHANLLGRLQGEERLLWLYEEVEKPLSRVLAHMEATGVKLDVAYLEALSLEVAAHMRRLEEEVFRLAGHSFRLNSRDQLERVLFDELGLPPIGKTEKTGKRSTSAAVLEALREVHPIVDKILQYRELAKLKGTYIDRLPALVHPKTGRLHTRFNQTATATGRLSSSDPNLQNIPVRTPLGQKIRKAFVAEEGWRLVALDYSQIELRVLAHLSGDENLIRVFQEGKDIHTQTASWMFGLSAEAIDPLMRRAAKTINFGVLYGMSAFRLSQELGIPYEEAQAFIQKYFQSYPKVKAWIEKTLEEGRTRGYVETLFGRRRYVPDLNARVKGKREAAERMAFNMPVQGTAADLMKLAMVRLFPQLREVGARMLLQVHDELLLEAPKERAEEVAALAKEVMEGVWPLAVPLEVEVGIGEDWLAAKG

SEQ ID NO: 3221 - DNA, 2529 bp, synthetic construct
  misc_feature 1..2529: note = Variant of DNA polymerase I from Thermus sp. strain 2.9
  source 1..2529: mol_type = other DNA
atgcaccatcatcatcatcatggcggtagcggcgtgttaccggtgttcgagcctaaaggtcgcgtgcttctggttgatggccatcatctcgcgtatcgtaacttctttgccctgaaaggattaaccaccagctcgggcgagccggtacagggtgtctacggctttgcaaagtcgctcctgaaagctctgaaagaagacggtgatgtggtgattgttgtctttgatgcgaaagcgccaagttttcgccacgaagcgtacgaagcttacaaagccgggcgtgctccaacgccggaagactttcctcgccaattggcgcttatgaaggaattagtggatttgcttggcctcgaacgcttggaagttcccggtttcgaggcagacgacgtattagcgactctcgcaaagaaagccgaacgtgagggctatgaagtccagatcttgacagcagatcgcgatcttttccagcttttatctccgcgcatctcggtgttacacccggaagggcatcgtatcaccccggaatggctctgggagaaatatggtttgcgtcccgaacaatgggtggattttcgcgccttagcaggcgatccgagcgacaatattccgggagttaaaggtatcggcgagaagacggcgctcaagctccttaaagaatgggggtcgttggagaacttgcttgaaaatttagatcaggtcaaaccagagtcagtgcgtgagaagattcttgctcacctcgaagacctcaaattaagccgcgaattgtcccgtgtacgcaccgatttgccgctcgaagttgatttccgtcgccgccgcgaacctgactgggagggtcttaaagcgtttttagagcgtcttgaatttggttcgctcttgcatgaattcggccttttagaaagcccgttaccagccgaagaagcaccttggccaccgcccgagggcgcgtttttaggttaccgtttgagtcgcccggaaccgatgtgggccgaattactggctcttgcagcgtctgcccagggacgtgtgtatcgcgcggaagaccctcatggtgcgctccgcggcctcttcgaagtccgtggactccttgccaaagacttagctgttgttgcattgcgcgaaggtcttgatttacctccgactgatgatccaatgcttcttgcgtacctcttggacccgtcaaacacgacgcccgaaggcgtagcccgtcgttacggcggcgagtggaccgaagatgcagcgaaacgcgcgttattggccgaacgtttgcacgccaatttattaggacgtttgcaaggcgaggaacgtctcctctggctttacgaagaagtggagaaaccattgagtcgcgtgctcgcgcatatggaagctaccggtgtcaaattagacgtggcgtatttggaggctctcagccttgaagttgctgcccacatgcgccgcttggaggaagaagtattccgtttagcaggccattcctttcgccttaattctcgcgatcagttagaacgtgtgttgttcgatgaacttggtctccctcctatcggcaagacagagaagaccggtaaacgtagcacttcacgcgcggttttagaagctcttcgcgaagtccatcccattgtggacaagatcttgcaataccgcgaactcgcgaaattgaaaggcacctatattgaccgtcttccggcattagtccacccgaaaacgggacgcctccatacccgcttcaaccaaacagccacggcgaccggtcgtttgtcctcctctgatccaaaccttcagaatattccagtacgtaccccattgggccagaagatccgccgcgcgtttgtagctgaggagggttggcgtttagtggccctcgattatagccaaattgaattacgtgtccttgcccatctttctggcgatgagaacctcatccgcgtgtttcaggaaggcaaagacattcacactcaaacggcaagctggatgtttggattatcagctgaagcgatcgatcctttgatgcgtcgtgcagcgaagaccatcaatttcggtgttctctacggtatgagtgcctttcgtttgtcgcaggaattaggcattccctatgaagaagctgcggcgttcattcagaaatactttcaaagctatcccaaagttaaagcatggatcgagaagactctcgaagaaggccgcacacgtggttacgtagagaccttatttggacgtcgccgctatgttcccgatttaaacgctcgcgtgaaaggcaagcgtgaagccgccgaacgcatggcgttcaacatgcctgtacagggcacggcagctgacctcatgaaacttgcaatggtgcgcctttttccacaattgcgtgaagttggtgcccgcatgctcttgcaggtccacgatgaactcttgttagaagcgccaaaagagcgtgcggaagaggtggcagccctcgcgaaagaagttatggaaggcgtgtggcccttagcggtgcctcttgaagtcgaagttggtattggcgaggattggctggctgccaaaggataatga

SEQ ID NO: 3222 - protein, 841 aa, synthetic construct
  REGION 1..841: note = Variant of DNA polymerase I from Thermus sp. strain 2.9
MHHHHHHGGSGVLPVFEPKGRVLLVDGHHLAYRNFFALKGLTTSSGEPVQGVYGFAKSLLKALKEDGDVVIVVFDAKAPSFRHEAYEAYKAGRAPTPEDFPRQLALMKELVDLLGLERLEVPGFEADDVLATLAKKAEREGYEVQILTADRDLFQLLSPRISVLHPEGHRITPEWLWEKYGLRPEQWVDFRALAGDPSDNIPGVKGIGEKTALKLLKEWGSLENLLENLDQVKPESVREKILAHLEDLKLSRELSRVRTDLPLEVDFRRRREPDWEGLKAFLERLEFGSLLHEFGLLESPLPAEEAPWPPPEGAFLGYRLSRPEPMWAELLALAASAQGRVYRAEDPHGALRGLFEVRGLLAKDLAVVALREGLDLPPTDDPMLLAYLLDPSNTTPEGVARRYGGEWTEDAAKRALLAERLHANLLGRLQGEERLLWLYEEVEKPLSRVLAHMEATGVKLDVAYLEALSLEVAAHMRRLEEEVFRLAGHSFRLNSRDQLERVLFDELGLPPIGKTEKTGKRSTSRAVLEALREVHPIVDKILQYRELAKLKGTYIDRLPALVHPKTGRLHTRFNQTATATGRLSSSDPNLQNIPVRTPLGQKIRRAFVAEEGWRLVALDYSQIELRVLAHLSGDENLIRVFQEGKDIHTQTASWMFGLSAEAIDPLMRRAAKTINFGVLYGMSAFRLSQELGIPYEEAAAFIQKYFQSYPKVKAWIEKTLEEGRTRGYVETLFGRRRYVPDLNARVKGKREAAERMAFNMPVQGTAADLMKLAMVRLFPQLREVGARMLLQVHDELLLEAPKERAEEVAALAKEVMEGVWPLAVPLEVEVGIGEDWLAAKG

SEQ ID NO: 3223 - DNA, 2529 bp, synthetic construct
  misc_feature 1..2529: note = Variant of DNA polymerase I from Thermus sp. strain 2.9
  source 1..2529: mol_type = other DNA
atgcaccatcatcatcatcatggcggtagcggcgtgttaccggtgttcgagcctaaaggtcgcgtgcttctggttgatggccatcatctcgcgtatcgtaacttctttgccctgaaaggattaaccaccagcagcggcgagccggtacagggtgtctacggctttgcaaagtcgctcctgaaagctctgaaagaagacggtgatgtggtgattgttgtctttgatgcgaaagcgccaagttttcgccacgaagcgtacgaagcttacaaagccgggcgtgctccaacgccggaagactttcctcgccaattggcgcttatgaaggaattagtggatttgcttggcctcgaacgcttggaagttcccggtttcgaggcagacgacgtattagcgactctcgcaaagaaagccgaacgtgagggctatgaagtccagatcttgacagcagatcgcgatcttttccagcttttatctccgcgcatctcggtgttacacccggaagggcatcgtatcaccccggaatggctctgggagaaatatggtttgcgtcccgaacaatgggtggattttcgcgccttagcaggcgatccgagcgacaatattccgggagttaaaggtatcggcgagaagacggcgctcaagctccttaaagaatgggggtcgttggagaacttgcttaagaatttagatcaggtcaaaccagagtcagtgcgtgagaagattcttgctcacctcgaagacctcaaattaagccgcgaattgtcccgtgtacgcaccgatttgccgctcgaagttgatttccgtcgccgccgcgaacctgactgggagggtcttaaagcgtttttagagcgtcttgaatttggttcgctcttgcatgaattcggccttttagaaagcccgttaccagccgaagaagcaccttggccaccgcccgagggcgcgtttttaggttaccgtttgagtcgcccggaaccgatgtgggccgaattactggctcttgcagcgtctgcccagggacgtgtgtatcgcgcggaagaccctcatggtgcgctccgcggcctcttcgaagtccgtggactccttgccaaagacttagctgttgttgcattgcgcgaaggtcttgatttacctccgactgatgatccaatgcttcttgcgtacctcttggacccgtcaaacacgacgcccgaaggcgtagcccgtcgttacggcggcgagtggaccgaagatgcagcgaaacgcgcgttattggccgaacgtttgcacgccaatttattaggacgtttgcaaggcgaggaacgtctcctctggctttacgaagaagtggagaaaccattgagtcgcgtgctcgcgcatatggaagctaccggtgtcaaattagacgtggcgtatttggaggctctcagccttgaagttgctgcccacatgcgccgcttggaggaagaagtattccgtttagcaggccattcctttcgccttaattctcgcgatcagttagaacgtgtgttgttcgatgaacttggtctccctcctatcggcaagacagagaagaccggtaaacgtagcacttcagcggcggttttagaagctcttcgcgaagtccatcccattgtggacaagatcttgcagtaccgcgaactcgcgaaattgaaaggcacctatattgaccgtcttccggcattagtccacccgaaaacgggacgcctccatacccgcttcaaccaaacagccacggcgaccggtcgtttgtcctcctctgatccaaaccttcagaatattccagtacgtaccccattgggccagaagatccgccgtgcgtttgtagctgaggagggttggcgtttagtggccctcgattatagccaaattgaattacgtgtccttgcccatctttctggcgatgagaacctcatccgcgtgtttcaggaaggcaaagacattcacactcaaacggcaagctggatgtttggattatcagctgaagcgatcgatcctttgatgcgtcgtgcagcgaagaccatcaatttcggtgttctctacggtatgagtgcctttcgtttgtcgcaggaattaggcattccctatgaagaagctgcggcgttcattcagaaatactttcaaagctatcccaaagttaaagcatggagggagaagactctcgaagaaggccgcacacgtggttacgtagagaccttatttggacgtcgccgctatgttcccgatttaaacgctcgcgtgaaaggcaagcgtgaagccgccgaacgcatggcgttcaacatgcctgtacagggcacggcagctgacctcatgaaacttgcaatggtgcgcctttttccacaattgcgtgaagttggtgcccgcatgctcttgcaggtccacgatgaactcttgttagaagcgccaaaagagcgtgcggaagaggtggcagccctcgcgaaagaagttatggaaggcgtgtggcccttagcggtgcctcttgaagtcgaagttggtattggcgaggattggctggctgccaaaggataatga

SEQ ID NO: 3224 - protein, 841 aa, synthetic construct
  REGION 1..841: note = Variant of DNA polymerase I from Thermus sp. strain 2.9
MHHHHHHGGSGVLPVFEPKGRVLLVDGHHLAYRNFFALKGLTTSSGEPVQGVYGFAKSLLKALKEDGDVVIVVFDAKAPSFRHEAYEAYKAGRAPTPEDFPRQLALMKELVDLLGLERLEVPGFEADDVLATLAKKAEREGYEVQILTADRDLFQLLSPRISVLHPEGHRITPEWLWEKYGLRPEQWVDFRALAGDPSDNIPGVKGIGEKTALKLLKEWGSLENLLKNLDQVKPESVREKILAHLEDLKLSRELSRVRTDLPLEVDFRRRREPDWEGLKAFLERLEFGSLLHEFGLLESPLPAEEAPWPPPEGAFLGYRLSRPEPMWAELLALAASAQGRVYRAEDPHGALRGLFEVRGLLAKDLAVVALREGLDLPPTDDPMLLAYLLDPSNTTPEGVARRYGGEWTEDAAKRALLAERLHANLLGRLQGEERLLWLYEEVEKPLSRVLAHMEATGVKLDVAYLEALSLEVAAHMRRLEEEVFRLAGHSFRLNSRDQLERVLFDELGLPPIGKTEKTGKRSTSAAVLEALREVHPIVDKILQYRELAKLKGTYIDRLPALVHPKTGRLHTRFNQTATATGRLSSSDPNLQNIPVRTPLGQKIRRAFVAEEGWRLVALDYSQIELRVLAHLSGDENLIRVFQEGKDIHTQTASWMFGLSAEAIDPLMRRAAKTINFGVLYGMSAFRLSQELGIPYEEAAAFIQKYFQSYPKVKAWREKTLEEGRTRGYVETLFGRRRYVPDLNARVKGKREAAERMAFNMPVQGTAADLMKLAMVRLFPQLREVGARMLLQVHDELLLEAPKERAEEVAALAKEVMEGVWPLAVPLEVEVGIGEDWLAAKG

SEQ ID NO: 3225 - DNA, 2529 bp, synthetic construct
  misc_feature 1..2529: note = Variant of DNA polymerase I from Thermus sp. strain 2.9
  source 1..2529: mol_type = other DNA
atgcaccatcatcatcatcatggcggtagcggcgtgttaccggtgttcgagcctaaaggtcgcgtgcttctggttgatggccatcatctcgcgtatcgtaacttctttgccctgaaaggattaaccaccagctcgggcgagccggtacagggtgtctacggctttgcaaagtcgctcctgaaagctctgaaagaagacggtgatgtggtgattgttgtctttgatgcgaaagcgccaagttttcgccacgaagcgtacgaagcttacaaagccgggcgtgctccaacgccggaagactttcctcgccaattggcgcttatgaaggaattagtggatttgcttggcctcgaacgcttggaagttcccggtttcgaggcagacgacgtattagcgactctcgcaaagaaagccgaacgtgagggctatgaagtccagatcttgacagcagatcgcgatcttttccagcttttatctccgcgcatctcggtgttacacccggaagggcatcgtatcaccccggaatggctctgggagaaatatggtttgcgtcccgaacaatgggtggattttcgcgccttagcaggcgatccgagcgacaatattccgggagttaaaggtatcggcgagaagacggcgctcaagctccttaaagaatgggggtcgttggagaacttgcttaagaatttagatcaggtcaaaccagagtcagtgcgtgagaagattcttgctcacctcgaagacctcaaattaagccgcgaattgtcccgtgtacgcaccgatttgccgctcgaagttgatttccgtcgccgccgcgaacctgactgggagggtcttaaagcgtttttagagcgtcttgaatttggttcgctcttgcatgaattcggccttttagaaagcccgttaccggccgaagaagcaccttggccaccgcccgagggcgcgtttttaggttaccgtttgagtcgcccggaaccgatgtgggccgaattactggctcttgcagcgtctgcccagggacgcgtgtatcgcgcggaagaccctcatggtgcgctccgcggcctcttcgaagtccgtggactccttgccaaagacttagctgttgttgcattgcgcgaaggtcttgatttacctccgactgatgatccaatgcttcttgcgtacctcttggacccgtcaaacacgacgcccgaaggcgtagcccgtcgttacggcggcgagtggaccgaagatgcagcgaaacgcgcgttattggccgaacgtttgcacgccaatttattaggacgtttgcaaggcgaggaacgtctcctctggctttacgaagaagtggagaaaccattgagtcgcgtgctcgcgcatatggaagctaccggtgtcaaattagacgtggcgtatttggaggctctcagccttgaagttgctgcccacatgcgccgcttggaggaagaagtattccgtttagcaggccactcctttcgccttagctctcgcgatcagttagaacgtgtgttgttcgatgaacttggtctccctcctatcggcaagacagagaagaccggtaaacgtagcacttcagccgcggttttagaagctcttcgcgaagtccatcccattgtggacaagatcttgcagtaccgcgaactcgcgaaattgaaaggcacctatattgaccgtcttccggcattagtccacccgaaaacgggacgcctccatacccgcttcaaccaaacagccacggcgaccggtcgtttgtcctcctctgatccaaaccttcagaatattccagtacgtaccccattgggccagaagatccgccgcgcgtttgtagctgaggagggttggcgtttagtggccctcgattatagccaaattgaattacgtgtccttgcccatctttctggcgatgagaacctcatccgcgtgtttcaggaaggcaaagacattcacactcaaacggcaagctggatgtttggattatcagctgaagcgatcgatcctttgatgcgtcgtgcagcgaagaccatcaatttcggtgttctctacggtatgagtgcctttcgtttgtcgcaggaattaggcattccctatgaggaagcttcggcgttcattcagaaatactttcaaagctatcccaaagttaaagcatggatcgagaagactctcgaagaaggccgcacacgtggttacgtagagaccttatttggacgtcgccgctatgttcccgatttaaacgctcgcgtgaaaggcaagcgtgaagccgccgaacgcatggcgttcaacatgcctgtacagggcacggcagctgacctcatgaaacttgcaatggtgcgcctttttccacaattgcgtgaagttggtgcccgcatgctcttgcaggtccacgatgaactcttgttagaagcgccaaaagagcgtgcggaagaggtggcagccctcgcgaaagaagttatggaaggcgtgtggcccttagcggtgcctcttgaagtcgaagttggtattggcgaggattggctggctgccaaaggataatga

SEQ ID NO: 3226 - protein, 841 aa, synthetic construct
  REGION 1..841: note = Variant of DNA polymerase I from Thermus sp. strain 2.9
MHHHHHHGGSGVLPVFEPKGRVLLVDGHHLAYRNFFALKGLTTSSGEPVQGVYGFAKSLLKALKEDGDVVIVVFDAKAPSFRHEAYEAYKAGRAPTPEDFPRQLALMKELVDLLGLERLEVPGFEADDVLATLAKKAEREGYEVQILTADRDLFQLLSPRISVLHPEGHRITPEWLWEKYGLRPEQWVDFRALAGDPSDNIPGVKGIGEKTALKLLKEWGSLENLLKNLDQVKPESVREKILAHLEDLKLSRELSRVRTDLPLEVDFRRRREPDWEGLKAFLERLEFGSLLHEFGLLESPLPAEEAPWPPPEGAFLGYRLSRPEPMWAELLALAASAQGRVYRAEDPHGALRGLFEVRGLLAKDLAVVALREGLDLPPTDDPMLLAYLLDPSNTTPEGVARRYGGEWTEDAAKRALLAERLHANLLGRLQGEERLLWLYEEVEKPLSRVLAHMEATGVKLDVAYLEALSLEVAAHMRRLEEEVFRLAGHSFRLSSRDQLERVLFDELGLPPIGKTEKTGKRSTSAAVLEALREVHPIVDKILQYRELAKLKGTYIDRLPALVHPKTGRLHTRFNQTATATGRLSSSDPNLQNIPVRTPLGQKIRRAFVAEEGWRLVALDYSQIELRVLAHLSGDENLIRVFQEGKDIHTQTASWMFGLSAEAIDPLMRRAAKTINFGVLYGMSAFRLSQELGIPYEEASAFIQKYFQSYPKVKAWIEKTLEEGRTRGYVETLFGRRRYVPDLNARVKGKREAAERMAFNMPVQGTAADLMKLAMVRLFPQLREVGARMLLQVHDELLLEAPKERAEEVAALAKEVMEGVWPLAVPLEVEVGIGEDWLAAKG

SEQ ID NO: 3227 - DNA, 2529 bp, synthetic construct
  misc_feature 1..2529: note = Variant of DNA polymerase I from Thermus sp. strain 2.9
  source 1..2529: mol_type = other DNA
atgcaccatcatcatcatcatggcggtagcggcgtgttaccggtgttcgagcctaaaggtcgcgtgcttctggttgatggccatcatctcgcgtatcgtaacttctttgccctgaaaggattaaccaccagcctgggcgagccggtacagggtgtctacggctttgcaaagtcgctcctgaaagctctgaaagaagacggtgatgtggtgattgttgtctttgatgcgaaagcgccaagttttcgccacgaagcgtacgaagcttacaaagccgggcgtgctccaacgccggaagactttcctcgccaattggcgcttatgaaggaattagtggatttgcttggcctcgaacgcttggaagttcccggtttcgaggcagacgacgtattagcgactctcgcaaagaaagccgaacgtgagggctatgaagtccagatcttgacagcagatcgcgatcttttccagcttttatctccgcgcatctcggtgttacacccggaagggcatcgtatcaccccggaatggctctgggagaaatatggtttgcgtcccgaacaatgggtggattttcgcgccttagcaggcgatccgagcgacaatattccgggagttaaaggtatcggcgagaagacggcgctcaagctccttaaagaatgggggtcgttggagaacttgcttaagaatttagatcaggtcaaaccagagtcagtgcgtgagaagattcttgctcacctcgaagacctcaaattaagccgcgaattgtcccgtgtacgcaccgatttgccgctcgaagttgatttccgtcgccgccgcgaacctgactgggagggtcttaaagcgtttttagagcgtcttgaatttggttcgctcttgcatgaattcggccttttagaaagcccgttaccagccgaagaagcaccttggccaccgcccgagggcgcgtttttaggttaccgtttgagtcgcccggaaccgatgtgggccgaattagcggctcttgcagcgtctgcccagggacgtgtgtatcgcgcggaagaccctcatggtgcgctccgcggcctcttcgaagtccgtggactccttgccaaagacttagctgttgttgcattgcgcgaaggtcttgatttacctccgactgatgatccaatgcttcttgcgtacctcttggacccgtcaaacacgacgcccgaaggcgtagcccgtcgttacggcggcgagtggaccgaagatgcagcgaaacgcgcgttattggccgaacgtttgcacgccaatttattaggacgtttgcaaggcgaggaacgtctcctctggctttacgaagaagtggagaaaccattgagtcgcgtgctcgcgcatatggaagctaccggtgtcaaattagacgtggcgtatttggaggctctcagccttgaagttgctgcccacatgcgccgcttggaggaagaagtattccgtttagcaggccgctcctttcgccttaactctcgcgatcagttagaacgtgtgttgttcgatgaacttggtctccctcctatcggcaagacagagaagaccggtaaacgtagcacttcagcggcggttttagaagctcttcgcgaagtccatcccattgtggacaagatcttgcagtaccgcgaactcgcgaaattgaaaggcacctatattgaccgtcttccggcattagtccacccgaaaacgggacgcctccatacccgcttcaaccaaacagccacggcgaccggtcgtttgtcctcctctgatccaaaccttcagaatattccagtacgtaccccattgggccagaagatccgccgtgcgtttgtagctgaggagggttggcgtttagtggccctcgattatagtcaaattgaattacgtgtccttgcccatctttctggcgatgagaacctcatccgcgtgtttcaggaaggcaaagacattcacactcaaacggcaagctggatgtttggattatcagctgaagcgatcgatcctttgatgcgtcgtgcagcgaagaccatcaatttcggtgttctctacggtatgagtgcctttcgtttgtcgcaggaattaggcattccctatgaagaagctgcggcgttcattcagaaatactttcaaagctatcccaaagttaaagcatggatcgagaagactctcgaagaaggccgcacacgtggttacgtagagaccttatttggacgtcgccgctatgttcccgatttaaacgctcgcgtgaaaggcaagcgtgaagccgccgaacgcatggcgttcaacatgcctgtacagggcacggcagctgacctcatgaaacttgcaatggtgcgcctttttccacaattgcgtgaagttggtgcccgcatgctcttgcaggtccacgatgaactcttgttagaagcgccaaaagagcgtgcggaagaggtggcagccctcgcgaaagaagttatggaaggcgtgtggcccttagcggtgcctcttgaagtcgaagttggtattggcgaggattggctggctgccaaaggataatga

SEQ ID NO: 3228 - protein, 841 aa, synthetic construct
  REGION 1..841: note = Variant of DNA polymerase I from Thermus sp. strain 2.9
MHHHHHHGGSGVLPVFEPKGRVLLVDGHHLAYRNFFALKGLTTSLGEPVQGVYGFAKSLLKALKEDGDVVIVVFDAKAPSFRHEAYEAYKAGRAPTPEDFPRQLALMKELVDLLGLERLEVPGFEADDVLATLAKKAEREGYEVQILTADRDLFQLLSPRISVLHPEGHRITPEWLWEKYGLRPEQWVDFRALAGDPSDNIPGVKGIGEKTALKLLKEWGSLENLLKNLDQVKPESVREKILAHLEDLKLSRELSRVRTDLPLEVDFRRRREPDWEGLKAFLERLEFGSLLHEFGLLESPLPAEEAPWPPPEGAFLGYRLSRPEPMWAELAALAASAQGRVYRAEDPHGALRGLFEVRGLLAKDLAVVALREGLDLPPTDDPMLLAYLLDPSNTTPEGVARRYGGEWTEDAAKRALLAERLHANLLGRLQGEERLLWLYEEVEKPLSRVLAHMEATGVKLDVAYLEALSLEVAAHMRRLEEEVFRLAGRSFRLNSRDQLERVLFDELGLPPIGKTEKTGKRSTSAAVLEALREVHPIVDKILQYRELAKLKGTYIDRLPALVHPKTGRLHTRFNQTATATGRLSSSDPNLQNIPVRTPLGQKIRRAFVAEEGWRLVALDYSQIELRVLAHLSGDENLIRVFQEGKDIHTQTASWMFGLSAEAIDPLMRRAAKTINFGVLYGMSAFRLSQELGIPYEEAAAFIQKYFQSYPKVKAWIEKTLEEGRTRGYVETLFGRRRYVPDLNARVKGKREAAERMAFNMPVQGTAADLMKLAMVRLFPQLREVGARMLLQVHDELLLEAPKERAEEVAALAKEVMEGVWPLAVPLEVEVGIGEDWLAAKG

SEQ ID NO: 3229 - DNA, 2529 bp, synthetic construct
  misc_feature 1..2529: note = Variant of DNA polymerase I from Thermus sp. strain 2.9
  source 1..2529: mol_type = other DNA
atgcaccatcatcatcatcatggcggtagcggcgtgttaccggtgttcgagcctaaaggtcgcgtgcttctggttgatggccatcatctcgcgtatcgtaacttctttgccctgaaaggattaaccaccagctcgggcgagccggtacagggtgtctacggctttgcaaagtcgctcctgaaagctctgaaagaagacggtgatgtggtgattgttgtctttgatgcgaaagcgccaagttttcgccacgaagcgtacgaagcttacaaagccgggcgtgctccaacgccggaagactttcctcgccaattggcgcttatgaaggaattagtggatttgcttggcctcgaacgcttggaagttcccggtttcgaggcagacgacgtattagcgactctcgcaaagaaagccgaacgtgagggctatgaagtccagatcttgacagcagatcgcgatcttttccagcttttatctccgcgcatctcggtgttacacccggaagggcatcgtatcaccccggaatggctctgggagaaatatggtttgcgtcccgaacaatgggtggattttcgcgccttagcaggcgatccgagcgacaatattccgggagttaaaggtatcggcgagaagacggcgctcaagctccttaaagaatgggggtcgttggagaacttgcttgaaaatttagatcaggtcaaaccagagtcagtgcgtgagaagattcttgctcacctcgaagacctcaaattaagccgcgaattgtcccgtgtacgcaccgatttgccgctcgaagttgatttccgtcgccgccgcgaacctgactgggagggtcttaaagcgtttttagagcgtcttgaatttggttcgctcttgcatgaattcggccttttagaaagcccgttaccagccgaagaagcaccttggccaccgcccgagggcgcgtttttaggttaccgtttgagtcgcccggaaccgatgtgggccgaattactggctcttgcagcgtctgcccagggacgcgtgtatcgcgcggaagaccctcatggtgcgctccgcggcctcttcgaagtccgtggactccttgccaaagacttagctgttgttgcattgcgcgaaggtcttgatttacctccgactgatgatccaatgcttcttgcgtacctcttggacccgtcaaacacgacgcccgaaggcgtagcccgtcgttacggcggcgagtggaccgaagatgcagcgaaacgcgcgttattggccgaacgtttgcacgccaatttattaggacgtttgcaaggcgaggaacgtctcctctggctttacgaagaagtggagaaaccattgagtcgcgtgctcgggcatatggaagctaccggtgtcaaattagacgtggcgtatttggaggctctcagccttgaagttgctgcccacatgcgccgcttggaggaagaagtattccgtttagcaggccattcctttcgccttaattctcgcgatcagttagaacgtgtgttgttcgatgaacttggtctccctcctatcggcaagacagagaagaccggtaaacgtagcacttcacgcgcggttttagaagctcttcgcgaagtccatcccattgtggacaagatcttgcagtaccgcgaactcgcgaaattgaaaggcacctatattgaccgtcttccggcattagtccacccgaaaacgggacgcctccatacccgcttcaaccaaacagccacggcgaccggtcgtttgtcctcctctgatccaaaccttcagaatattccagtacgtaccccattgggccagaagatccgccgcgcgtttgtagctgaggagggttggcgtttagtggccctcgattatcgtcaaattgaattacgtgtccttgcccatctttctggcgatgagaacctcatccgcgtgtttcaggaaggcaaagacattcacactcaaacggcaagctggatgtttggattaggcgctgaagcgatcgatcctttgatgcgtcgtgcagcgaagaccatcaatttcggtgttctctacggtatgagtgcctttcgtttgtcgcaggaattaggcattccctatgaggaagctcaagcgttcattcagaaatactttcaaagctatcccaaagttaaagcatggatcgagaagactctccgtgaaggccgcacacgtggttacgtagagaccttatttggacgtcgccgctatgttcccgatttaaacgctcgcgtgaaaggcaagcgtgaagccgccgaacgcatggcgttcaacatgcctgtacagggcacggcagctgacctcatgaaacttgcaatggtgcgcctttttccacaattgcgtgaagttggtgcccgcatgctcttgcaggtccacgatgaactcttgttagaagcgccaaaagagcgtgcggaagaggtggcagccctcgcgaaagaagttatggaaggcgtgtggcccttagcggtgcctcttgaagtcgaagttggtattggcgaggattggctggctgccaaaggataatga

SEQ ID NO: 3230 - protein, 841 aa, synthetic construct
  REGION 1..841: note = Variant of DNA polymerase I from Thermus sp. strain 2.9
MHHHHHHGGSGVLPVFEPKGRVLLVDGHHLAYRNFFALKGLTTSSGEPVQGVYGFAKSLLKALKEDGDVVIVVFDAKAPSFRHEAYEAYKAGRAPTPEDFPRQLALMKELVDLLGLERLEVPGFEADDVLATLAKKAEREGYEVQILTADRDLFQLLSPRISVLHPEGHRITPEWLWEKYGLRPEQWVDFRALAGDPSDNIPGVKGIGEKTALKLLKEWGSLENLLENLDQVKPESVREKILAHLEDLKLSRELSRVRTDLPLEVDFRRRREPDWEGLKAFLERLEFGSLLHEFGLLESPLPAEEAPWPPPEGAFLGYRLSRPEPMWAELLALAASAQGRVYRAEDPHGALRGLFEVRGLLAKDLAVVALREGLDLPPTDDPMLLAYLLDPSNTTPEGVARRYGGEWTEDAAKRALLAERLHANLLGRLQGEERLLWLYEEVEKPLSRVLGHMEATGVKLDVAYLEALSLEVAAHMRRLEEEVFRLAGHSFRLNSRDQLERVLFDELGLPPIGKTEKTGKRSTSRAVLEALREVHPIVDKILQYRELAKLKGTYIDRLPALVHPKTGRLHTRFNQTATATGRLSSSDPNLQNIPVRTPLGQKIRRAFVAEEGWRLVALDYRQIELRVLAHLSGDENLIRVFQEGKDIHTQTASWMFGLGAEAIDPLMRRAAKTINFGVLYGMSAFRLSQELGIPYEEAQAFIQKYFQSYPKVKAWIEKTLREGRTRGYVETLFGRRRYVPDLNARVKGKREAAERMAFNMPVQGTAADLMKLAMVRLFPQLREVGARMLLQVHDELLLEAPKERAEEVAALAKEVMEGVWPLAVPLEVEVGIGEDWLAAKG

SEQ ID NO: 3231 - DNA, 2529 bp, synthetic construct
  misc_feature 1..2529: note = Variant of DNA polymerase I from Thermus sp. strain 2.9
  source 1..2529: mol_type = other DNA
atgcaccatcatcatcatcatggcggtagcggcgtgttaccggtgttcgagcctaaaggtcgcgtgcttctggttgatggccatcatctcgcgtatcgtaacttctttgccctgaaaggattaaccaccagcagcggcgagccggtacagggtgtctacggctttgcaaagtcgctcctgaaagctctgaaagaagacggtgatgtggtgattgttgtctttgatgcgaaagcgccaagttttcgccacgaagcgtacgaagcttacaaagccgggcgtgctccaacgccggaagactttcctcgccaattggcgcttatgaaggaattagtggatttgcttggcctcgaacgcttggaagttcccggtttcgaggcagacgacgtattagcgactctcgcaaagaaagccgaacgtgagggctatgaagtccagatcttgacagcagatcgcgatcttttccagcttttatctccgcgcatctcggtgttacacccggaagggcatcgtatcaccccggaatggctctgggagaaatatggtttgcgtcccgaacaatgggtggattttcgcgccttagcaggcgatccgagcgacaatattccgggagttaaaggtatcggcgagaagacggcgctcaagctccttaaagaatgggggtcgttggagaacttgcttaagaatttagatcaggtcaaaccagagtcagtgcgtgagaagattcttgctcacctcgaagacctcaaattaagccgcgaattgtcccgtgtacgcaccgatttgccgctcgaagttgatttccaacgccgccgcgaacctgactgggagggtcttaaagcgtttttagagcgtcttgaatttggttcgctcttgcatgaattcggccttttagaaagcccgttaccagccgaagaagcaccttggccaccgcccgagggcgcgtttttaggttaccgtttgagtcgcccggaaccgatgtgggccgaattactggctcttgcagcgtctgcccagggacgtgtgtatcgcgcggaagaccctcatggtgcgctccgcggcctcttcgaagtccgtggactccttgccaaagacttagctgttgttgcattgcgcgaaggtcttgatttacctccgactgatgatccaatgcttcttgcgtacctcttggacccgtcaaacacgacgcccgaaggcgtagcccgtcgttacggcggcgagtggaccgaagatgcagcgaaacgcgcgttattggccgaacgtttgcacgccaatttattaggacgtttgcaaggcgaggaacgtctcctctggctttacgaagaagtggagaaaccattgagtcgcgtgctcgcgcatatggaagctaccggtgtcaaattagacgtggcgtatttggagaatctcagccttgaagttgctgcccacatgcgccgcttggaggaagaagtattccgtttagcaggccgttcctttcgccttaattctcgcgatcagttagaacgtgtgttgttcgatgaacttggtctccgtcctatcggcaagacagagaagaccggtaaacgtagcacttcagcggcggttttagaagctcttcgcgaagtccatcccattgtggacaagatcttgcaataccgcgaactcgcgaaattgaaaggcacctatattgaccgtcttccggcattagtccacccgaaaacgggacgcctccatacccgcttcaaccaaacagccacggcgaccggtcgtttgtcctcctctgatccaaaccttcagaatattccagtacgtaccccattgggccagaagatccgccgtgcgtttgtagctgaggagggttggcgtttagtggccctcgattatagccaaattgaattacgtgtccttgcccatctttctggcgatgagaacctcatccgcgtgtttcaggaaggcaaagacattcacactcaaacggcaagctggatgtttggattatcagctgaagcgatcgatcctttgatgcgtcgtgcagcgaagaccatcaatttcggtgttctctacggtatgagtgcctttcgtttgtcgcaggaattaggcattccctatgaagaagctcaggcgttcattcagaaatactttcaaagctatcccaaagttaaagcatggatcgagaagactctcgaagaaggccgcacacgtggttacgtagagaccttatttggacgtcgccgctatgttcccgatttaaacgctcgcgtgaaaggcaagcgtgaagccgccgaacgcatggcgttcaacatgcctgtacagggcacggcagctgacctcatgaaacttgcaatggtgcgcctttttccacaattgcgtgaagttggtgcccgcatgctcttgcaggtccacgatgaactcttgttagaagcgccaaaagagcgtgcggaagaggtggcagccctcgcgaaagaagttatggaaggcgtgtggcccttagcggtgcctcttgaagtcgaagttggtattggcgaggattggctggctgccaaaggataatga

SEQ ID NO: 3232 - protein, 841 aa, synthetic construct; identical to SEQ ID NO: 3098
  REGION 1..841: note = Variant of DNA polymerase I from Thermus sp. strain 2.9

SEQ ID NO: 3233 - DNA, 2529 bp, synthetic construct
  misc_feature 1..2529: note = Variant of DNA polymerase I from Thermus sp. strain 2.9
  source 1..2529: mol_type = other DNA
atgcaccatcatcatcatcatggcggtagcggcgtgttaccggtgttcgagcctaaaggtcgcgtgcttctggttgatggccatcatctcgcgtatcgtaacttctttgccctgaaaggattaaccaccagcagcggcgagccggtacagggtgtctacggctttgcaaagtcgctcctgaaagctctgaaagaagacggtgatgtggtgattgttgtctttgatgcgaaagcgccaagttttcgccacgaagcgtacgaagcttacaaagccgggcgtgctccaacgccggaagactttcctcgccaattggcgcttatgaaggaattagtggatttgcttggcctcgaacgcttggaagttcccggtttcgaggcagacgacgtattagcgactctcgcaaagaaagccgaacgtgagggctatgaagtccagatcttgacagcagatcgcgatcttttccagcttttatctccgcgcatctcggtgttacacccggaagggcatcgtatcaccccggaatggctctgggagaaatatggtttgcgtcccgaacaatgggtggattttcgcgccttagcaggcgatccgagcgacaatattccgggagttaaaggtatcggcgagaagacggcgctcaagctccttaaagaatgggggtcgttggagaacttgcttaagaatttagatcaggtcaaaccagagtcagtgcgtgagaagattcttgctcacctcgaagacctcaaattaagccgcgaattgtcccgtgtacgcaccgatttgccgctcgaagttgatttccgtcgccgccgcgaacctgactgggagggtcttaaagcgtttttagagcgtcttgaatttggttcgctcttgcatgaattcggccttttagaaagcccgttaccagccgaagaagcaccttggccaccgcccgagggcgcgtttttaggttaccgtttgagtcgcccggaaccgatgtgggccgaattactggctcttgcagcgtctgcccagggacgtgtgtatcgcgcggaagaccctcatggtgcgctccgcggcctcttcgaagtccgtggactccttgccaaagacttagctgttgttgcattgcgcgaaggtcttgatttacctccgactgatgatccaatgcttcttgcgtacctcttggacccgtcaaacacgacgcccgaaggcgtagcccgtcgttacggcggcgagtggaccgaagatgcagcgaaacgcgcgttattggccgaacgtttgcacgccaatttattaggacgtttgcaaggcgaggaacgtctcctctggctttacgaagaagtggagaaaccattgagtcgcgtgctcgcgcatatggaagctaccggtgtcaaattagacgtggcgtatttggaggctctcagccttgaagttgctgcccacatgcgccgcttggaggaagaagtattccgtttagcaggccattcctttcgccttaattctcgcgatcagttagaacgtgtgttgttcgatgaacttggtctccgtcctatcggcaagacagagaagaccggtaaacgtagcacttcagcggcggttttagaagctcttcgcgaagtccatcccattgtggacaagatcttgcagtaccgcgaactcgcgaaattgaaaggcacctatattgaccgtcttccggcattagtccacccgaaaacgggacgcctccatacccgcttcaaccaaacagccacggcgaccggtcgtttgtcctcctctgatccaaaccttcagaatattccagtacgtaccccattgggccagaagatccgccgtgcgtttgtagctgaggagggttggcgtttagtggccctcgattatagccaaattgaattacgtgtccttgcccatctttctggcgatgagaacctcatccgcgtgtttcaggaaggcaaagacattcacactcaaacggcaagctggatgtttggattatcagctgaagcgatcgatcctttgatgcgtcgtgcagcgaagaccatcaatttcggtgttctctacggtatgagtgcctttcgtttgtcgcaggaattaggcattccctatgaagaagctgcggcgttcattcagaaatactttcaaagctatcccaaagttaaagcatggatcgagaagactctcgaagaaggccgcacacgtggttacgtagagaccttatttggacgtcgccgctatgttcccgatttaaacgctcgcgtgaaaggcaagcgtgaagccgccgaacgcatggcgttcaacatgcctgtacagggcacggcagctgacctcatgaaacttgcaatggtgcgcctttttccacaattgcgtgaagttggtgcccgcatgctcttgcaggtccacgatgaactcttgttagaagcgccaaaagagcgtgcggaagaggtggcagccctcgcgaaagaagttatggaaggcgtgtggcccttagcggtgcctcttgaagtcgaagttggtattggcgaggattggctggctgccaaaggataatga

SEQ ID NO: 3234 - protein, 841 aa, synthetic construct; identical to SEQ ID NO: 3008
  REGION 1..841: note = Variant of DNA polymerase I from Thermus sp. strain 2.9

SEQ ID NO: 3235 - DNA, 2529 bp, synthetic construct
  misc_feature 1..2529: note = Variant of DNA polymerase I from Thermus sp. strain 2.9
  source 1..2529: mol_type = other DNA
atgcaccatcatcatcatcatggcggtagcggcgtgttaccggtgttcgagcctaaaggtcgcgtgcttctggttgatggccatcatctcgcgtatcgtaacttctttgccctgaaaggattaaccaccagctcgggcgagccggtacagggtgtctacggctttgcaaagtcgctcctgaaagctctgaaagaagacggtgatgtggtgattgttgtctttgatgcgaaagcgccaagttttcgccacgaagcgtacgaagcttacaaagccgggcgtgctccaacgccggaagactttcctcgccaattggcgcttatgaaggaattagtggatttgcttggcctcgaacgcttggaagttcccggtttcgaggcagacgacgtattagcgactctcgcaaagaaagccgaacgtgagggctatgaagtccagatcttgacagcagatcgcgatcttttccagcttttatctccgcgcatctcggtgttacacccggaagggcatcgtatcaccccggaatggctctgggagaaatatggtttgcgtcccgaacaatgggtggattttcgcgccttagcaggcgatccgagcgacaatattccgggagttaaaggtatcggcgagaagacggcgctcaagctccttaaagaatgggggtcgttggagaacttgcttaagaatttagatcaggtcaaaccagagtcagtgcgtgagaagattcttgctcacctcgaagacctcaaattaagccgcgaattgtcccgtgtacgcaccgatttgccgctcgaagttgatttccagcgccgccgcgaacctgactgggagggtcttaaagcgtttttagagcgtcttgaatttggttcgctcttgcatgaattcggccttttagaaagcccgttaccagccgaagaagcaccttggccaccgcccgagggcgcgtttttaggttaccgtttgagtcgcccggaaccgatgtgggccgaattactggctcttgcagcgtctgcccagggacgcgtgtatcgcgcggaagaccctcatggtgcgctccgcggcctcttcgaagtccgtggactccttgccaaagacttagctgttgttgcattgcgcgaaggtcttgatttacctccgactgatgatccaatgcttcttgcgtacctcttggacccgtcaaacacgacgcccgaaggcgtagcccgtcgttacggcggcgagtggaccgaagatgcagcgaaacgcgcgttattggccgaacgtttgcacgccaatttattaggacgtttgcaaggcgaggaacgtctcctctggctttacgaagaagtggagaaaccattgagtcgcgtgctcgcgcatatggaagctaccggtgtcaaattagacgtggcgtatttggaggctctcagccttgaagttgctgcccacatgcgccgcttggaggaagaagtattccgtttagcaggccattcctttcgccttaattctcgcgatcagttagaacgtgtgttgttcgatgaacttggtctccctcctatcggcaagacagagaagaccggtaaacgtagcacttcagcggcggttttagaagctcttcgcgaagtccatcccattgtggacaagatcttgcagtaccgcgaactcgcgaaattgaaaggcacctatattgaccgtcttccggcattagtccacccgaaaacgggacgcctccatacccgcttcaaccaaacagccacggcgaccggtcgtttgtcctcctctgatccaaaccttcagaatattccagtacgtaccccattgggccagaagatccgccgtgcgtttgtagctgaggagggttggcgtttagtggccctcgattatagccaaattgaattacgtgtccttgcccatctttctggcgatgagaacctcatccgcgtgtttcaggaaggcaaagacattcacactcaaacggcaagctggatgtttggattatcagctgaagcgatcgatcctttgatgcgtcgtgcagcgaagaccatcaatttcggtgttctctacggtatgagtgcctttcgtttgtcgcaggaattaggcattccctatgaggaagctcaagcgttcattcagaaatactttcaaagctatcccaaagttaaagcatggatcgagaagactctcgaagaaggccgcacacgtggttacgtagagaccttatttggacgtcgccgctatgttcccgatttaaacgctcgcgtgaaaggcaagcgtgaagccgccgaacgcatggcgttcaacatgcctgtacagggcacggcagctgacctcatgaaacttgcaatggtgcgcctttttccacaattgcgtgaagttggtgcccgcatgctcttgcaggtccacgatgaactcttgttagaagcgccaaaagagcgtgcggaagaggtggcagccctcgcgaaagaagttatggaaggcgtgtggcccttagcggtgcctcttgaagtcgaagttggtattggcgaggattggctggctgccaaaggataatga

SEQ ID NO: 3236 - protein, 841 aa, synthetic construct; identical to SEQ ID NO: 3004
  REGION 1..841: note = Variant of DNA polymerase I from Thermus sp. strain 2.9

SEQ ID NO: 3237 - DNA, 2529 bp, synthetic construct
  misc_feature 1..2529: note = Variant of DNA polymerase I from Thermus sp. strain 2.9
  source 1..2529: mol_type = other DNA
atgcaccatcatcatcatcatggcggtagcggcgtgttaccggtgttcgagcctaaaggtcgcgtgcttctggttgatggccatcatctcgcgtatcgtaacttctttgccctgaaaggattaaccaccagcagcggcgagccggtacagggtgtctacggctttgcaaagtcgctcctgaaagctctgaaagaagacggtgatgtggtgattgttgtctttgatgcgaaagcgccaagttttcgccacgaagcgtacgaagcttacaaagccgggcgtgctccaacgccggaagactttcctcgccaattggcgcttatgaaggaattagtggatttgcttggcctcgaacgcttggaagttcccggtttcgaggcagacgacgtattagcgactctcgcaaagaaagccgaacgtgagggctatgaagtccagatcttgacagcagatcgcgatcttttccagcttttatctccgcgcatctcggtgttacacccggaagggcatcgtatcaccccggaatggctctgggagaaatatggtttgcgtcccgaacaatgggtggattttcgcgccttagcaggcgatccgagcgacaatattccgggagttaaaggtatcggcgagaagacggcgctcaagctccttaaagaatgggggtcgttggagaacttgcttaagaatttagatcaggtcaaaccagagtcagtgcgtgagaagattcttgctcacctcgaagacctcaaattaagccgcgaattgtcccgtgtacgcaccgatttgccgctcgaagttgatttccgtcgccgccgcgaacctgactgggagggtcttaaagcgtttttagagcgtcttgaatttggttcgctcttgcatgaattcggccttttagaaagcccgttaccagccgaagaagcaccttggccaccgcccgagggcgcgtttttaggttaccgtttgagtcgcccggaaccgatgtgggccgaattactggctcttgcagcgtctgcccagggacgtgtgtatcgcgcggaagaccctcatggtgcgctccgcggcctcttcgaagtccgtggactccttgccaaagacttagctgttgttgcattgcgcgaaggtcttgatttacctccgactgatgatccaatgcttcttgcgtacctcttggacccgtcaaacacgacgcccgaaggcgtagcccgtcgttacggcggcgagtggaccgaagatgcagcgaaacgcgcgttattggccgaacgtttgcacgccaatttattaggacgtttgcaaggcgaggaacgtctcctctggctttacgaagaagtggagaaaccattgagtcgcgtgctcgcgcatatggaagctaccggtgtcaaattagacgtggcgtatttggaggcactcagccttgaagttgctgcccacatgcgccgcttggaggaagaagtattccgtttagcaggccgttcctttcgccttaattctcgcgatcagttagaacgtgtgttgttcgatgaacttggtctccctcctatcggcaagacagagaagaccggtaaacgtagcacttcagcggcggttttagaagctcttcgcgaagtccatcccattgtggacaagatcttgcagtaccgcgaactcgcgaaattgaaaggcacctatattgaccgtcttccggcattagtccacccgaaaacgggacgcctccatacccgcttcaaccaaacagccacggcgaccggtcgtttgtcctcctctgatccaaaccttcagaatattccagtacgtaccccattgggccagaagatccgccgtgcgtttgtagctgaggagggttggcgtttagtggccctcgattatagccaaattgaattacgtgtccttgcccatctttctggcgatgagaacctcatccgcgtgtttcaggaaggcaaagacattcacactcaaacggcaagctggatgtttggattatcagctgaagcgatcgatcctttgatgcgtcgtgcagcgaagaccatcaatttcggtgttctctacggtatgagtgcctttcgtttgtcgcaggaattaggcattccctatgaagaagctcaggcgttcattcagaaatactttcaaagctatcccaaagttaaagcatggatcgagaagactctcgaagaaggccgcacacgtggttacgtagagaccttatttggacgtcgccgctatgttcccgatttaaacgctcgcgtgaaaggcaagcgtgaagccgccgaacgcatggcgttcaacatgcctgtacagggcacggcagctgacctcatgaaacttgcaatggtgcgcctttttccacaattgcgtgaagttggtgcccgcatgctcttgcaggtccacgatgaactcttgttagaagcgccaaaagagcgtgcggaagaggtggcagccctcgcgaaagaagttatggaaggcgtgtggcccttagcggtgcctcttgaagtcgaagttggtattggcgaggattggctggctgccaaaggataatga

SEQ ID NO: 3238 - protein, 841 aa, synthetic construct; identical to SEQ ID NO: 2986
  REGION 1..841: note = Variant of DNA polymerase I from Thermus sp. strain 2.9

SEQ ID NO: 3239 - DNA, 2529 bp, synthetic construct
  misc_feature 1..2529: note = Variant of DNA polymerase I from Thermus sp. strain 2.9
  source 1..2529: mol_type = other DNA
atgcaccatcatcatcatcatggcggtagcggcgtgttaccggtgttcgagcctaaaggtcgcgtgcttctggttgatggccatcatctcgcgtatcgtaacttctttgccctgaaaggattaaccaccagcagcggcgagccggtacagggtgtctacggctttgcaaagtcgctcctgaaagctctgaaagaagacggtgatgtggtgattgttgtctttgatgcgaaagcgccaagttttcgccacgaagcgtacgaagcttacaaagccgggcgtgctccaacgccggaagactttcctcgccaattggcgcttatgaaggaattagtggatttgcttggcctcgaacgcttggaagttcccggtttcgaggcagacgacgtattagcgactctcgcaaagaaagccgaacgtgagggctatgaagtccagatcttgacagcagatcgcgatcttttccagcttttatctccgcgcatctcggtgttacacccggaagggcatcgtatcaccccggaatggctctgggagaaatatggtttgcgtcccgaacaatgggtggattttcgcgccttagcaggcgatccgagcgacaatattccgggagttaaaggtatcggcgagaagacggcgctcaagctccttaaagaatgggggtcgttggagaacttgcttaagaatttagatcaggtcaaaccagagtcagtgcgtgagaagattcttgctcacctcgaagacctcaaattaagccgcgaattgtcccgtgtacgcaccgatttgccgctcgaagttgatttccgccgccgccgcgaacctgactgggagggtcttaaagcgtttttagagcgtcttgaatttggttcgctcttgcatgaattcggccttttagaaagcccgttaccagccgaagaagcaccttggccaccgcccgagggcgcgtttttaggttaccgtttgagtcgcccggaaccgatgtgggccgaattactggctcttgcagcgtctgcccagggacgtgtgtatcgcgcggaagaccctcatggtgcgctccgcggcctcttcgaagtccgtggactccttgccaaagacttagctgttgttgcattgcgcgaaggtcttgatttacctccgactgatgatccaatgcttcttgcgtacctcttggacccgtcaaacacgacgcccgaaggcgtagcccgtcgttacggcggcgagtggaccgaagatgcagcgaaacgcgcgttattggccgaacgtttgcacgccaatttattaggacgtttgcaaggcgaggaacgtctcctctggctttacgaagaagtggagaaaccattgagtcgcgtgctcgcgcatatggaagctaccggtgtcaaattagacgtggcgtatttggaggctctcagccttgaagttgctgcccacatgcgccgcttggaggaagaagtattccgtttagcaggccgttcctttcgccttaattctcgcgatcagttagaacgtgtgttgttcgatgaacttggtctccctcctatcggcaagacagagaagaccggtaaacgtagcacttcagcggcggttttagaagctcttcgcgaagtccatcccattgtggacaagatcttgcagtaccgcgaactcgcgaaattgaaaggcacctatattgaccgtcttccggcattagtccacccgaaaacgggacgcctccatacccgcttcaaccaaacagccacggcgaccggtcgtttgtcctcctctgatccaaaccttcagaatattccagtacgtaccccattgggccagaagatccgccgtgcgtttgtagctgaggagggttggcgtttagtggccctcgattatagccaaattgaattacgtgtccttgcccatctttctggcgatgagaacctcatccgcgtgtttcaggaaggcaaagacattcacactcaaacggcaagctggatgtttggattatcagctgaagcgatcgatcctttgatgcgtcgtgcagcgaagaccatcaatttcggtgttctctacggtatgagtgcctttcgtttgtcgcaggaattaggcattccctatgaagaagctcaggcgttcattcagaaatactttcaaagctatcccaaagttaaagcatggatcgagaagactctcgaagaaggccgcacacgtggttacgtagagaccttatttggacgtcgccgctatgttcccgatttaaacgctcgcgtgaaaggcaagcgtgaagccgccgaacgcatggcgttcaacatgcctgtacagggcacggcagctgacctcatgaaacttgcaatggtgcgcctttttccacaattgcgtgaagttggtgcccgcatgctcttgcaggtccacgatgaactcttgttagaagcgccaaaagagcgtgcggaagaggtggcagccctcgcgaaaaccgttatggaaggcgtgtggcccttagcggtgcctcttgaagtcgaagttggtattggcgaggattggctggctgccaaaggataatga

SEQ ID NO: 3240 - protein, 841 aa, synthetic construct; identical to SEQ ID NO: 3192
  REGION 1..841: note = Variant of DNA polymerase I from Thermus sp. strain 2.9

SEQ ID NO: 3241 - DNA, 2529 bp, synthetic construct
  misc_feature 1..2529: note = Variant of DNA polymerase I from Thermus sp. strain 2.9
  source 1..2529: mol_type = other DNA
atgcaccatcatcatcatcatggcggtagcggcgtgttaccggtgttcgagcctaaaggtcgcgtgcttctggttgatggccatcatctcgcgtatcgtaacttctttgccctgaaaggattaaccaccagcagcggcgagccggtacagggtgtctacggctttgcaaagtcgctcctgaaagctctgaaagaagacggtgatgtggtgattgttgtctttgatgcgaaagcgccaagttttcgccacgaagcgtacgaagcttacaaagccgggcgtgctccaacgccggaagactttcctcgccaattggcgcttatgaaggaattagtggatttgcttggcctcgaacgcttggaagttcccggtttcgaggcagacgacgtattagcgactctcgcaaagaaagccgaacgtgagggctatgaagtccagatcttgacagcagatcgcgatcttttccagcttttatctccgcgcatctcggtgttacacccggaagggcatcgtatcaccccggaatggctctgggagaaatatggtttgcgtcccgaacaatgggtggattttcgcgccttagcaggcgatccgagcgacaatattccgggagttaaaggtatcggcgagaagacggcgctcaagctccttaaagaatgggggtcgttggagaacttgcttaagaatttagatcaggtcaaaccagagtcagtgcgtgagaagattcttgctcacctcgaagacctcaaattaagccgcgaattgtcccgtgtacgcaccgatttgccgctcgaagttgatttccagcgccgccgcgaacctgactgggagggtcttaaagcgtttttagagcgtcttgaatttggttcgctcttgcatgaattcggccttttagaaagcccgttactggccgaagaagcaccttggccaccgcccgagggcgcgtttttaggttaccgtttgagtcgcccggaaccgatgtgggccgaattactggctcttgcagcgtctgcccagggacgtgtgtatcgcgcggaagaccctcatggtgcgctccgcggcctcttcgaagtccgtggactccttgccaaagacttagctgttgttgcattgcgcgaaggtcttgatttacctccgactgatgatccaatgcttcttgcgtacctcttggacccgtcaaacacgacgcccgaaggcgtagcccgtcgttacggcggcgagtggaccgaagatgcagcgaaacgcgcgttattggccgaacgtttgcacgccaatttattaggacgtttgcaaggcgaggaacgtctcctctggctttacgaagaagtggagaaaccattgagtcgcgtgctcgcgcatatggaagctaccggtgtcaaattagacgtggcgtatttggaggctctcagccttgaagttgctgcccacatgcgccgcttggaggaagaagtattccgtttagcaggccattcctttcgccttaattctcgcgatcagttagaacgtgtgttgttcgatgaacttggtctccctcctatcggcaagacagagaagaccggtaaacgtagcacttcagcggcggttttagaagctcttcgcgaagtccatcccattgtggacaagatcttgcagtaccgcgaactcgcgaaattgaaaggcacctatattgaccgtcttccggcattagtccacccgaaaacgggacgcctccatacccgcttcaaccaaacagccacggcgaccggtcgtttgtcctcctctgatccaaaccttcagaatattccagtacgtaccccattgggccagaagatccgccgcgcgtttgtagctgaggagggttggcgtttagtggccctcgattatagccaaattgaattacgtgtccttgcccatctttctggcgatgagaacctcatccgcgtgtttcaggaaggcaaagacattcacactcaaacggcaagctggatgtttggattatcagctgaagcgatcgatcctttgatgcgtcgtgcagcgaagaccatcaatttcggtgttctctacggtatgagtgcctttcgtttgtcgcaggaattaggcattccctatgaagaagctgcggcgttcattcagaaatactttcaaagctatcccaaagttaaagcatggatcgagaagactctcgaagaaggccgcacacgtggttacgtagagaccttatttggacgtcgccgctatgttcccgatttaaacgctcgcgtgaaaggcaagcgtgaagccgccgaacgcatggcgttcaacatgcctgtacagggcacggcagctgacctcatgaaacttgcaatggtgcgcctttttccacaattgcgtgaagttggtgcccgcatgctcttgcaggtccacgatgaactcttgttagaagcgccaaaagagcgtgcggaagaggtggcagccctcgcgaaagaagttatggaaggcgtgtggcccttagcggtgcctcttgaagtcgaagttggtattggcgaggattggctggctgccaaaggataatga

SEQ ID NO: 3242 - protein, 841 aa, synthetic construct
  REGION 1..841: note = Variant of DNA polymerase I from Thermus sp. strain 2.9
MHHHHHHGGSGVLPVFEPKGRVLLVDGHHLAYRNFFALKGLTTSSGEPVQGVYGFAKSLLKALKEDGDVVIVVFDAKAPSFRHEAYEAYKAGRAPTPEDFPRQLALMKELVDLLGLERLEVPGFEADDVLATLAKKAEREGYEVQILTADRDLFQLLSPRISVLHPEGHRITPEWLWEKYGLRPEQWVDFRALAGDPSDNIPGVKGIGEKTALKLLKEWGSLENLLKNLDQVKPESVREKILAHLEDLKLSRELSRVRTDLPLEVDFQRRREPDWEGLKAFLERLEFGSLLHEFGLLESPLLAEEAPWPPPEGAFLGYRLSRPEPMWAELLALAASAQGRVYRAEDPHGALRGLFEVRGLLAKDLAVVALREGLDLPPTDDPMLLAYLLDPSNTTPEGVARRYGGEWTEDAAKRALLAERLHANLLGRLQGEERLLWLYEEVEKPLSRVLAHMEATGVKLDVAYLEALSLEVAAHMRRLEEEVFRLAGHSFRLNSRDQLERVLFDELGLPPIGKTEKTGKRSTSAAVLEALREVHPIVDKILQYRELAKLKGTYIDRLPALVHPKTGRLHTRFNQTATATGRLSSSDPNLQNIPVRTPLGQKIRRAFVAEEGWRLVALDYSQIELRVLAHLSGDENLIRVFQEGKDIHTQTASWMFGLSAEAIDPLMRRAAKTINFGVLYGMSAFRLSQELGIPYEEAAAFIQKYFQSYPKVKAWIEKTLEEGRTRGYVETLFGRRRYVPDLNARVKGKREAAERMAFNMPVQGTAADLMKLAMVRLFPQLREVGARMLLQVHDELLLEAPKERAEEVAALAKEVMEGVWPLAVPLEVEVGIGEDWLAAKG

SEQ ID NO: 3243 - DNA, 2529 bp, synthetic construct
  misc_feature 1..2529: note = Variant of DNA polymerase I from Thermus sp. strain 2.9
  source 1..2529: mol_type = other DNA
atgcaccatcatcatcatcatggcggtagcggcgtgttaccggtgttcgagcctaaaggtcgcgtgcttctggttgatggccatcatctcgcgtatcgtaacttctttgccctgaaaggattaaccaccagcagcggcgagccggtacagggtgtctacggctttgcaaagtcgctcctgaaagctctgaaagaagacggtgatgtggtgattgttgtctttgatgcgaaagcgccaagttttcgccacgaagcgtacgaagcttacaaagccgggcgtgctccaacgccggaagactttcctcgccaattggcgcttatgaaggaattagtggatttgcttggcctcgaacgcttggaagttcccggtttcgaggcagacgacgtattagcgactctcgcaaagaaagccgaacgtgagggctatgaagtccagatcttgacagcagatcgcgatcttttccagcttttatctccgcgcatctcggtgttacacccggaagggcatcgtatcaccccggaatggctctgggagaaatatggtttgcgtcccgaacaatgggtggattttcgcgccttagcaggcgatccgagcgacaatattccgggagttaaaggtatcggcgagaagacggcgctcaagctccttaaagaatgggggtcgttggagaacttgcttaagaatttagatcaggtcaaaccagagtcagtgcgtgagaagattcttgctcacctcgaagacctcaaattaagccgcgaattgtcccgtgtacgcaccgatttgccgctcgaagttgatttccagcgccgccgcgaacctgactgggagggtcttaaagcgtttttagagcgtcttgaatttggttcgctcttgcatgaattcggccttttagaaagcccgttaccagccgaagaagcaccttggccaccgcccgagggcgcgtttttaggttaccgtttgagtcgcccggaaccgatgtgggccgaattactggctcttgcagcgtctgcccagggacgtgtgtatcgcgcggaagaccctcatggtgcgctccgcggcctcttcgaagtccgtggactccttgccaaagacttagctgttgttgcattgcgcgaaggtcttgatttacctccgactgatgatccaatgcttcttgcgtacctcttggacccgtcaaacacgacgcccgaaggcgtagcccgtcgttacggcggcgagtggaccgaagatgcagcgaaacgcgcgttattggccgaacgtttgcacgcaaatttattaggacgtttgcaaggcgaggaacgtctcctctggctttacgaagaagtggagaaaccattgagtcgcgtgctcgcgcatatggaagctaccggtgtcaaattagacgtggcgtatttggaggctctcagccttgaagttgctgcccacatgcgccgcttggaggaagaagtattccgtttagcaggccattcctttcgccttaattctcgcgatcagttagaacgtgtgttgttcgatgaacttggtctccctcctatcggcaagacagagaagaccggtaaacgtagcacttcagcggcggttttagaagctcttcgcgaagtccatcccattgtggacaagatcttgcagtaccgcgaactcgcgaaattgaaaggcacctatattgaccgtcttccggcattagtccacccgaaaacgggacgcctccatacccgcttcaaccaaacagccacggcgaccggtcgtttgtcctcctctgatccaaaccttcagaatattccagtacgtaccccattgggccagaagatccgccgtgcgtttgtagctgaggagggttggcgtttagtggccctcgattatagccaaattgaattacgtgtccttgcccatctttctggcgatgagaacctcatccgcgtgtttcaggaaggcaaagacattcacactcaaacggcaagctggatgtttggattatcagctgaagcgatcgatcctttgatgcgtcgtgcagcgaagaccatcaatttcggtgttctctacggtatgagtgcctttcgtttgtcgcaggaattaggcattccctatgaagaagctgcggcgttcattcagaaatactttcaaagctatcccaaagttaaagcatggatcgagaagactctcgaagaaggccgcacacgtggttacgtagagaccttatttggacgtcgccgctatgttcccgatttaaacgctcgcgtgaaaggcaagcgtgaagccgccgaacgcatggcgttcaacatgcctgtacagggcacggcagctgacctcatgaaacttgcaatggtgcgcctttttccacaattgcgtgaagttggtgcccgcatgctcttgcaggtccacgatgaactcttgttagaagcgccaaaagagcgtgcggaagaggtggcagccctcgcgaaagaagttatggaaggcgtgtggcccttagcggtgcctcttgaagtcgaagttggtattggcgaggattggctggctgccaaaggataatga

SEQ ID NO: 3244 - protein, 841 aa, synthetic construct
  REGION 1..841: note = Variant of DNA polymerase I from Thermus sp. strain 2.9
MHHHHHHGGSGVLPVFEPKGRVLLVDGHHLAYRNFFALKGLTTSSGEPVQGVYGFAKSLLKALKEDGDVVIVVFDAKAPSFRHEAYEAYKAGRAPTPEDFPRQLALMKELVDLLGLERLEVPGFEADDVLATLAKKAEREGYEVQILTADRDLFQLLSPRISVLHPEGHRITPEWLWEKYGLRPEQWVDFRALAGDPSDNIPGVKGIGEKTALKLLKEWGSLENLLKNLDQVKPESVREKILAHLEDLKLSRELSRVRTDLPLEVDFQRRREPDWEGLKAFLERLEFGSLLHEFGLLESPLPAEEAPWPPPEGAFLGYRLSRPEPMWAELLALAASAQGRVYRAEDPHGALRGLFEVRGLLAKDLAVVALREGLDLPPTDDPMLLAYLLDPSNTTPEGVARRYGGEWTEDAAKRALLAERLHANLLGRLQGEERLLWLYEEVEKPLSRVLAHMEATGVKLDVAYLEALSLEVAAHMRRLEEEVFRLAGHSFRLNSRDQLERVLFDELGLPPIGKTEKTGKRSTSAAVLEALREVHPIVDKILQYRELAKLKGTYIDRLPALVHPKTGRLHTRFNQTATATGRLSSSDPNLQNIPVRTPLGQKIRRAFVAEEGWRLVALDYSQIELRVLAHLSGDENLIRVFQEGKDIHTQTASWMFGLSAEAIDPLMRRAAKTINFGVLYGMSAFRLSQELGIPYEEAAAFIQKYFQSYPKVKAWIEKTLEEGRTRGYVETLFGRRRYVPDLNARVKGKREAAERMAFNMPVQGTAADLMKLAMVRLFPQLREVGARMLLQVHDELLLEAPKERAEEVAALAKEVMEGVWPLAVPLEVEVGIGEDWLAAKG

SEQ ID NO: 3245 - DNA, 2529 bp, synthetic construct
  misc_feature 1..2529: note = Variant of DNA polymerase I from Thermus sp. strain 2.9
  source 1..2529: mol_type = other DNA
atgcaccatcatcatcatcatggcggtagcggcgtgttaccggtgttcgagcctaaaggtcgcgtgcttctggttgatggccatcatctcgcgtatcgtaacttctttgccctgaaaggattaaccaccagcagcggcgagccggtacagggtgtctacggctttgcaaagtcgctcctgaaagctctgaaagaagacggtgatgtggtgattgttgtctttgatgcgaaagcgccaagttttcgccacgaagcgtacgaagcttacaaagccgggcgtgctccaacgccggaagactttcctcgccaattggcgcttatgaaggaattagtggatttgcttggcctcgaacgcttggaagttcccggtttcgaggcagacgacgtattagcgactctcgcaaagaaagccgaacgtgagggctatgaagtccagatcttgacagcagatcgcgatcttttccagcttttatctccgcgcatctcggtgttacacccggaagggcatcgtatcaccccggaatggctctgggagaaatatggtttgcgtcccgaacaatgggtggattttcgcgccttagcaggcgatccgagcgacaatattccgggagttaaaggtatcggcgagaagacggcgctcaagctccttaaagaatgggggtcgttggagaacttgcttaagaatttagatcaggtcaaaccagagtcagtgcgtgagaagattcttgctcacctcgaagacctcaaattaagccgcgaattgtcccgtgtacgcaccgatttgccgctcgaagttgatttccgtcgccgccgcgaacctgactgggagggtcttaaagcgtttttagagcgtcttgaatttggttcgctcttgcatgaattcggccttttagaaagcccgttaccagccgaagaagcaccttggccaccgcccgagggcgcgtttttaggttaccgtttgagtcgcccggaaccgatgtgggccgaattatcggctcttgcagcgtctgcccagggacgtgtgtatcgcgcggaagaccctcatggtgcgctccgcggcctcttcgaagtccgtggactccttgccaaagacttagctgttgttgcattgcgcgaaggtcttgatttacctccgactgatgatccaatgcttcttgcgtacctcttggacccgtcaaacacgacgcccgaaggcgtagcccgtcgttacggcggcgagtggaccgaagatgcagcgaaacgcgcgttattggccgaacgtttgcacgccaatttattaggacgtttgcaaggcgaggaacgtctcctctggctttacgaagaagtggagaaaccattgagtcgcgtgctcgcgcatatggaagctaccggtgtcaaattagacgtggcgtatttggaggctctcagccttgaagttgctgcccacatgcgccgcttggaggaagaagtattccgtttagcaggccattcctttcgccttaattctcgcgatcagttagaacgtgtgttgttcgatgaacttggtctccctcctatcggcaagacagagaagaccggtaaacgtagcacttcagcggcggttttagaagctcttcgcgaagtccatcccattgtggacaagatcttgcagtaccgcgaactcgcgaaattgaaaggcacctatattgaccgtcttccggcattagtccacccgaaaacgggacgcctccatacccgcttcaaccaaacagccacggcgaccggtcgtttgtcctcctctgatccaaaccttcagaatattccagtacgtaccccattgggccagaagatccgcaaagcgtttgtagctgaggagggttggcgtttagtggccctcgattatagtcaaattgaattacgtgtccttgcccatctttctggcgatgagaacctcatccgcgtgtttcaggaaggcaaagacattcacactcaaacggcaagctggatgtttggattatcagctgaagcgatcgatcctttgatgcgtcgtgcagcgaagaccatcaatttcggtgttctctacggtatgagtgcctttcgtttgtcgcaggaattaggcattccctatgaagaagctgcggcgttcattcagaaatactttcaaagctatcccaaagttaaagcatggatcgagaagactctcgaagaaggccgcacacgtggttacgtagagaccttatttggacgtcgccgctatgttcccgatttaaacgctcgcgtgaaaggcaagcgtgaagccgccgaacgcatggcgttcaacatgcctgtacagggcacggcagctgacctcatgaaacttgcaatggtgcgcctttttccacaattgcgtgaagttggtgcccgcatgctcttgcaggtccacgatgaactcttgttagaagcgccaaaagagcgtgcggaagaggtggcagccctcgcgaaagaagttatggaaggcgtgtggcccttagcggtgcctcttgaagtcgaagttggtattggcgaggattggctggctgccaaaggataatga

SEQ ID NO: 3246 - protein, 841 aa, synthetic construct
  REGION 1..841: note = Variant of DNA polymerase I from Thermus sp. strain 2.9
MHHHHHHGGSGVLPVFEPKGRVLLVDGHHLAYRNFFALKGLTTSSGEPVQGVYGFAKSLLKALKEDGDVVIVVFDAKAPSFRHEAYEAYKAGRAPTPEDFPRQLALMKELVDLLGLERLEVPGFEADDVLATLAKKAEREGYEVQILTADRDLFQLLSPRISVLHPEGHRITPEWLWEKYGLRPEQWVDFRALAGDPSDNIPGVKGIGEKTALKLLKEWGSLENLLKNLDQVKPESVREKILAHLEDLKLSRELSRVRTDLPLEVDFRRRREPDWEGLKAFLERLEFGSLLHEFGLLESPLPAEEAPWPPPEGAFLGYRLSRPEPMWAELSALAASAQGRVYRAEDPHGALRGLFEVRGLLAKDLAVVALREGLDLPPTDDPMLLAYLLDPSNTTPEGVARRYGGEWTEDAAKRALLAERLHANLLGRLQGEERLLWLYEEVEKPLSRVLAHMEATGVKLDVAYLEALSLEVAAHMRRLEEEVFRLAGHSFRLNSRDQLERVLFDELGLPPIGKTEKTGKRSTSAAVLEALREVHPIVDKILQYRELAKLKGTYIDRLPALVHPKTGRLHTRFNQTATATGRLSSSDPNLQNIPVRTPLGQKIRKAFVAEEGWRLVALDYSQIELRVLAHLSGDENLIRVFQEGKDIHTQTASWMFGLSAEAIDPLMRRAAKTINFGVLYGMSAFRLSQELGIPYEEAAAFIQKYFQSYPKVKAWIEKTLEEGRTRGYVETLFGRRRYVPDLNARVKGKREAAERMAFNMPVQGTAADLMKLAMVRLFPQLREVGARMLLQVHDELLLEAPKERAEEVAALAKEVMEGVWPLAVPLEVEVGIGEDWLAAKG

SEQ ID NO: 3247 - DNA, 2529 bp, synthetic construct
  misc_feature 1..2529: note = Variant of DNA polymerase I from Thermus sp. strain 2.9
  source 1..2529: mol_type = other DNA
atgcaccatcatcatcatcatggcggtagcggcgtgttaccggtgttcgagcctaaaggtcgcgtgcttctggttgatggccatcatctcgcgtatcgtaacttctttgccctgaaaggattaaccaccagcagcggcgagccggtacagggtgtctacggctttgcaaagtcgctcctgaaagctctgaaagaagacggtgatgtggtgattgttgtctttgatgcgaaagcgccaagttttcgccacgaagcgtacgaagcttacaaagccgggcgtgctccaacgccggaagactttcctcgccaattggcgcttatgaaggaattagtggatttgcttggcctcgaacgcttggaagttcccggtttcgaggcagacgacgtattagcgactctcgcaaagaaagccgaacgtgagggctatgaagtccagatcttgacagcagatcgcgatcttttccagcttttatctccgcgcatctcggtgttacacccggaagggcatcgtatcaccccggaatggctctgggagaaatatggtttgcgtcccgaacaatgggtggattttcgcgccttagcaggcgatccgagcgacaatattccgggagttaaaggtatcggcgagaagacggcgctcaagctccttaaagaatgggggtcgttggagaacttgcttaagaatttagatcaggtcaaaccagagtcagtgcgtgagaagattcttgctcacctcgaagacctcaaattaagccgcgaattgtcccgtgtacgcaccgatttgccgctcgaagttgatttccgtcgccgccgcgaacctgactgggagggtcttaaagcgtttttagagcgtcttgaatttggttcgctcttgcatgaattcggccttttagaaagcccgttaccagccgaagaagcaccttggccaccgcccgagggcgcgtttttaggttaccgtttgagtcgcccggaaccgatgtgggccgaattactggctcttgcagcgtctgcccagggacgtgtgtatcgcgcggaagaccctcatggtgcgctccgcggcctcttcgaagtccgtggactccttgccaaagacttagctgttgttgcattgcgcgaaggtcttgatttacctccgactgatgatccaatgcttcttgcgtacctcttggacccgtcaaacacgacgcccgaaggcgtagcccgtcgttacggcggcgagtggaccgaagatgcagcgaaacgcgcgttattggccgaacgtttgcacgccaatttattaggacgtttgcaaggcgaggaacgtctcctctggctttacgaagaagtggagaaaccattgagtcgcgtgctcgcgcatatggaagctaccggtgtcaaattagacgtggcgtatttggagaatctcagccttgaagttgctgcccacatgcgccgcttggaggaagaagtattccgtttagcaggccattcctttcgccttaattctcgcgatcagttagaacgtgtgttgttcgatgaacttggtctccctcctatcggcaagacagagaagaccggtaaacgtagcacttcagcggcggttttagaagctcttcgcgaagtccatcccattgtggacaagatcttgcaataccgcgaactcgcgaaattgaaaggcacctatattgaccgtcttccggcattagtccacccgaaaacgggacgcctccatacccgcttcaaccaaacagccacggcgaccggtcgtttgtcctcctctgatccaaaccttcagaatattccagtacgtaccccattgggccagaagatccgccgtgcgtttgtagctgaggagggttggcgtttagtggccctcgattatagccaaattgaattacgtgtccttgcccatctttctggcgatgagaacctcatccgcgtgtttcaggaaggcaaagacattcacactcaaacggcaagctggatgtttggattatcagctgaagcgatcgatcctttgatgcgtcgtgcagcgaagaccatcaatttcggtgttctctacggtatgagtgcctttcgtttgtcgcaggaattaggcattccctatgaagaagctcaggcgttcattcagaaatactttcaaagctatcccaaagttaaagcatggatcgagaagactctcgaagaaggccgcacacgtggttacgtagagaccttatttggacgtcgccgctatgttcccgatttaaacgctcgcgtgaaaggcaagcgtgaagccgccgaacgcatggcgttcaacatgcctgtacagggcacggcagctgacctcatgaaacttgcaatggtgcgcctttttccacaattgcgtgaagttggtgcccgcatgctcttgcaggtccacgatgaactcttgttagaagcgccaaaagagcgtgcggaagaggtggcagccctcgcgaaagaagttatggaaggcgtgtggcccttagcggtgcctcttgaagtcgaagttggtattggcgaggattggctggctgccaaaggataatga

SEQ ID NO: 3248 - protein, 841 aa, synthetic construct; identical to SEQ ID NO: 3018
  REGION 1..841: note = Variant of DNA polymerase I from Thermus sp. strain 2.9

SEQ ID NO: 3249 - DNA, 2529 bp, synthetic construct
  misc_feature 1..2529: note = Variant of DNA polymerase I from Thermus sp. strain 2.9
  source 1..2529: mol_type = other DNA
atgcaccatcatcatcatcatggcggtagcggcgtgttaccggtgttcgagcctaaaggtcgcgtgcttctggttgatggccatcatctcgcgtatcgtaacttctttgccctgaaaggattaaccaccagcagcggcgagccggtacagggtgtctacggctttgcaaagtcgctcctgaaagctctgaaagaagacggtgatgtggtgattgttgtctttgatgcgaaagcgccaagttttcgccacgaagcgtacgaagcttacaaagccgggcgtgctccaacgccggaagactttcctcgccaattggcgcttatgaaggaattagtggatttgcttggcctcgaacgcttggaagttcccggtttcgaggcagacgacgtattagcgactctcgcaaagaaagccgaacgtgagggctatgaagtccagatcttgacagcagatcgcgatcttttccagcttttatctccgcgcatctcggtgttacacccggaagggcatcgtatcaccccggaatggctctgggagaaatatggtttgcgtcccgaacaatgggtggattttcgcgccttagcaggcgatccgagcgacaatattccgggagttaaaggtatcggcgagaagacggcgctcaagctccttaaagaatgggggtcgttggagaacttgcttaagaatttagatcaggtcaaaccagagtcagtgcgtgagaagattcttgctcacctcgaagacctcaaattaagccgcgaattgtcccgtgtacgcaccgatttgccgctcgaagttgatttccgtcgccgccgcgaacctgactgggagggtcttaaagcgtttttagagcgtcttgaatttggttcgctcttgcatgaattcggccttttagaaagcccgttaccagccgaagaagcaccttggccaccgcccgagggcgcgtttttaggttaccgtttgagtcgcccggaaccgatgtgggccgaattactggctcttgcagcgtctgcccagggacgtgtgtatcgcgcggaagaccctcatggtgcgctccgcggcctcttcgaagtccgtggactccttgccaaagacttagctgttgttgcattgcgcgaaggtcttgatttacctccgactgatgatccaatgcttcttgcgtacctcttggacccgtcaaacacgacgcccgaaggcgtagcccgtcgttacggcggcgagtggaccgaagatgcagcgaaacgcgcgttattggccgaacgtttgcacgccaatttattaggacgtttgcaaggcgaggaacgtctcctctggctttacgaagaagtggagaaaccattgagtcgcgtgctcgcgcatatggaagctaccggtgtcaaattagacgtggcgtatttggagaatctcagccttgaagttgctgcccacatgcgccgcttggaggaagaagtattccgtttagcaggccattcctttcgccttaattctcgcgatcagttagaacgtgtgttgttcgatgaacttggtctccctcctatcggcaagacagagaagaccggtaaacgtagcacttcagcggcggttttagaagctcttcgcgaagtccatcccattgtggacaagatcttgcaataccgcgaactcgcgaaattgaaaggcacctatattgaccgtcttccggcattagtccacccgaaaacgggacgcctccatacccgcttcaaccaaacagccacggcgaccggtcgtttgtcctcctctgatccaaaccttcagaatattccagtacgtaccccattgggccagaagatccgccgtgcgtttgtagctgaggagggttggcgtttagtggccctcgattatagccaaattgaattacgtgtccttgcccatctttctggcgatgagaacctcatccgcgtgtttcaggaaggcaaagacattcacactcaaacggcaagctggatgtttggattatcagctgaagcgatcgatcctttgatgcgtcgtgcagcgaagaccatcaatttcggtgttctctacggtatgagtgcctttcgtttgtcgcaggaattaggcattccctatgaagaagctcaggcgttcattcagaaatactttcaaagctatcccaaagttaaagcatggatcgagaagactctcgaagaaggccgcacacgtggttacgtagagaccttatttggacgtcgccgctatgttcccgatttaaacgctcgcgtgaaaggcaagcgtgaagccgccgaacgcatggcgttcaacatgcctgtacagggcacggcagctgacctcatgaaacttgcaatggtgcgcctttttccacaattgcgtgaagttggtgcccgcatgctcttgcaggtccacgatgaactcttgttagaagcgccaaaagagcgtgcggaagaggtggcagccctcgcgaaaaccgttatggaaggcgtgtggcccttagcggtgcctcttgaagtcgaagttggtattggcgaggattggctggctgccaaaggataatga

SEQ ID NO: 3250 - protein, 841 aa, synthetic construct
  REGION 1..841: note = Variant of DNA polymerase I from Thermus sp. strain 2.9
MHHHHHHGGSGVLPVFEPKGRVLLVDGHHLAYRNFFALKGLTTSSGEPVQGVYGFAKSLLKALKEDGDVVIVVFDAKAPSFRHEAYEAYKAGRAPTPEDFPRQLALMKELVDLLGLERLEVPGFEADDVLATLAKKAEREGYEVQILTADRDLFQLLSPRISVLHPEGHRITPEWLWEKYGLRPEQWVDFRALAGDPSDNIPGVKGIGEKTALKLLKEWGSLENLLKNLDQVKPESVREKILAHLEDLKLSRELSRVRTDLPLEVDFRRRREPDWEGLKAFLERLEFGSLLHEFGLLESPLPAEEAPWPPPEGAFLGYRLSRPEPMWAELLALAASAQGRVYRAEDPHGALRGLFEVRGLLAKDLAVVALREGLDLPPTDDPMLLAYLLDPSNTTPEGVARRYGGEWTEDAAKRALLAERLHANLLGRLQGEERLLWLYEEVEKPLSRVLAHMEATGVKLDVAYLENLSLEVAAHMRRLEEEVFRLAGHSFRLNSRDQLERVLFDELGLPPIGKTEKTGKRSTSAAVLEALREVHPIVDKILQYRELAKLKGTYIDRLPALVHPKTGRLHTRFNQTATATGRLSSSDPNLQNIPVRTPLGQKIRRAFVAEEGWRLVALDYSQIELRVLAHLSGDENLIRVFQEGKDIHTQTASWMFGLSAEAIDPLMRRAAKTINFGVLYGMSAFRLSQELGIPYEEAQAFIQKYFQSYPKVKAWIEKTLEEGRTRGYVETLFGRRRYVPDLNARVKGKREAAERMAFNMPVQGTAADLMKLAMVRLFPQLREVGARMLLQVHDELLLEAPKERAEEVAALAKTVMEGVWPLAVPLEVEVGIGEDWLAAKG

SEQ ID NO: 3251 - DNA, 2529 bp, synthetic construct; identical to SEQ ID NO: 3085
  misc_feature 1..2529: note = Variant of DNA polymerase I from Thermus sp. strain 2.9
  source 1..2529: mol_type = other DNA

SEQ ID NO: 3252 - protein, 841 aa, synthetic construct; identical to SEQ ID NO: 3086
  REGION 1..841: note = Variant of DNA polymerase I from Thermus sp. strain 2.9

SEQ ID NO: 3253 - DNA, 2529 bp, synthetic construct
  misc_feature 1..2529: note = Variant of DNA polymerase I from Thermus sp. strain 2.9
  source 1..2529: mol_type = other DNA
atgcaccatcatcatcatcatggcggtagcggcgtgttaccggtgttcgagcctaaaggtcgcgtgcttctggttgatggccatcatctcgcgtatcgtaacttctttgccctgaaaggattaaccaccagcagcggcgagccggtacagggtgtctacggctttgcaaagtcgctcctgaaagctctgaaagaagacggtgatgtggtgattgttgtctttgatgcgaaagcgccaagttttcgccacgaagcgtacgaagcttacaaagccgggcgtgctccaacgccggaagactttcctcgccaattggcgcttatgaaggaattagtggatttgcttggcctcgaacgcttggaagttcccggtttcgaggcagacgacgtattagcgactctcgcaaagaaagccgaacgtgagggctatgaagtccagatcttgacagcagatcgcgatcttttccagcttttatctccgcgcatctcggtgttacacccggaagggcatcgtatcaccccggaatggctctgggagaaatatggtttgcgtcccgaacaatgggtggattttcgcgccttagcaggcgatccgagcgacaatattccgggagttaaaggtatcggcgagaagacggcgctcaagctccttaaagaatgggggtcgttggagaacttgcttaaaaatttagatcaggtcaaaccagagtcagtgcgtgagaagattcttgctcacctcgaagacctcaaattaagccgcgaattgtcccgtgtacgcaccgatttgccgctcgaagttgatttccgtcgccgccgcgaacctgactgggagggtcttaaagcgtttttagagcgtcttgaatttggttcgctcttgcatgaattcggccttttagaaagcccgttaccagccgaagaagcaccttggccaccgcccgagggcgcgtttttaggttaccgtttgagtcgcccggaaccgatgtgggccgaattactggctcttgcagcgtctgcccagggacgtgtgtatcgcgcggaagaccctcatggtgcgctccgcggcctcttcgaagtccgtggactccttgccaaagacttagctgttgttgcattgcgcgaaggtcttgatttacctccgactgatgatccaatgcttcttgcgtacctcttggacccgtcaaacacgacgcccgaaggcgtagcccgtcgttacggcggcgagtggaccgaagatgcagcgaaacgcgcgttattggccgaacgtttgcacgaaaatttattaggacgtttgcaaggcgaggaacgtctcctctggctttacgaagaagtggagaaaccattgagtcgcgtgctcgcgcatatggaagctaccggtgtcaaattagacgtggcgtatttggaggctctcagccttgaagttgctgcccacatgcgccgcttggaggaagaagtattccgtttagcaggccattcctttcgccttaattctcgcgatcagttagaacgtgtgttgttcgatgaacttggtctccctcctatcggcaagacagagaagaccggtaaacgtagcacttcagcggcggttttagaagctcttcgcgaagtccatcccattgtggacaagatcttgcagtaccgcgaactcgcgaaattgaaaggcacctatattgaccgtcttccggcattagtccacccgaaaacgggacgcctccatacccgcttcaaccaaacagccacggcgaccggtcgtttgtcctcctctgatccaaaccttcagaatattccagtacgtaccccattgggccagaagatccgccgtgcgtttgtagctgaggagggttggcgtttagtggccctcgattatagccaaattgaattacgtgtccttgcccatctttctggcgatgagaacctcatccgcgtgtttcaggaaggcaaagacattcacactcaaacggcaagctggatgtttggattatcagctgaagcgatcgatcctttgatgcgtcgtgcagcgaagaccatcaatttcggtgttctctacggtatgagtgcctttcgtttgtcgcaggaattaggcattccctatgaagaagctgcggcgttcattcagaaatactttcaaagctatcccaaagttaaagcatggatcgagaagactctcgaagaaggccgcacacgtggttacgtagagaccttatttggacgtcgccgctatgttcccgatttaaacgctcgcgtgaaaggcaagcgtgaagccgccgaacgcatggcgttcaacatgcctgtacagggcacggcagctgacctcatgaaacttgcaatggtgcgcctttttccacaattgcgtgaagttggtgcccgcatgctcttgcaggtccacgatgaactcttgttagaagcgccaaaagagcgtgcggaagaggtggcagccctcgcgaaagaagttatggaaggcgtgtggcccttagcggtgcctcttgaagtcgaagttggtattggcgaggattggctggctgccaaaggataatga

SEQ ID NO: 3254 - protein, 841 aa, synthetic construct
  REGION 1..841: note = Variant of DNA polymerase I from Thermus sp. strain 2.9
MHHHHHHGGSGVLPVFEPKGRVLLVDGHHLAYRNFFALKGLTTSSGEPVQGVYGFAKSLLKALKEDGDVVIVVFDAKAPSFRHEAYEAYKAGRAPTPEDFPRQLALMKELVDLLGLERLEVPGFEADDVLATLAKKAEREGYEVQILTADRDLFQLLSPRISVLHPEGHRITPEWLWEKYGLRPEQWVDFRALAGDPSDNIPGVKGIGEKTALKLLKEWGSLENLLKNLDQVKPESVREKILAHLEDLKLSRELSRVRTDLPLEVDFRRRREPDWEGLKAFLERLEFGSLLHEFGLLESPLPAEEAPWPPPEGAFLGYRLSRPEPMWAELLALAASAQGRVYRAEDPHGALRGLFEVRGLLAKDLAVVALREGLDLPPTDDPMLLAYLLDPSNTTPEGVARRYGGEWTEDAAKRALLAERLHENLLGRLQGEERLLWLYEEVEKPLSRVLAHMEATGVKLDVAYLEALSLEVAAHMRRLEEEVFRLAGHSFRLNSRDQLERVLFDELGLPPIGKTEKTGKRSTSAAVLEALREVHPIVDKILQYRELAKLKGTYIDRLPALVHPKTGRLHTRFNQTATATGRLSSSDPNLQNIPVRTPLGQKIRRAFVAEEGWRLVALDYSQIELRVLAHLSGDENLIRVFQEGKDIHTQTASWMFGLSAEAIDPLMRRAAKTINFGVLYGMSAFRLSQELGIPYEEAAAFIQKYFQSYPKVKAWIEKTLEEGRTRGYVETLFGRRRYVPDLNARVKGKREAAERMAFNMPVQGTAADLMKLAMVRLFPQLREVGARMLLQVHDELLLEAPKERAEEVAALAKEVMEGVWPLAVPLEVEVGIGEDWLAAKG

SEQ ID NO: 3255 - DNA, 2529 bp, synthetic construct
  misc_feature 1..2529: note = Variant of DNA polymerase I from Thermus sp. strain 2.9
  source 1..2529: mol_type = other DNA
atgcaccatcatcatcatcatggcggtagcggcgtgttaccggtgttcgagcctaaaggtcgcgtgcttctggttgatggccatcatctcgcgtatcgtaacttctttgccctgaaaggattaaccaccagcagcggcgagccggtacagggtgtctacggctttgcaaagtcgctcctgaaagctctgaaagaagacggtgatgtggtgattgttgtctttgatgcgaaagcgccaagttttcgccacgaagcgtacgaagcttacaaagccgggcgtgctccaacgccggaagactttcctcgccaattggcgcttatgaaggaattagtggatttgcttggcctcgaacgcttggaagttcccggtttcgaggcagacgacgtattagcgactctcgcaaagaaagccgaacgtgagggctatgaagtccagatcttgacagcagatcgcgatcttttccagcttttatctccgcgcatctcggtgttacacccggaagggcatcgtatcaccccggaatggctctgggagaaatatggtttgcgtcccgaacaatgggtggattttcgcgccttagcaggcgatccgagcgacaatattccgggagttaaaggtatcggcgagaagacggcgctcaagctccttaaagaatgggggtcgttggagaacttgcttaagaatttagatcaggtcaaaccagagtcagtgcgtgagaagattcttgctcacctcgaagacctcaaattaagccgcgaattgtcccgtgtacgcaccgatttgccgctcgaagttgatttccgccgccgccgcgaacctgactgggagggtcttaaagcgtttttagagcgtcttgaatttggttcgctcttgcatgaattcggccttttagaaagcccgttaccagccgaagaagcaccttggccaccgcccgagggcgcgtttttaggttaccgtttgagtcgcccggaaccgatgtgggccgaattactggctcttgcagcgtctgcccagggacgtgtgtatcgcgcggaagaccctcatggtgcgctccgcggcctcttcgaagtccgtggactccttgccaaagacttagctgttgttgcattgcgcgaaggtcttgatttacctccgactgatgatccaatgcttcttgcgtacctcttggacccgtcaaacacgacgcccgaaggcgtagcccgtcgttacggcggcgagtggaccgaagatgcagcgaaacgcgcgttattggccgaacgtttgcacgccaatttattaggacgtttgcaaggcgaggaacgtctcctctggctttacgaagaagtggagaaaccattgagtcgcgtgctcgcgcatatggaagctaccggtgtcaaattagacgtggcgtatttggaggctctcagccttgaagttgctgcccacatgcgccgcttggaggaagaagtattccgtttagcaggccgttcctttcgccttaattctcgcgatcagttagaacgtgtgttgttcgatgaacttggtctccctcctatcggcaagacagagaagaccggtaaacgtagcacttcagcggcggttttagaagctcttcgcgaagtccatcccattgtggacaagatcttgcagtaccgcgaactcgcgaaattgaaaggcacctatattgaccgtcttccggcattagtccacccgaaaacgggacgcctccatacccgcttcaaccaaacagccacggcgaccggtcgtttgtcctcctctgatccaaaccttcagaatattccagtacgtaccccattgggccagaagatccgccgtgcgtttgtagctgaggagggttggcgtttagtggccctcgattatagccaaattgaattacgtgtccttgcccatctttctggcgatgagaacctcatccgcgtgtttcaggaaggcaaagacattcacactcaaacggcaagctggatgtttggattatcagctgaagcgatcgatcctttgatgcgtcgtgcagcgaagaccatcaatttcggtgttctctacggtatgagtgcctttcgtttgtcgcaggaattaggcattccctatgaagaagctgcggcgttcattcagaaatactttcaaagctatcccaaagttaaagcatggatcgagaagactctcgaagaaggccgcacacgtggttacgtagagaccttatttggacgtcgccgctatgttcccgatttaaacgctcgcgtgaaaggcaagcgtgaagccgccgaacgcatggcgttcaacatgcctgtacagggcacggcagctgacctcatgaaacttgcaatggtgcgcctttttccacaattgcgtgaagttggtgcccgcatgctcttgcaggtccacgatgaactcttgttagaagcgccaaaagagcgtgcggaagaggtggcagccctcgcgaaagaagttatggaaggcgtgtggcccttagcggtgcctcttgaagtcgaagttggtattggcgaggattggctggctgccaaaggataatga

SEQ ID NO: 3256 - protein, 841 aa, synthetic construct; identical to SEQ ID NO: 3176
  REGION 1..841: note = Variant of DNA polymerase I from Thermus sp. strain 2.9

SEQ ID NO: 3257 - DNA, 2529 bp, synthetic construct
  misc_feature 1..2529: note = Variant of DNA polymerase I from Thermus sp. strain 2.9
  source 1..2529: mol_type = other DNA
atgcaccatcatcatcatcatggcggtagcggcgtgttaccggtgttcgagcctaaaggtcgcgtgcttctggttgatggccatcatctcgcgtatcgtaacttctttgccctgaaaggattaaccaccagcagcggcgagccggtacagggtgtctacggctttgcaaagtcgctcctgaaagctctgaaagaagacggtgatgtggtgattgttgtctttgatgcgaaagcgccaagttttcgccacgaagcgtacgaagcttacaaagccgggcgtgctccaacgccggaagactttcctcgccaattggcgcttatgaaggaattagtggatttgcttggcctcgaacgcttggaagttcccggtttcgaggcagacgacgtattagcgactctcgcaaagaaagccgaacgtgagggctatgaagtccagatcttgacagcagatcgcgatcttttccagcttttatctccgcgcatctcggtgttacacccggaagggcatcgtatcaccccggaatggctctgggagaaatatggtttgcgtcccgaacaatgggtggattttcgcgccttagcaggcgatccgagcgacaatattccgggagttaaaggtatcggcgagaagacggcgctcaagctccttaaagaatgggggtcgttggagaacttgcttaagaatttagatcaggtcaaaccagagtcagtgcgtgagaagattcttgctcacctcgaagacctcaaattaagccgcgaattgtcccgtgtacgcaccgatttgccgctcgaagttgatttccgtcgccgccgcgaacctgactgggagggtcttaaagcgtttttagagcgtcttgaatttggttcgctcttgcatgaattcggccttttagaaagcccgttaccggccgaagaagcaccttggccaccgcccgagggcgcgtttttaggttaccgtttgagtcgcccggaaccgatgtgggccgaattagcggctcttgcagcgtctgcccagggacgtgtgtatcgcgcggaagaccctcatggtgcgctccgcggcctcttcgaagtccgcggactccttgccaaagacttagctgttgttgcattgcgcgaaggtcttgatttacctccgactgatgatccaatgcttcttgcgtacctcttggacccgtcaaacacgacgcccgaaggcgtagcccgtcgttacggcggcgagtggaccgaagatgcagcgaaacgcgcgttattggccgaacgtttgcacgccaatttattaggacgtttgcaaggcgaggaacgtctcctctggctttacgaagaagtggagaaaccattgagtcgcgtgctcgcgcatatggaagctaccggtgtcaaattagacgtggcgtatttggaggctctcagccttgaagttgctgcccacatgcgccgcttggaggaagaagtattccgtttagcaggccattcctttcgccttaattctcgcgatcagttagaacgtgtgttgttcgatgaacttggtctccctcctatcggcaagacagagaagaccggtaaacgtagcacttcagcggcggttttagaagctcttcgcgaagtccatcccattgtggacaagatcttgcagtaccgcgaactcgcgaaattgaaaggcacctatattgaccgtcttccggcattagtccacccgaaaacgggacgcctccatacccgcttcaaccaaacagccacggcgaccggtcgtttgtcctcctctgatccaaaccttcagaatattccagtacgtaccccattgggccagaagatccgcaaagcgtttgtagctgaggagggttggcgtttagtggccctcgattatagtcaaattgaattacgtgtccttgcccatctttctggcgatgagaacctcatccgcgtgtttcaggaaggcaaagacattcacactcaaacggcaagctggatgtttggattatcagctgaagcgatcgatcctttgatgcgtcgtgcagcgaagaccatcaatttcggtgttctctacggtatgagtgcctttcgtttgtcgcaggaattaggcattccctatgaagaagctgcggcgttcattcagaaatactttcaaagctatcccaaagttaaagcatggatcgagaagactctcgaagaaggccgcacacgtggttacgtagagaccttatttggacgtcgccgctatgttcccgatttaaacgctcgcgtgaaaggcaagcgtgaagccgccgaacgcatggcgttcaacatgcctgtacagggcacggcagctgacctcatgaaacttgcaatggtgcgcctttttccacaattgcgtgaagttggtgcccgcatgctcttgcaggtccacgatgaactcttgttagaagcgccaaaagagcgtgcggaagaggtggcagccctcgcgaaagaagttatggaaggcgtgtggcccttagcggtgcctcttgaagtcgaagttggtattggcgaggattggctggctgccaaaggataatga

SEQ ID NO: 3258 - protein, 841 aa, synthetic construct
  REGION 1..841: note = Variant of DNA polymerase I from Thermus sp. strain 2.9
MHHHHHHGGSGVLPVFEPKGRVLLVDGHHLAYRNFFALKGLTTSSGEPVQGVYGFAKSLLKALKEDGDVVIVVFDAKAPSFRHEAYEAYKAGRAPTPEDFPRQLALMKELVDLLGLERLEVPGFEADDVLATLAKKAEREGYEVQILTADRDLFQLLSPRISVLHPEGHRITPEWLWEKYGLRPEQWVDFRALAGDPSDNIPGVKGIGEKTALKLLKEWGSLENLLKNLDQVKPESVREKILAHLEDLKLSRELSRVRTDLPLEVDFRRRREPDWEGLKAFLERLEFGSLLHEFGLLESPLPAEEAPWPPPEGAFLGYRLSRPEPMWAELAALAASAQGRVYRAEDPHGALRGLFEVRGLLAKDLAVVALREGLDLPPTDDPMLLAYLLDPSNTTPEGVARRYGGEWTEDAAKRALLAERLHANLLGRLQGEERLLWLYEEVEKPLSRVLAHMEATGVKLDVAYLEALSLEVAAHMRRLEEEVFRLAGHSFRLNSRDQLERVLFDELGLPPIGKTEKTGKRSTSAAVLEALREVHPIVDKILQYRELAKLKGTYIDRLPALVHPKTGRLHTRFNQTATATGRLSSSDPNLQNIPVRTPLGQKIRKAFVAEEGWRLVALDYSQIELRVLAHLSGDENLIRVFQEGKDIHTQTASWMFGLSAEAIDPLMRRAAKTINFGVLYGMSAFRLSQELGIPYEEAAAFIQKYFQSYPKVKAWIEKTLEEGRTRGYVETLFGRRRYVPDLNARVKGKREAAERMAFNMPVQGTAADLMKLAMVRLFPQLREVGARMLLQVHDELLLEAPKERAEEVAALAKEVMEGVWPLAVPLEVEVGIGEDWLAAKG

SEQ ID NO: 3259 - DNA, 22 bp, synthetic construct
  misc_feature 1..22: note = INFB Forward Primer Cat#10011562
  source 1..22: mol_type = other DNA
tcctcaaytcactcttcgagcg

SEQ ID NO: 3260 - DNA, 21 bp, synthetic construct
  misc_feature 1..21: note = INFB Reverse Primer Cat#10011563
  source 1..21: mol_type = other DNA
cggtgctcttgaccaaattgg

SEQ ID NO: 3261 - DNA, 27 bp, synthetic construct
  misc_feature 1..27: note = INFB (YAK) Probe Cat#10011564
  source 1..27: mol_type = other DNA
ccaattcgagcagctgaaactgcggtg

SEQ ID NO: 3262 - DNA, 20 bp, synthetic construct
  misc_feature 1..20: note = nCOV_N1 Forward Primer Cat#10006830
  source 1..20: mol_type = other DNA
gaccccaaaatcagcgaaat

SEQ ID NO: 3263 - DNA, 24 bp, synthetic construct
  misc_feature 1..24: note = nCOV_N1 Reverse Primer Cat#10006831
  source 1..24: mol_type = other DNA
tctggttactgccagttgaatctg

SEQ ID NO: 3264 - DNA, 24 bp, synthetic construct
  misc_feature 1..24: note = nCOV_N1 (FAM) Probe Cat#10006832
  source 1..24: mol_type = other DNA
accccgcattacgtttggtggacc

SEQ ID NO: 3265 - DNA, 19 bp, synthetic construct
  misc_feature 1..19: note = Codexis pCK For-Primer
  source 1..19: mol_type = other DNA
ccaatacgcaaaccgcctc

SEQ ID NO: 3266 - DNA, 21 bp, synthetic construct
  misc_feature 1..21: note = Codexis pCK Rev Primer
  source 1..21: mol_type = other DNA
caacggtggtatatccagtga

SEQ ID NO: 3267 - DNA, 2523 bp, synthetic construct
  misc_feature 1..2523: note = Variant of DNA polymerase I from Thermus sp. strain 2.9
  source 1..2523: mol_type = other DNA
atgcaccatcatcatcatcatggcggtattggcgtgttaccggtgttcgagcctaaaggtcgcgtgcttctggttgatggccatcatctcgcgtatcgtaacttctttgccctgaaaggattaaccaccagcagcggcgagccggtacagggtgtctacggctttgcaaagtcgctcctgaaagctctgaaagaagacggtgatgtggtgattgttgtctttgatgcgaaagcgccaagttttcgccacgaagcgtacgaagcttacaaagccgggcgtgctccaacgccggaagactttcctcgccaattggcgcttatgaaggaattagtggatttgcttggcctcgaacgcttggaagttcccggtttcgaggcagacgacgtattagcgactctcgcaaagaaagccgaacgtgagggctatgaagtccagatcttgacagcagatcgcgatcttttccagcttttatctccgcgcatctcggtgttacacccggaagggcatcgtatcaccccggaatggctctgggagaaatatggtttgcgtcccgaacaatgggtggattttcgcgccttagcaggcgatccgagcgacaatattccgggagttaaaggtatcggcgagaagacggcgctcaagctccttaaagaatgggggtcgttggagaacttgcttaagaatttagatcaggtcaaaccagagtcagtgcgtgagaagattcttgctcacctcgaagacctcaaattaagccgcgaattgtcccgtgtacgcaccgatttgccgctcgaagttgatttccaacgccgccgcgaacctgactgggagggtcttaaagcgtttttagagcgtcttgaatttggttcgctcttgcatgaattcggccttttagaaagcccgttaccagccgaagaagcaccttggccaccgcccgagggcgcgtttttaggttaccgtttgagtcgcccggaaccgatgtgggccgaattactggctcttgcagcgtctgcccagggacgtgtgtatcgcgcggaagaccctcatggtgcgctccgcggcctcttcgaagtccgtggactccttgccaaagacttagctgttgttgcattgcgcgaaggtcttgatttacctccgactgatgatccaatgcttcttgcgtacctcttggacccgtcaaacacgacgcccgaaggcgtagcccgtcgttacggcggcgagtggaccgaagatgcagcgaaacgcgcgttattggccgaacgtttgcacgccaatttattaggacgtttgcaaggcgaggaacgtctcctctggctttacgaagaagtggagaaaccattgagtcgcgtgctcgcgcatatggaagctaccggtgtcaaattagacgtggcgtatttggagaatctcagccttgaagttgctgcccacatgcgccgcttggaggaagaagtattccgtttagcaggccgttcctttcgccttaattctcgcgatcagttagaacgtgtgttgttcgatgaacttggtctccctcctatcggcaagacagagaagaccggtaaacgtagcacttcagcggcggttttagaagctcttcgcgaagtccatcccattgtggacaagatcttgcaataccgcgaactcgcgaaattgaaaggcacctatattgaccgtcttccggcattagtccacccgaaaacgggacgcctccatacccgcttcaaccaaacagccacggcgaccggtcgtttgtcctcctctgatccaaaccttcagaatattccagtacgtaccccattgggccagaagatccgccgtgcgtttgtagctgaggagggttggcgtttagtggccctcgattatagccaaattgaattacgtgtccttgcccatctttctggcgatgagaacctcatccgcgtgtttcaggaaggcaaagacattcacactcaaacggcaagctggatgtttggattatcagctgaagcgatcgatcctttgatgcgtcgtgcagcgaagaccatcaatttcggtgttctctacggtatgagtgcctttcgtttgtcgcaggaattaggcattccctatgaagaagctcaggcgttcattcagaaatactttcaaagctatcccaaagttaaagcatggatcgagaagactctcgaagaaggccgcacacgtggttacgtagagaccttatttggacgtcgccgctatgttcccgatttaaacgctcgcgtgaaaggcaagcgtgaagccgccgaacgcatggcgttcaacatgcctgtacagggcacggcagctgacctcatgaaacttgcaatggtgcgcctttttccacaattgcgtgaagttggtgcccgcatgctcttgcaggtccacgatgaactcttgttagaagcgccaaaagagcgtgcggaagaggtggcagccctcgcgaaagaagttatggaaggcgtgtggcccttagcggtgcctcttgaagtcgaagttggtattggcgaggattggctggctgccaaagga

SEQ ID NO: 3268 - protein, 841 aa, synthetic construct
  REGION 1..841: note = Variant of DNA polymerase I from Thermus sp. strain 2.9
MHHHHHHGGIGVLPVFEPKGRVLLVDGHHLAYRNFFALKGLTTSSGEPVQGVYGFAKSLLKALKEDGDVVIVVFDAKAPSFRHEAYEAYKAGRAPTPEDFPRQLALMKELVDLLGLERLEVPGFEADDVLATLAKKAEREGYEVQILTADRDLFQLLSPRISVLHPEGHRITPEWLWEKYGLRPEQWVDFRALAGDPSDNIPGVKGIGEKTALKLLKEWGSLENLLKNLDQVKPESVREKILAHLEDLKLSRELSRVRTDLPLEVDFQRRREPDWEGLKAFLERLEFGSLLHEFGLLESPLPAEEAPWPPPEGAFLGYRLSRPEPMWAELLALAASAQGRVYRAEDPHGALRGLFEVRGLLAKDLAVVALREGLDLPPTDDPMLLAYLLDPSNTTPEGVARRYGGEWTEDAAKRALLAERLHANLLGRLQGEERLLWLYEEVEKPLSRVLAHMEATGVKLDVAYLENLSLEVAAHMRRLEEEVFRLAGRSFRLNSRDQLERVLFDELGLPPIGKTEKTGKRSTSAAVLEALREVHPIVDKILQYRELAKLKGTYIDRLPALVHPKTGRLHTRFNQTATATGRLSSSDPNLQNIPVRTPLGQKIRRAFVAEEGWRLVALDYSQIELRVLAHLSGDENLIRVFQEGKDIHTQTASWMFGLSAEAIDPLMRRAAKTINFGVLYGMSAFRLSQELGIPYEEAQAFIQKYFQSYPKVKAWIEKTLEEGRTRGYVETLFGRRRYVPDLNARVKGKREAAERMAFNMPVQGTAADLMKLAMVRLFPQLREVGARMLLQVHDELLLEAPKERAEEVAALAKEVMEGVWPLAVPLEVEVGIGEDWLAAKG

SEQ ID NO: 3269 - DNA, 2523 bp, synthetic construct
  misc_feature 1..2523: note = Variant of DNA polymerase I from Thermus sp. strain 2.9
  source 1..2523: mol_type = other DNA
atgcaccatcatcatcatcatggcggtagcggcgtgttaccggtgttcgagcctaaaggtcgcgtgcttctggttgatggccatcatctcgcgtatcgtaacttctttgccctgaaaggattaaccaccagcagcggcgagccggtacagggtgtctacggctttgcaaagtcgctcctgaaagctctgaaagaagacggtgatgtggtgattgttgtctttgatgcgaaagcgccaagttttcgccacgaagcgtacgaagcttacaaagccgggcgtgctccaacgccggaagactttcctcgccaattggcgcttatgaaggaattagtggatttgcttggcctcgaacgcttggaagttcccggtttcgaggcagacgacgtattagcgactctcgcaaagaaagccgaacgtgagggctatgaagtccagatcttgacagcagatcgcgatcttttccagcttttatctccgcgcatctcggtgttacacccggaagggcatcgtatcaccccggaatggctctgggagaaatatggtttgcgtcccgaacaatgggtggattttcgcgccttagcaggcgatccgagcgacaatattccgggagttaaaggtatcggcgagaagacggcgctcaagctccttaaagaatgggggtcgttggagaacttgcttaagaatttagatcaggtcaaaccagagtcagtgcgtgagaagattcttgctcacctcgaagacctcaaattaagccgcgaattgtcccgtgtacgcaccgatttgccgctcgaagttgatttccaacgccgccgcgaacctgactgggagggtcttaaagcgtttttagagcgtcttgaatttggttcgctcttgcatgaattcggccttttagaaagcccgttaccagccgaagaagcaccttggccaccgcccgagggcgcgtttttaggttaccgtttgagtcgcccggaaccgatgtgggccgaattactggctcttgcagcgtctgcccagggacgtgtgtatcgcgcggaagaccctcatggtgcgctccgcggcctcttcgaagtccgtggactccttgccaaagacttagctgttgttgcattgcgcgaaggtcttgatttacctccgactgatgatccaatgcttcttgcgtacctcttggacccgtcaaacacgacgcccgaaggcgtagcccgtcgttacggcggcgagtggaccgaagatgcagcgaaacgcgcgttattggccgaacgtttgcacgccaatttattacttcgtttgcaaggcgaggaacgtctcctctggctttacgaagaagtggagaaaccattgagtcgcgtgctcgcgcatatggaagctaccggtgtcaaattagacgtggcgtatttggagaatctcagccttgaagttgctgcccacatgcgccgcttggaggaagaagtattccgtttagcaggccgttcctttcgccttaattctcgcgatcagttagaacgtgtgttgttcgatgaacttggtctccctcctatcggcaagacagagaagaccggtaaacgtagcacttcagcggcggttttagaagctcttcgcgaagtccatcccattgtggacaagatcttgcaataccgcgaactcgcgaaattgaaaggcacctatattgaccgtcttccggcattagtccacccgaaaacgggacgcctccatacccgcttcaaccaaacagccacggcgaccggtcgtttgtcctcctctgatccaaaccttcagaatattccagtacgtaccccattgggccagaagatccgccgtgcgtttgtagctgaggagggttggcgtttagtggccctcgattatagccaaattgaattacgtgtccttgcccatctttctggcgatgagaacctcatccgcgtgtttcaggaaggcaaagacattcacactcaaacggcaagctggatgtttggattatcagctgaagcgatcgatcctttgatgcgtcgtgcagcgaagaccatcaatttcggtgttctctacggtatgagtgcctttcgtttgtcgcaggaattaggcattccctatgaagaagctcaggcgttcattcagaaatactttcaaagctatcccaaagttaaagcatggatcgagaagactctcgaagaaggccgcacacgtggttacgtagagaccttatttggacgtcgccgctatgttcccgatttaaacgctcgcgtgaaaggcaagcgtgaagccgccgaacgcatggcgttcaacatgcctgtacagggcacggcagctgacctcatgaaacttgcaatggtgcgcctttttccacaattgcgtgaagttggtgcccgcatgctcttgcaggtccacgatgaactcttgttagaagcgccaaaagagcgtgcggaagaggtggcagccctcgcgaaagaagttatggaaggcgtgtggcccttagcggtgcctcttgaagtcgaagttggtattggcgaggattggctggctgccaaagga

SEQ ID NO: 3270 - protein, 841 aa, synthetic construct
  REGION 1..841: note = Variant of DNA polymerase I from Thermus sp. strain 2.9
MHHHHHHGGSGVLPVFEPKGRVLLVDGHHLAYRNFFALKGLTTSSGEPVQGVYGFAKSLLKALKEDGDVVIVVFDAKAPSFRHEAYEAYKAGRAPTPEDFPRQLALMKELVDLLGLERLEVPGFEADDVLATLAKKAEREGYEVQILTADRDLFQLLSPRISVLHPEGHRITPEWLWEKYGLRPEQWVDFRALAGDPSDNIPGVKGIGEKTALKLLKEWGSLENLLKNLDQVKPESVREKILAHLEDLKLSRELSRVRTDLPLEVDFQRRREPDWEGLKAFLERLEFGSLLHEFGLLESPLPAEEAPWPPPEGAFLGYRLSRPEPMWAELLALAASAQGRVYRAEDPHGALRGLFEVRGLLAKDLAVVALREGLDLPPTDDPMLLAYLLDPSNTTPEGVARRYGGEWTEDAAKRALLAERLHANLLLRLQGEERLLWLYEEVEKPLSRVLAHMEATGVKLDVAYLENLSLEVAAHMRRLEEEVFRLAGRSFRLNSRDQLERVLFDELGLPPIGKTEKTGKRSTSAAVLEALREVHPIVDKILQYRELAKLKGTYIDRLPALVHPKTGRLHTRFNQTATATGRLSSSDPNLQNIPVRTPLGQKIRRAFVAEEGWRLVALDYSQIELRVLAHLSGDENLIRVFQEGKDIHTQTASWMFGLSAEAIDPLMRRAAKTINFGVLYGMSAFRLSQELGIPYEEAQAFIQKYFQSYPKVKAWIEKTLEEGRTRGYVETLFGRRRYVPDLNARVKGKREAAERMAFNMPVQGTAADLMKLAMVRLFPQLREVGARMLLQVHDELLLEAPKERAEEVAALAKEVMEGVWPLAVPLEVEVGIGEDWLAAKG

SEQ ID NO: 3271 - DNA, 2523 bp, synthetic construct
  misc_feature 1..2523: note = Variant of DNA polymerase I from Thermus sp. strain 2.9
  source 1..2523: mol_type = other DNA
atgcaccatcatcatcatcatggcggtagcggcgtgttaccggtgttcgagcctaaaggtcgcgtgcttctggttgatggccatcatctcgcgtatcgtaacttctttgccctgaaaggattaaccaccagcagcggcgagccggtacagggtgtctacggctttgcaaagtcgctcctgaaagctctgaaagaagacggtgatgtggtgattgttgtctttgatgcgaaagcgccaagttttcgccacgaagcgtacgaagcttacaaagccgggcgtgctccaacgccggaagactttcctcgccaattggcgcttatgaaggaattagtggatttgcttggcctcgaacgcttggaagttcccggtttcgaggcagacgacgtattagcgactctcgcaaagaaagccgaacgtgagggctatgaagtccagatcttgacagcagatcgcgatcttttccagcttttatctccgcgcatctcggtgttacacccggaagggcatcgtatcaccccggaatggctctgggagaaatatggtttgcgtcccgaacaatgggtggattttcgcgccttagcaggcgatccgagcgacaatattccgggagttaaaggtatcggcgagaagacggcgctcaagctccttaaagaatgggggtcgttggagaacttgcttaagaatttagatcaggtcaaaccagagtcagtgcgtgagaagattcttgctcacctcgaagacctcaaattaagccgcgaattgtcccgtgtacgcaccgatttgccgctcgaagttgatttccaacgccgccgcgaacctgactgggagggtcttaaagcgtttttagagcgtcttgaatttggttcgctcttgcatgaattcggccttttagaaagcccgttaccagccgaagaagcaccttggccaccgcccgagggcgcgtttttaggttaccgtttgagtcgcccggaaccgatgtgggccgaattactggctcttgcagcgtctgcccagggacgtgtgtatcgcgcggaacctcctcatggtgcgctccgcggcctcttcgaagtccgtggactccttgccaaagacttagctgttgttgcattgcgcgaaggtcttgatttacctccgactgatgatccaatgcttcttgcgtacctcttggacccgtcaaacacgacgcccgaaggcgtagcccgtcgttacggcggcgagtggaccgaagatgcagcgaaacgcgcgttattggccgaacgtttgcacgccaatttattaggacgtttgcaaggcgaggaacgtctcctctggctttacgaagaagtggagaaaccattgagtcgcgtgctcgcgcatatggaagctaccggtgtcaaattagacgtggcgtatttggagaatctcagccttgaagttgctgcccacatgcgccgcttggaggaagaagtattccgtttagcaggccgttcctttcgccttaattctcgcgatcagttagaacgtgtgttgttcgatgaacttggtctccctcctatcggcaagacagagaagaccggtaaacgtagcacttcagcggcggttttagaagctcttcgcgaagtccatcccattgtggacaagatcttgcaataccgcgaactcgcgaaattgaaaggcacctatattgaccgtcttccggcattagtccacccgaaaacgggacgcctccatacccgcttcaaccaaacagccacggcgaccggtcgtttgtcctcctctgatccaaaccttcagaatattccagtacgtaccccattgggccagaagatccgccgtgcgtttgtagctgaggagggttggcgtttagtggccctcgattatagccaaattgaattacgtgtccttgcccatctttctggcgatgagaacctcatccgcgtgtttcaggaaggcaaagacattcacactcaaacggcaagctggatgtttggattatcagctgaagcgatcgatcctttgatgcgtcgtgcagcgaagaccatcaatttcggtgttctctacggtatgagtgcctttcgtttgtcgcaggaattaggcattccctatgaagaagctcaggcgttcattcagaaatactttcaaagctatcccaaagttaaagcatggatcgagaagactctcgaagaaggccgcacacgtggttacgtagagaccttatttggacgtcgccgctatgttcccgatttaaacgctcgcgtgaaaggcaagcgtgaagccgccgaacgcatggcgttcaacatgcctgtacagggcacggcagctgacctcatgaaacttgcaatggtgcgcctttttccacaattgcgtgaagttggtgcccgcatgctcttgcaggtccacgatgaactcttgttagaagcgccaaaagagcgtgcggaagaggtggcagccctcgcgaaagaagttatggaaggcgtgtggcccttagcggtgcctcttgaagtcgaagttggtattggcgaggattggctggctgccaaagga

SEQ ID NO: 3272 - protein, 841 aa, synthetic construct
  REGION 1..841: note = Variant of DNA polymerase I from Thermus sp. strain 2.9
MHHHHHHGGSGVLPVFEPKGRVLLVDGHHLAYRNFFALKGLTTSSGEPVQGVYGFAKSLLKALKEDGDVVIVVFDAKAPSFRHEAYEAYKAGRAPTPEDFPRQLALMKELVDLLGLERLEVPGFEADDVLATLAKKAEREGYEVQILTADRDLFQLLSPRISVLHPEGHRITPEWLWEKYGLRPEQWVDFRALAGDPSDNIPGVKGIGEKTALKLLKEWGSLENLLKNLDQVKPESVREKILAHLEDLKLSRELSRVRTDLPLEVDFQRRREPDWEGLKAFLERLEFGSLLHEFGLLESPLPAEEAPWPPPEGAFLGYRLSRPEPMWAELLALAASAQGRVYRAEPPHGALRGLFEVRGLLAKDLAVVALREGLDLPPTDDPMLLAYLLDPSNTTPEGVARRYGGEWTEDAAKRALLAERLHANLLGRLQGEERLLWLYEEVEKPLSRVLAHMEATGVKLDVAYLENLSLEVAAHMRRLEEEVFRLAGRSFRLNSRDQLERVLFDELGLPPIGKTEKTGKRSTSAAVLEALREVHPIVDKILQYRELAKLKGTYIDRLPALVHPKTGRLHTRFNQTATATGRLSSSDPNLQNIPVRTPLGQKIRRAFVAEEGWRLVALDYSQIELRVLAHLSGDENLIRVFQEGKDIHTQTASWMFGLSAEAIDPLMRRAAKTINFGVLYGMSAFRLSQELGIPYEEAQAFIQKYFQSYPKVKAWIEKTLEEGRTRGYVETLFGRRRYVPDLNARVKGKREAAERMAFNMPVQGTAADLMKLAMVRLFPQLREVGARMLLQVHDELLLEAPKERAEEVAALAKEVMEGVWPLAVPLEVEVGIGEDWLAAKG

SEQ ID NO: 3273 - DNA, 2523 bp, synthetic construct; identical to SEQ ID NO: 3267
  misc_feature 1..2523: note = Variant of DNA polymerase I from Thermus sp. strain 2.9
  source 1..2523: mol_type = other DNA

SEQ ID NO: 3274 - protein, 841 aa, synthetic construct; identical to SEQ ID NO: 3268
  REGION 1..841: note = Variant of DNA polymerase I from Thermus sp. strain 2.9

SEQ ID NO: 3275 - DNA, 2523 bp, synthetic construct
  misc_feature 1..2523: note = Variant of DNA polymerase I from Thermus sp. strain 2.9
  source 1..2523: mol_type = other DNA
atgcaccatgggcatcatcatggcggtagcggcgtgttaccggtgttcgagcctaaaggtcgcgtgcttctggttgatggccatcatctcgcgtatcgtaacttctttgccctgaaaggattaaccaccagcagcggcgagccggtacagggtgtctacggctttgcaaagtcgctcctgaaagctctgaaagaagacggtgatgtggtgattgttgtctttgatgcgaaagcgccaagttttcgccacgaagcgtacgaagcttacaaagccgggcgtgctccaacgccggaagactttcctcgccaattggcgcttatgaaggaattagtggatttgcttggcctcgaacgcttggaagttcccggtttcgaggcagacgacgtattagcgactctcgcaaagaaagccgaacgtgagggctatgaagtccagatcttgacagcagatcgcgatcttttccagcttttatctccgcgcatctcggtgttacacccggaagggcatcgtatcaccccggaatggctctgggagaaatatggtttgcgtcccgaacaatgggtggattttcgcgccttagcaggcgatccgagcgacaatattccgggagttaaaggtatcggcgagaagacggcgctcaagctccttaaagaatgggggtcgttggagaacttgcttaagaatttagatcaggtcaaaccagagtcagtgcgtgagaagattcttgctcacctcgaagacctcaaattaagccgcgaattgtcccgtgtacgcaccgatttgccgctcgaagttgatttccaacgccgccgcgaacctgactgggagggtcttaaagcgtttttagagcgtcttgaatttggttcgctcttgcatgaattcggccttttagaaagcccgttaccagccgaagaagcaccttggccaccgcccgagggcgcgtttttaggttaccgtttgagtcgcccggaaccgatgtgggccgaattactggctcttgcagcgtctgcccagggacgtgtgtatcgcgcggaagaccctcatggtgcgctccgcggcctcttcgaagtccgtggactccttgccaaagacttagctgttgttgcattgcgcgaaggtcttgatttacctccgactgatgatccaatgcttcttgcgtacctcttggacccgtcaaacacgacgcccgaaggcgtagcccgtcgttacggcggcgagtggaccgaagatgcagcgaaacgcgcgttattggccgaacgtttgcacgccaatttattaggacgtttgcaaggcgaggaacgtctcctctggctttacgaagaagtggagaaaccattgagtcgcgtgctcgcgcatatggaagctaccggtgtcaaattagacgtggcgtatttggagaatctcagccttgaagttgctgcccacatgcgccgcttggaggaagaagtattccgtttagcaggccgttcctttcgccttaattctcgcgatcagttagaacgtgtgttgttcgatgaacttggtctccctcctatcggcaagacagagaagaccggtaaacgtagcacttcagcggcggttttagaagctcttcgcgaagtccatcccattgtggacaagatcttgcaataccgcgaactcgcgaaattgaaaggcacctatattgaccgtcttccggcattagtccacccgaaaacgggacgcctccatacccgcttcaaccaaacagccacggcgaccggtcgtttgtcctcctctgatccaaaccttcagaatattccagtacgtaccccattgggccagaagatccgccgtgcgtttgtagctgaggagggttggcgtttagtggccctcgattatagccaaattgaattacgtgtccttgcccatctttctggcgatgagaacctcatccgcgtgtttcaggaaggcaaagacattcacactcaaacggcaagctggatgtttggattatcagctgaagcgatcgatcctttgatgcgtcgtgcagcgaagaccatcaatttcggtgttctctacggtatgagtgcctttcgtttgtcgcaggaattaggcattccctatgaagaagctcaggcgttcattcagaaatactttcaaagctatcccaaagttaaagcatggatcgagaagactctcgaagaaggccgcacacgtggttacgtagagaccttatttggacgtcgccgctatgttcccgatttaaacgctcgcgtgaaaggcaagcgtgaagccgccgaacgcatggcgttcaacatgcctgtacagggcacggcagctgacctcatgaaacttgcaatggtgcgcctttttccacaattgcgtgaagttggtgcccgcatgctcttgcaggtccacgatgaactcttgttagaagcgccaaaagagcgtgcggaagaggtggcagccctcgcgaaagaagttatggaaggcgtgtggcccttagcggtgcctcttgaagtcgaagttggtattggcgaggattggctggctgccaaagga

SEQ ID NO: 3276 - protein, 841 aa, synthetic construct
  REGION 1..841: note = Variant of DNA polymerase I from Thermus sp. strain 2.9
MHHGHHHGGSGVLPVFEPKGRVLLVDGHHLAYRNFFALKGLTTSSGEPVQGVYGFAKSLLKALKEDGDVVIVVFDAKAPSFRHEAYEAYKAGRAPTPEDFPRQLALMKELVDLLGLERLEVPGFEADDVLATLAKKAEREGYEVQILTADRDLFQLLSPRISVLHPEGHRITPEWLWEKYGLRPEQWVDFRALAGDPSDNIPGVKGIGEKTALKLLKEWGSLENLLKNLDQVKPESVREKILAHLEDLKLSRELSRVRTDLPLEVDFQRRREPDWEGLKAFLERLEFGSLLHEFGLLESPLPAEEAPWPPPEGAFLGYRLSRPEPMWAELLALAASAQGRVYRAEDPHGALRGLFEVRGLLAKDLAVVALREGLDLPPTDDPMLLAYLLDPSNTTPEGVARRYGGEWTEDAAKRALLAERLHANLLGRLQGEERLLWLYEEVEKPLSRVLAHMEATGVKLDVAYLENLSLEVAAHMRRLEEEVFRLAGRSFRLNSRDQLERVLFDELGLPPIGKTEKTGKRSTSAAVLEALREVHPIVDKILQYRELAKLKGTYIDRLPALVHPKTGRLHTRFNQTATATGRLSSSDPNLQNIPVRTPLGQKIRRAFVAEEGWRLVALDYSQIELRVLAHLSGDENLIRVFQEGKDIHTQTASWMFGLSAEAIDPLMRRAAKTINFGVLYGMSAFRLSQELGIPYEEAQAFIQKYFQSYPKVKAWIEKTLEEGRTRGYVETLFGRRRYVPDLNARVKGKREAAERMAFNMPVQGTAADLMKLAMVRLFPQLREVGARMLLQVHDELLLEAPKERAEEVAALAKEVMEGVWPLAVPLEVEVGIGEDWLAAKG

SEQ ID NO: 3277 - DNA, 2523 bp, synthetic construct
  misc_feature 1..2523: note = Variant of DNA polymerase I from Thermus sp. strain 2.9
  source 1..2523: mol_type = other DNA
atgcaccatcatcatcatcatggcggtagcggcgtgttaccggtgttcgagcctaaaggtcgcgtgcttctggttgatggccatcatctcgcgtatcgtaacttctttgccctgaaaggattaaccaccagcagcggcgagccggtacagggtgtctacggctttgcaaagtcgctcctgaaagctctgaaagaagacggtgatgtggtgattgttgtctttgatgcgaaagcgccaagttttcgccacgaagcgtacgaagcttacaaagccgggcgtgctccaacgccggaagactttcctcgccaattggcgcttatgaaggaattagtggatttgcttggcctcgaacgcttggaagttaggggtttcgaggcagacgacgtattagcgactctcgcaaagaaagccgaacgtgagggctatgaagtccagatcttgacagcagatcgcgatcttttccagcttttatctccgcgcatctcggtgttacacccggaagggcatcgtatcaccccggaatggctctgggagaaatatggtttgcgtcccgaacaatgggtggattttcgcgccttagcaggcgatccgagcgacaatattccgggagttaaaggtatcggcgagaagacggcgctcaagctccttaaagaatgggggtcgttggagaacttgcttaagaatttagatcaggtcaaaccagagtcagtgcgtgagaagattcttgctcacctcgaagacctcaaattaagccgcgaattgtcccgtgtacgcaccgatttgccgctcgaagttgatttccaacgccgccgcgaacctgactgggagggtcttaaagcgtttttagagcgtcttgaatttggttcgctcttgcatgaattcggccttttagaaagcccgttaccagccgaagaagcaccttggccaccgcccgagggcgcgtttttaggttaccgtttgagtcgcccggaaccgatgtgggccgaattactggctcttgcagcgtctgcccagggacgtgtgtatcgcgcggaagaccctcatggtgcgctccgcggcctcttcgaagtccgtggactccttgccaaagacttagctgttgttgcattgcgcgaaggtcttgatttacctccgactgatgatccaatgcttcttgcgtacctcttggacccgtcaaacacgacgcccgaaggcgtagcccgtcgttacggcggcgagtggaccgaagatgcagcgaaacgcgcgttattggccgaacgtttgcacgccaatttattaggacgtttgcaaggcgaggaacgtctcctctggctttacgaagaagtggagaaaccattgagtcgcgtgctcgcgcatatggaagctaccggtgtcaaattagacgtggcgtatttggagaatctcagccttgaagttgctgcccacatgcgccgcttggaggaagaagtattccgtttagcaggccgttcctttcgccttaattctcgcgatcagttagaacgtgtgttgttcgatgaacttggtctccctcctatcggcaagacagagaagaccggtaaacgtagcacttcagcggcggttttagaagctcttcgcgaagtccatcccattgtggacaagatcttgcaataccgcgaactcgcgaaattgaaaggcacctatattgaccgtcttccggcattagtccacccgaaaacgggacgcctccatacccgcttcaaccaaacagccacggcgaccggtcgtttgtcctcctctgatccaaaccttcagaatattccagtacgtaccccattgggccagaagatccgccgtgcgtttgtagctgaggagggttggcgtttagtggccctcgattatagccaaattgaattacgtgtccttgcccatctttctggcgatgagaacctcatccgcgtgtttcaggaaggcaaagacattcacactcaaacggcaagctggatgtttggattatcagctgaagcgatcgatcctttgatgcgtcgtgcagcgaagaccatcaatttcggtgttctctacggtatgagtgcctttcgtttgtcgcaggaattaggcattccctatgaagaagctcaggcgttcattcagaaatactttcaaagctatcccaaagttaaagcatggatcgagaagactctcgaagaaggccgcacacgtggttacgtagagaccttatttggacgtcgccgctatgttcccgatttaaacgctcgcgtgaaaggcaagcgtgaagccgccgaacgcatggcgttcaacatgcctgtacagggcacggcagctgacctcatgaaacttgcaatggtgcgcctttttccacaattgcgtgaagttggtgcccgcatgctcttgcaggtccacgatgaactcttgttagaagcgccaaaagagcgtgcggaagaggtggcagccctcgcgaaagaagttatggaaggcgtgtggcccttagcggtgcctcttgaagtcgaagttggtattggcgaggattggctggctgccaaagga

SEQ ID NO: 3278 - protein, 841 aa, synthetic construct
  REGION 1..841: note = Variant of DNA polymerase I from Thermus sp. strain 2.9
MHHHHHHGGSGVLPVFEPKGRVLLVDGHHLAYRNFFALKGLTTSSGEPVQGVYGFAKSLLKALKEDGDVVIVVFDAKAPSFRHEAYEAYKAGRAPTPEDFPRQLALMKELVDLLGLERLEVRGFEADDVLATLAKKAEREGYEVQILTADRDLFQLLSPRISVLHPEGHRITPEWLWEKYGLRPEQWVDFRALAGDPSDNIPGVKGIGEKTALKLLKEWGSLENLLKNLDQVKPESVREKILAHLEDLKLSRELSRVRTDLPLEVDFQRRREPDWEGLKAFLERLEFGSLLHEFGLLESPLPAEEAPWPPPEGAFLGYRLSRPEPMWAELLALAASAQGRVYRAEDPHGALRGLFEVRGLLAKDLAVVALREGLDLPPTDDPMLLAYLLDPSNTTPEGVARRYGGEWTEDAAKRALLAERLHANLLGRLQGEERLLWLYEEVEKPLSRVLAHMEATGVKLDVAYLENLSLEVAAHMRRLEEEVFRLAGRSFRLNSRDQLERVLFDELGLPPIGKTEKTGKRSTSAAVLEALREVHPIVDKILQYRELAKLKGTYIDRLPALVHPKTGRLHTRFNQTATATGRLSSSDPNLQNIPVRTPLGQKIRRAFVAEEGWRLVALDYSQIELRVLAHLSGDENLIRVFQEGKDIHTQTASWMFGLSAEAIDPLMRRAAKTINFGVLYGMSAFRLSQELGIPYEEAQAFIQKYFQSYPKVKAWIEKTLEEGRTRGYVETLFGRRRYVPDLNARVKGKREAAERMAFNMPVQGTAADLMKLAMVRLFPQLREVGARMLLQVHDELLLEAPKERAEEVAALAKEVMEGVWPLAVPLEVEVGIGEDWLAAKG

SEQ ID NO: 3279 - DNA, 2523 bp, synthetic construct
  misc_feature 1..2523: note = Variant of DNA polymerase I from Thermus sp. strain 2.9
  source 1..2523: mol_type = other DNA
atgcaccatcatcatcatcatggcggtagcggcgtgttaccggtgttcgagcctaaaggtcgcgtgcttctggttgatggccatcatctcgcgtatcgtaacttctttgccctgaaaggattaaccaccagcagcggcgagccggtacagggtgtctacggctttgcaaagtcgctcctgaaagctctgaaagaagacggtgatgtggtgattgttgtctttgatgcgaaagcgccaagttttcgccacgaagcgtacgaagcttacaaagccgggcgtgctccaacgccggaagactttcctcgccaattggcgcttatgaaggaattagtggatttgcttggcctcgaacgcttggaagttcccggtttcgaggcagacgacgtattagcgactctcgcaaagaaagccgaacgtgagggctatgaagtccagatcttgacagcagatcgcgatcttttccagcttttatctccgcgcatctcggtgttacacccggaagggcatcgtatcaccccggaatggctctgggagaaatatggtttgcgtcccgaacaatgggtggattttcgcgccttagcaggcgatccgagcgacaatattccgggagttaaaggtatcggcgagaagacggcgctcaagctccttaaagaatgggggtcgttggagaacttgcttaagaatttagatcaggtcaaaccagagtcagtgcgtgagaagattcttgctcacctcgaagacctcaaattaagccgcgaattgtcccgtgtacgcaccgatttgccgctcgaagttgatttccaacgccgccgcgaacctgactgggagggtcttaaagcgtttttagagcgtcttgaatttggttcgctcttgcatgaattcggccttttagaaagcccgttaccagccgaagaagcaccttggccaccgcccgagggcgcgtttttaggttaccgtttgagtcgcccggaaccgatgtgggccgaattactggctcttgcagcgtctgcccagggacgtgtgtatcgcgcggaagaccctcatggtgcgctccgcggcctcttcgaagtccgtggactccttgccaaagacttagctgttgttgcattgcgcgaaggtcttgatttacctccgactgatgatccaatgcttcttgcgtacctcttggacccgtcaaacacgacgcccgaaggcgtagcccgtcgttacggcggcgagtggaccgaagatgcagcgaaacgcgcgttattggccgaacgtttgcacgccaatttattaggacgtttgcaaggcgaggaacgtctcgagtggctttacgaagaagtggagaaaccattgagtcgcgtgctcgcgcatatggaagctaccggtgtcaaattagacgtggcgtatttggagaatctcagccttgaagttgctgcccacatgcgccgcttggaggaagaagtattccgtttagcaggccgttcctttcgccttaattctcgcgatcagttagaacgtgtgttgttcgatgaacttggtctccctcctatcggcaagacagagaagaccggtaaacgtagcacttcagcggcggttttagaagctcttcgcgaagtccatcccattgtggacaagatcttgcaataccgcgaactcgcgaaattgaaaggcacctatattgaccgtcttccggcattagtccacccgaaaacgggacgcctccatacccgcttcaaccaaacagccacggcgaccggtcgtttgtcctcctctgatccaaaccttcagaatattccagtacgtaccccattgggccagaagatccgccgtgcgtttgtagctgaggagggttggcgtttagtggccctcgattatagccaaattgaattacgtgtccttgcccatctttctggcgatgagaacctcatccgcgtgtttcaggaaggcaaagacattcacactcaaacggcaagctggatgtttggattatcagctgaagcgatcgatcctttgatgcgtcgtgcagcgaagaccatcaatttcggtgttctctacggtatgagtgcctttcgtttgtcgcaggaattaggcattccctatgaagaagctcaggcgttcattcagaaatactttcaaagctatcccaaagttaaagcatggatcgagaagactctcgaagaaggccgcacacgtggttacgtagagaccttatttggacgtcgccgctatgttcccgatttaaacgctcgcgtgaaaggcaagcgtgaagccgccgaacgcatggcgttcaacatgcctgtacagggcacggcagctgacctcatgaaacttgcaatggtgcgcctttttccacaattgcgtgaagttggtgcccgcatgctcttgcaggtccacgatgaactcttgttagaagcgccaaaagagcgtgcggaagaggtggcagccctcgcgaaagaagttatggaaggcgtgtggcccttagcggtgcctcttgaagtcgaagttggtattggcgaggattggctggctgccaaagga

SEQ ID NO: 3280 - protein, 841 aa, synthetic construct
  REGION 1..841: note = Variant of DNA polymerase I from Thermus sp. strain 2.9
MHHHHHHGGSGVLPVFEPKGRVLLVDGHHLAYRNFFALKGLTTSSGEPVQGVYGFAKSLLKALKEDGDVVIVVFDAKAPSFRHEAYEAYKAGRAPTPEDFPRQLALMKELVDLLGLERLEVPGFEADDVLATLAKKAEREGYEVQILTADRDLFQLLSPRISVLHPEGHRITPEWLWEKYGLRPEQWVDFRALAGDPSDNIPGVKGIGEKTALKLLKEWGSLENLLKNLDQVKPESVREKILAHLEDLKLSRELSRVRTDLPLEVDFQRRREPDWEGLKAFLERLEFGSLLHEFGLLESPLPAEEAPWPPPEGAFLGYRLSRPEPMWAELLALAASAQGRVYRAEDPHGALRGLFEVRGLLAKDLAVVALREGLDLPPTDDPMLLAYLLDPSNTTPEGVARRYGGEWTEDAAKRALLAERLHANLLGRLQGEERLEWLYEEVEKPLSRVLAHMEATGVKLDVAYLENLSLEVAAHMRRLEEEVFRLAGRSFRLNSRDQLERVLFDELGLPPIGKTEKTGKRSTSAAVLEALREVHPIVDKILQYRELAKLKGTYIDRLPALVHPKTGRLHTRFNQTATATGRLSSSDPNLQNIPVRTPLGQKIRRAFVAEEGWRLVALDYSQIELRVLAHLSGDENLIRVFQEGKDIHTQTASWMFGLSAEAIDPLMRRAAKTINFGVLYGMSAFRLSQELGIPYEEAQAFIQKYFQSYPKVKAWIEKTLEEGRTRGYVETLFGRRRYVPDLNARVKGKREAAERMAFNMPVQGTAADLMKLAMVRLFPQLREVGARMLLQVHDELLLEAPKERAEEVAALAKEVMEGVWPLAVPLEVEVGIGEDWLAAKG

SEQ ID NO: 3281 - DNA, 2523 bp, synthetic construct
  misc_feature 1..2523: note = Variant of DNA polymerase I from Thermus sp. strain 2.9
  source 1..2523: mol_type = other DNA
atgcaccatcatcatcatcatggcggtagcggcgtgttaccggtgttcgagcctaaaggtcgcgtgcttctggttgatggccatcatctcgcgtatcgtaacttctttgccctgaaaggattaaccaccagcagcggcgagccggtacagggtgtctacggctttgcaaagtcgctcctgaaagctctgaaagaagacggtgatgtggtgattgttgtctttgatgcgaaagcgccaagttttcgccacgaagcgtacgaagcttacaaagccgggcgtgctccaacgccggaagactttcctcgccaattggcgcttatgaaggaattagtggatttgcttggcctcgaacgcttggaagttcccggtttcgaggcagacgacgtattagcgactctcgcaaagaaagccgaacgtgagggctatgaagtccagatcttgacagcagatcgcgatcttttccagcttttatctccgcgcatctcggtgttacacccggaagggcatcgtatcaccccggaatggctctgggagaaatatggtttgcgtcccgaacaatgggtggattttcgcgccttagcaggcgatccgagcgacaatattccgggagttaaaggtatcggcgagaagacggcgctcaagctccttaaagaatgggggtcgttggagaacttgcttaagaatttagatcaggtcaaaccagagtcagtgcgtgagaagattcttgctcacctcgaagacctcaaattaagccgcgaattgtcccgtgtacgcaccgatttgccgctcgaagttgatttccaacgccgccgcgaacctgactgggagggtcttaaagcgtttttagagcgtcttgaatttggttcgctcttgcatgaattcggccttttagaaagcccgttaccagccgaagaagcaccttggccaccgcccgagggcgcgtttttaggttaccgtttgagtcgcccggaaccgatgtgggccgaattactggctcttgcagcgtctgcccagggacgtgtgtatcgcgcggaagaccctcatggtgcgctccgcggcctcttcgaagtccgtggactccttgccaaagacttagctgttgttgcattgcgcgaaggtcttgatttacctccgactgatgatccaatgcttcttgcgtacctcttggacccgtcaaacacgacgcccgaaggcgtagcccgtcgttacggcggcgagtggaccgaagatgcagcgaaacgcgcgttattggccgaacgtttgcacgccaatttattaggacgtttgcaaggcgaggaacgtctcaagtggctttacgaagaagtggagaaaccattgagtcgcgtgctcgcgcatatggaagctaccggtgtcaaattagacgtggcgtatttggagaatctcagccttgaagttgctgcccacatgcgccgcttggaggaagaagtattccgtttagcaggccgttcctttcgccttaattctcgcgatcagttagaacgtgtgttgttcgatgaacttggtctccctcctatcggcaagacagagaagaccggtaaacgtagcacttcagcggcggttttagaagctcttcgcgaagtccatcccattgtggacaagatcttgcaataccgcgaactcgcgaaattgaaaggcacctatattgaccgtcttccggcattagtccacccgaaaacgggacgcctccatacccgcttcaaccaaacagccacggcgaccggtcgtttgtcctcctctgatccaaaccttcagaatattccagtacgtaccccattgggccagaagatccgccgtgcgtttgtagctgaggagggttggcgtttagtggccctcgattatagccaaattgaattacgtgtccttgcccatctttctggcgatgagaacctcatccgcgtgtttcaggaaggcaaagacattcacactcaaacggcaagctggatgtttggattatcagctgaagcgatcgatcctttgatgcgtcgtgcagcgaagaccatcaatttcggtgttctctacggtatgagtgcctttcgtttgtcgcaggaattaggcattccctatgaagaagctcaggcgttcattcagaaatactttcaaagctatcccaaagttaaagcatggatcgagaagactctcgaagaaggccgcacacgtggttacgtagagaccttatttggacgtcgccgctatgttcccgatttaaacgctcgcgtgaaaggcaagcgtgaagccgccgaacgcatggcgttcaacatgcctgtacagggcacggcagctgacctcatgaaacttgcaatggtgcgcctttttccacaattgcgtgaagttggtgcccgcatgctcttgcaggtccacgatgaactcttgttagaagcgccaaaagagcgtgcggaagaggtggcagccctcgcgaaagaagttatggaaggcgtgtggcccttagcggtgcctcttgaagtcgaagttggtattggcgaggattggctggctgccaaagga

SEQ ID NO: 3282 - protein, 841 aa, synthetic construct
  REGION 1..841: note = Variant of DNA polymerase I from Thermus sp. strain 2.9
MHHHHHHGGSGVLPVFEPKGRVLLVDGHHLAYRNFFALKGLTTSSGEPVQGVYGFAKSLLKALKEDGDVVIVVFDAKAPSFRHEAYEAYKAGRAPTPEDFPRQLALMKELVDLLGLERLEVPGFEADDVLATLAKKAEREGYEVQILTADRDLFQLLSPRISVLHPEGHRITPEWLWEKYGLRPEQWVDFRALAGDPSDNIPGVKGIGEKTALKLLKEWGSLENLLKNLDQVKPESVREKILAHLEDLKLSRELSRVRTDLPLEVDFQRRREPDWEGLKAFLERLEFGSLLHEFGLLESPLPAEEAPWPPPEGAFLGYRLSRPEPMWAELLALAASAQGRVYRAEDPHGALRGLFEVRGLLAKDLAVVALREGLDLPPTDDPMLLAYLLDPSNTTPEGVARRYGGEWTEDAAKRALLAERLHANLLGRLQGEERLKWLYEEVEKPLSRVLAHMEATGVKLDVAYLENLSLEVAAHMRRLEEEVFRLAGRSFRLNSRDQLERVLFDELGLPPIGKTEKTGKRSTSAAVLEALREVHPIVDKILQYRELAKLKGTYIDRLPALVHPKTGRLHTRFNQTATATGRLSSSDPNLQNIPVRTPLGQKIRRAFVAEEGWRLVALDYSQIELRVLAHLSGDENLIRVFQEGKDIHTQTASWMFGLSAEAIDPLMRRAAKTINFGVLYGMSAFRLSQELGIPYEEAQAFIQKYFQSYPKVKAWIEKTLEEGRTRGYVETLFGRRRYVPDLNARVKGKREAAERMAFNMPVQGTAADLMKLAMVRLFPQLREVGARMLLQVHDELLLEAPKERAEEVAALAKEVMEGVWPLAVPLEVEVGIGEDWLAAKG

SEQ ID NO: 3283 - DNA, 2523 bp, synthetic construct
  misc_feature 1..2523: note = Variant of DNA polymerase I from Thermus sp. strain 2.9
  source 1..2523: mol_type = other DNA
atgcaccatcatcatcatcatggcggtagcggcgtgttaccggtgttcgagcctaaaggtcgcgtgcttctggttgatggccatcatctcgcgtatcgtaacttctttgccctgaaaggattaaccaccagcagcggcgagccggtacagggtgtctacggctttgcaaagtcgctcctgaaagctctgaaagaagacggtgatgtggtgattgttgtctttgatgcgaaagcgccaagttttcgccacgaagcgtacgaagcttacaaagccgggcgtgctccaacgccggaagactttcctcgccaattggcgcttatgaaggaattagtggatttgcttggcctcgaacgcttggaagttcccggtttcgaggcagacgacgtattagcgactctcgcaaagaaagccgaacgtgagggctatgaagtccagatcttgacagcagatcgcgatcttttccagcttttatctccgcgcatctcggtgttacacccggaagggcatcgtatcaccccggaatggctctgggagaaatatggtttgcgtcccgaacaatgggtggattttcgcgccttagcaggcgatccgagcgacaatattccgggagttaaaggtatcggcgagaagacggcgctcaagctccttaaagaatgggggtcgttggagaacttgcttaagaatttagatcaggtcaaaccagagtcagtgcgtgagaagattcttgctcacctcgaagacctcaaattaagccgcgaattgtcccgtgtacgcaccgatttgccgctcgaagttgatttccaacgccgccgcgaacctgactgggagggtcttaaagcgtttttagagcgtcttgaatttggttcgctcttgcatgaattcggccttttagaaagcccgttaccagccgaagaagcaccttggccaccgcccgagggcgcgtttttaggttaccgtttgagtcgcccggaaccgatgtgggccgaattactggctcttgcagcgtctgcccagggacgtgtgtatcgcgcggaagaccctcatccggcgctccgcggcctcttcgaagtccgtggactccttgccaaagacttagctgttgttgcattgcgcgaaggtcttgatttacctccgactgatgatccaatgcttcttgcgtacctcttggacccgtcaaacacgacgcccgaaggcgtagcccgtcgttacggcggcgagtggaccgaagatgcagcgaaacgcgcgttattggccgaacgtttgcacgccaatttattaggacgtttgcaaggcgaggaacgtctcctctggctttacgaagaagtggagaaaccattgagtcgcgtgctcgcgcatatggaagctaccggtgtcaaattagacgtggcgtatttggagaatctcagccttgaagttgctgcccacatgcgccgcttggaggaagaagtattccgtttagcaggccgttcctttcgccttaattctcgcgatcagttagaacgtgtgttgttcgatgaacttggtctccctcctatcggcaagacagagaagaccggtaaacgtagcacttcagcggcggttttagaagctcttcgcgaagtccatcccattgtggacaagatcttgcaataccgcgaactcgcgaaattgaaaggcacctatattgaccgtcttccggcattagtccacccgaaaacgggacgcctccatacccgcttcaaccaaacagccacggcgaccggtcgtttgtcctcctctgatccaaaccttcagaatattccagtacgtaccccattgggccagaagatccgccgtgcgtttgtagctgaggagggttggcgtttagtggccctcgattatagccaaattgaattacgtgtccttgcccatctttctggcgatgagaacctcatccgcgtgtttcaggaaggcaaagacattcacactcaaacggcaagctggatgtttggattatcagctgaagcgatcgatcctttgatgcgtcgtgcagcgaagaccatcaatttcggtgttctctacggtatgagtgcctttcgtttgtcgcaggaattaggcattccctatgaagaagctcaggcgttcattcagaaatactttcaaagctatcccaaagttaaagcatggatcgagaagactctcgaagaaggccgcacacgtggttacgtagagaccttatttggacgtcgccgctatgttcccgatttaaacgctcgcgtgaaaggcaagcgtgaagccgccgaacgcatggcgttcaacatgcctgtacagggcacggcagctgacctcatgaaacttgcaatggtgcgcctttttccacaattgcgtgaagttggtgcccgcatgctcttgcaggtccacgatgaactcttgttagaagcgccaaaagagcgtgcggaagaggtggcagccctcgcgaaagaagttatggaaggcgtgtggcccttagcggtgcctcttgaagtcgaagttggtattggcgaggattggctggctgccaaagga

SEQ ID NO: 3284 - protein, 841 aa, synthetic construct
  REGION 1..841: note = Variant of DNA polymerase I from Thermus sp. strain 2.9
MHHHHHHGGSGVLPVFEPKGRVLLVDGHHLAYRNFFALKGLTTSSGEPVQGVYGFAKSLLKALKEDGDVVIVVFDAKAPSFRHEAYEAYKAGRAPTPEDFPRQLALMKELVDLLGLERLEVPGFEADDVLATLAKKAEREGYEVQILTADRDLFQLLSPRISVLHPEGHRITPEWLWEKYGLRPEQWVDFRALAGDPSDNIPGVKGIGEKTALKLLKEWGSLENLLKNLDQVKPESVREKILAHLEDLKLSRELSRVRTDLPLEVDFQRRREPDWEGLKAFLERLEFGSLLHEFGLLESPLPAEEAPWPPPEGAFLGYRLSRPEPMWAELLALAASAQGRVYRAEDPHPALRGLFEVRGLLAKDLAVVALREGLDLPPTDDPMLLAYLLDPSNTTPEGVARRYGGEWTEDAAKRALLAERLHANLLGRLQGEERLLWLYEEVEKPLSRVLAHMEATGVKLDVAYLENLSLEVAAHMRRLEEEVFRLAGRSFRLNSRDQLERVLFDELGLPPIGKTEKTGKRSTSAAVLEALREVHPIVDKILQYRELAKLKGTYIDRLPALVHPKTGRLHTRFNQTATATGRLSSSDPNLQNIPVRTPLGQKIRRAFVAEEGWRLVALDYSQIELRVLAHLSGDENLIRVFQEGKDIHTQTASWMFGLSAEAIDPLMRRAAKTINFGVLYGMSAFRLSQELGIPYEEAQAFIQKYFQSYPKVKAWIEKTLEEGRTRGYVETLFGRRRYVPDLNARVKGKREAAERMAFNMPVQGTAADLMKLAMVRLFPQLREVGARMLLQVHDELLLEAPKERAEEVAALAKEVMEGVWPLAVPLEVEVGIGEDWLAAKG

SEQ ID NO: 3285 - DNA, 2523 bp, synthetic construct
  misc_feature 1..2523: note = Variant of DNA polymerase I from Thermus sp. strain 2.9
  source 1..2523: mol_type = other DNA
atgcaccatcatcatcatcatggcggtagcggcgtgttaccggtgttcgagcctaaaggtcgcgtgcttctggttgatggccatcatctcgcgtatcgtaacttctttgccctgaaaggattaaccaccagcagcggcgagccggtacagggtgtctacggctttgcaaagtcgctcctgaaagctctgaaagaagacggtgatgtggtgattgttgtctttgatgcgaaagcgccaagttttcgccacgaagcgtacgaagcttacaaagccgggcgtgctccaacgccggaagactttcctcgccaattggcgcttatgaaggaattagtggatttgcttggcctcgaacgcttggaagttcccggtttcgaggcagacgacgtattagcgactctcgcaaagaaagccgaacgtgagggctatgaagtccagatcttgacagcagatcgcgatcttttccagcttttatctccgcgcatctcggtgttacacccggaagggcatcgtatcaccccggaatggctctgggagaaatatggtttgcgtcccgaacaatgggtggattttcgcgccttagcaggcgatccgagcgacaatattccgggagttaaaggtatcggcgagaagacggcgctcaagctccttaaagaatgggggtcgttggagaacttgcttaagaatttagatcaggtcaaaccagagtcagtgcgtgagaagattcttgctcacctcgaagacctcaaattaagccgcgaattgtcccgtgtacgcaccgatttgccgctcgaagttgatttccaacgccgccgcgaacctgactgggagggtcttaaagcgtttttagagcgtcttgaatttggttcgctcttgcatgaattcggccttttagaaagcccgttaccagccgaagaagcaccttggccaccgcccgagggcgcgtttttaggttaccgtttgagtcgcccggaaccgatgtgggccgaattactggctcttgcagcgtctgcccagggacgtgtgtatcgcgcggaagaccctcatggtgcgctccgcggcctcttcgaagtccgtggactccttgccaaagacttagctgttgttgcattgcgcgaaggtcttgatttacctccgactgatgatccaatgcttcttgcgtacctcttggacccgtcaaacacgacgcccgaaggcgtagcccgtcgttacggcggcgagtggaccgaagatgcagcgaaacgcgcgttattggccgaacgtttgcacgccaatttattaggacgtttgcaaggcgaggaacgtctcctctggctttacgaagaagtggagaaaccattgagtcgcgtgctcgcgcatatggaagctaccggtgtcaaattagacgtggcgtatttggagaatctcagccttgaagttgctgcccacatgcgccgcttggaggaagaagtattccgtttagcaggccgttcctttcgccttaattctcgcgatcagttagaacgtgtgttgttcgatgaacttggtctccctcctatcggcaagacagagaagaccggtaaacgtagcacttcagcggcggttttagaagctcttcgcgaagtccatcccattgtggacaagatcttgcaataccgcgaactcgcgaaattgaaaggcacctatattgaccgtcttccggcattagtccacccgaaaacgggacgcctccatacccgcttcaaccaaacagccacggcgaccggtcgtttgtcctcctctgatccaaaccttcagaatattccagtacgtaccccattgggccagaagatccgccgtgcgtttgtagctgaggagggttggcgtttagtggccctcgattatagccaaattgaattacgtgtccttgcccatctttctggcgatgagaacctcatccgcgtgtttcaggaaggcaaagacattcacactcaaacggcaagctggatgtttggattatcagctgaagcgatcgatcctttgatgcgtcgtgcagcgaagaccatcaatttcggtgttctctacggtatgagtgcctttcgtttgggtcaggaattaggcattccctatgaagaagctcaggcgttcattcagaaatactttcaaagctatcccaaagttaaagcatggatcgagaagactctcgaagaaggccgcacacgtggttacgtagagaccttatttggacgtcgccgctatgttcccgatttaaacgctcgcgtgaaaggcaagcgtgaagccgccgaacgcatggcgttcaacatgcctgtacagggcacggcagctgacctcatgaaacttgcaatggtgcgcctttttccacaattgcgtgaagttggtgcccgcatgctcttgcaggtccacgatgaactcttgttagaagcgccaaaagagcgtgcggaagaggtggcagccctcgcgaaagaagttatggaaggcgtgtggcccttagcggtgcctcttgaagtcgaagttggtattggcgaggattggctggctgccaaagga

SEQ ID NO: 3286 - protein, 841 aa, synthetic construct
  REGION 1..841: note = Variant of DNA polymerase I from Thermus sp. strain 2.9
MHHHHHHGGSGVLPVFEPKGRVLLVDGHHLAYRNFFALKGLTTSSGEPVQGVYGFAKSLLKALKEDGDVVIVVFDAKAPSFRHEAYEAYKAGRAPTPEDFPRQLALMKELVDLLGLERLEVPGFEADDVLATLAKKAEREGYEVQILTADRDLFQLLSPRISVLHPEGHRITPEWLWEKYGLRPEQWVDFRALAGDPSDNIPGVKGIGEKTALKLLKEWGSLENLLKNLDQVKPESVREKILAHLEDLKLSRELSRVRTDLPLEVDFQRRREPDWEGLKAFLERLEFGSLLHEFGLLESPLPAEEAPWPPPEGAFLGYRLSRPEPMWAELLALAASAQGRVYRAEDPHGALRGLFEVRGLLAKDLAVVALREGLDLPPTDDPMLLAYLLDPSNTTPEGVARRYGGEWTEDAAKRALLAERLHANLLGRLQGEERLLWLYEEVEKPLSRVLAHMEATGVKLDVAYLENLSLEVAAHMRRLEEEVFRLAGRSFRLNSRDQLERVLFDELGLPPIGKTEKTGKRSTSAAVLEALREVHPIVDKILQYRELAKLKGTYIDRLPALVHPKTGRLHTRFNQTATATGRLSSSDPNLQNIPVRTPLGQKIRRAFVAEEGWRLVALDYSQIELRVLAHLSGDENLIRVFQEGKDIHTQTASWMFGLSAEAIDPLMRRAAKTINFGVLYGMSAFRLGQELGIPYEEAQAFIQKYFQSYPKVKAWIEKTLEEGRTRGYVETLFGRRRYVPDLNARVKGKREAAERMAFNMPVQGTAADLMKLAMVRLFPQLREVGARMLLQVHDELLLEAPKERAEEVAALAKEVMEGVWPLAVPLEVEVGIGEDWLAAKG

SEQ ID NO: 3287 - DNA, 2523 bp, synthetic construct
  misc_feature 1..2523: note = Variant of DNA polymerase I from Thermus sp. strain 2.9
  source 1..2523: mol_type = other DNA
atgcaccatcatcatcatcatggcggtagcggcgtgttaccggtgttcgagcctaaaggtcgcgtgcttctggttgatggccatcatctcgcgtatcgtaacttctttgccctgaaaggattaaccaccagcagcggcgagccggtacagggtgtctacggctttgcaaagtcgctcctgaaagctctgaaagaagacggtgatgtggtgattgttgtctttgatgcgaaagcgccaagttttcgccacgaagcgtacgaagcttacaaagccgggcgtgctccaacgccggaaacgtttcctcgccaattggcgcttatgaaggaattagtggatttgcttggcctcgaacgcttggaagttcccggtttcgaggcagacgacgtattagcgactctcgcaaagaaagccgaacgtgagggctatgaagtccagatcttgacagcagatcgcgatcttttccagcttttatctccgcgcatctcggtgttacacccggaagggcatcgtatcaccccggaatggctctgggagaaatatggtttgcgtcccgaacaatgggtggattttcgcgccttagcaggcgatccgagcgacaatattccgggagttaaaggtatcggcgagaagacggcgctcaagctccttaaagaatgggggtcgttggagaacttgcttaagaatttagatcaggtcaaaccagagtcagtgcgtgagaagattcttgctcacctcgaagacctcaaattaagccgcgaattgtcccgtgtacgcaccgatttgccgctcgaagttgatttccaacgccgccgcgaacctgactgggagggtcttaaagcgtttttagagcgtcttgaatttggttcgctcttgcatgaattcggccttttagaaagcccgttaccagccgaagaagcaccttggccaccgcccgagggcgcgtttttaggttaccgtttgagtcgcccggaaccgatgtgggccgaattactggctcttgcagcgtctgcccagggacgtgtgtatcgcgcggaagaccctcatggtgcgctccgcggcctcttcgaagtccgtggactccttgccaaagacttagctgttgttgcattgcgcgaaggtcttgatttacctccgactgatgatccaatgcttcttgcgtacctcttggacccgtcaaacacgacgcccgaaggcgtagcccgtcgttacggcggcgagtggaccgaagatgcagcgaaacgcgcgttattggccgaacgtttgcacgccaatttattaggacgtttgcaaggcgaggaacgtctcctctggctttacgaagaagtggagaaaccattgagtcgcgtgctcgcgcatatggaagctaccggtgtcaaattagacgtggcgtatttggagaatctcagccttgaagttgctgcccacatgcgccgcttggaggaagaagtattccgtttagcaggccgttcctttcgccttaattctcgcgatcagttagaacgtgtgttgttcgatgaacttggtctccctcctatcggcaagacagagaagaccggtaaacgtagcacttcagcggcggttttagaagctcttcgcgaagtccatcccattgtggacaagatcttgcaataccgcgaactcgcgaaattgaaaggcacctatattgaccgtcttccggcattagtccacccgaaaacgggacgcctccatacccgcttcaaccaaacagccacggcgaccggtcgtttgtcctcctctgatccaaaccttcagaatattccagtacgtaccccattgggccagaagatccgccgtgcgtttgtagctgaggagggttggcgtttagtggccctcgattatagccaaattgaattacgtgtccttgcccatctttctggcgatgagaacctcatccgcgtgtttcaggaaggcaaagacattcacactcaaacggcaagctggatgtttggattatcagctgaagcgatcgatcctttgatgcgtcgtgcagcgaagaccatcaatttcggtgttctctacggtatgagtgcctttcgtttgtcgcaggaattaggcattccctatgaagaagctcaggcgttcattcagaaatactttcaaagctatcccaaagttaaagcatggatcgagaagactctcgaagaaggccgcacacgtggttacgtagagaccttatttggacgtcgccgctatgttcccgatttaaacgctcgcgtgaaaggcaagcgtgaagccgccgaacgcatggcgttcaacatgcctgtacagggcacggcagctgacctcatgaaacttgcaatggtgcgcctttttccacaattgcgtgaagttggtgcccgcatgctcttgcaggtccacgatgaactcttgttagaagcgccaaaagagcgtgcggaagaggtggcagccctcgcgaaagaagttatggaaggcgtgtggcccttagcggtgcctcttgaagtcgaagttggtattggcgaggattggctggctgccaaagga

SEQ ID NO: 3288 - protein, 841 aa, synthetic construct
  REGION 1..841: note = Variant of DNA polymerase I from Thermus sp. strain 2.9
MHHHHHHGGSGVLPVFEPKGRVLLVDGHHLAYRNFFALKGLTTSSGEPVQGVYGFAKSLLKALKEDGDVVIVVFDAKAPSFRHEAYEAYKAGRAPTPETFPRQLALMKELVDLLGLERLEVPGFEADDVLATLAKKAEREGYEVQILTADRDLFQLLSPRISVLHPEGHRITPEWLWEKYGLRPEQWVDFRALAGDPSDNIPGVKGIGEKTALKLLKEWGSLENLLKNLDQVKPESVREKILAHLEDLKLSRELSRVRTDLPLEVDFQRRREPDWEGLKAFLERLEFGSLLHEFGLLESPLPAEEAPWPPPEGAFLGYRLSRPEPMWAELLALAASAQGRVYRAEDPHGALRGLFEVRGLLAKDLAVVALREGLDLPPTDDPMLLAYLLDPSNTTPEGVARRYGGEWTEDAAKRALLAERLHANLLGRLQGEERLLWLYEEVEKPLSRVLAHMEATGVKLDVAYLENLSLEVAAHMRRLEEEVFRLAGRSFRLNSRDQLERVLFDELGLPPIGKTEKTGKRSTSAAVLEALREVHPIVDKILQYRELAKLKGTYIDRLPALVHPKTGRLHTRFNQTATATGRLSSSDPNLQNIPVRTPLGQKIRRAFVAEEGWRLVALDYSQIELRVLAHLSGDENLIRVFQEGKDIHTQTASWMFGLSAEAIDPLMRRAAKTINFGVLYGMSAFRLSQELGIPYEEAQAFIQKYFQSYPKVKAWIEKTLEEGRTRGYVETLFGRRRYVPDLNARVKGKREAAERMAFNMPVQGTAADLMKLAMVRLFPQLREVGARMLLQVHDELLLEAPKERAEEVAALAKEVMEGVWPLAVPLEVEVGIGEDWLAAKG

SEQ ID NO: 3289 - DNA, 2523 bp, synthetic construct
  misc_feature 1..2523: note = Variant of DNA polymerase I from Thermus sp. strain 2.9
  source 1..2523: mol_type = other DNA
atgcaccatcatcatcatcatggcggtagcggcgtgttaccggtgttcgagcctaaaggtcgcgtgcttctggttgatggccatcatctcgcgtatcgtaacttctttgccctgaaaggattaaccaccagcagcggcgagccggtacagggtgtctacggctttgcaaagtcgctcctgaaagctctgaaagaagacggtgatgtggtgattgttgtctttgatgcgaaagcgccaagttttcgccacgaagcgtacgaagcttacaaagccgggcgtgctccaacgccggaagactttcctcgccaattggcgcttatgaaggaattagtggatttgcttggcctcgaacgcttggaagttcccggtttcgaggcagacgacgtattagcgactctcgcaaagaaagccgaacgtgagggctatgaagtccagatcttgacagcagatcgcgatcttttccagcttttatctccgcgcatctcggtgttacacccggaagggcatcgtatcaccccggaatggctctgggagaaatatggtttgcgtcccgaacaatgggtggattttcgcgccttagcaggcgatccgagcgacaatattccgggagttaaaggtatcggcgagaagacggcgctcaagctccttaaagaatgggggtcgttggagaacttgcttaagaatttagatcaggtcaaaccagagtcagtgcgtgagaagattcttgctcacctcgaagacctcaaattaagccgcgaattgtcccgtgtacgcaccgatttgccgctcgaagttgatttccaacgccgccgcgaacctgactgggagggtcttaaagcgtttttagagcgtcttgaatttggttcgctcttgcatgaattcggccttttagaaagcccgttaccagccgaagaagcaccttggccaccgcccgagggcgcgtttttaggttaccgtttgagtcgcccggaaccgatgtgggccgaattactggctcttgcagcgtctgcccagggacgtgtgtatcgcgcggaagaccctcatggtgcgctccgcggcctcttcgaagtccgtggactccttgccaaagacttagctgttgttgcattgcgcgaaggtcttgatttacctccgactgatgatccaatgcttcttgcgtacctcttggacccgtcaaacacgacgcccgaaggcgtagcccgtcgttacggcggcgagtggaccgaagatgcagcgaaacgcgcgttattggccgaacgtttgcacgccaatttattaggacgtttgcaaggcgaggaacgtctcctctggctttacgaagaagtggagaaaccattgagtcgcgtgctcgcgcatatggaagctaccggtgtcaaattagacgtggcgtatttggagaatctcagccttgaagttgctgcccacatgcgccgcttggaggaagaagtattccgtttagcaggccgttcctttcgccttaattctcgcgatcagttagaacgtgtgttgttcgatgaacttggtctccctcctatcggcaagacagagaagaccggtaaacgtagcacttcagcggcggttttagaagctcttcgcgaagtccatcccattgtggacaagatcttgcaataccgcgaactcgcgaaattgaaaggcacctatattgaccgtcttccggcattagtccacccgaaaacgggacgcctccatacccgcttcaaccaaacagccacggcgaccggtcgtttgtcctcctctgatccaaaccttcagaatattccagtacgtaccccattgggccagaagatccgccgtgcgtttgtagctgaggagggttggcgtttagtggccctcgattatagccaaattgaattacgtgtccttgcccatctttctggcgatgagaacctcatccgcgtgtttcaggaaggcaaagacattcacactcaaacggcaagctggatgtttggattaagggctgaagcgatcgatcctttgatgcgtcgtgcagcgaagaccatcaatttcggtgttctctacggtatgagtgcctttcgtttgtcgcaggaattaggcattccctatgaagaagctcaggcgttcattcagaaatactttcaaagctatcccaaagttaaagcatggatcgagaagactctcgaagaaggccgcacacgtggttacgtagagaccttatttggacgtcgccgctatgttcccgatttaaacgctcgcgtgaaaggcaagcgtgaagccgccgaacgcatggcgttcaacatgcctgtacagggcacggcagctgacctcatgaaacttgcaatggtgcgcctttttccacaattgcgtgaagttggtgcccgcatgctcttgcaggtccacgatgaactcttgttagaagcgccaaaagagcgtgcggaagaggtggcagccctcgcgaaagaagttatggaaggcgtgtggcccttagcggtgcctcttgaagtcgaagttggtattggcgaggattggctggctgccaaagga

SEQ ID NO: 3290 - protein, 841 aa, synthetic construct
  REGION 1..841: note = Variant of DNA polymerase I from Thermus sp. strain 2.9
MHHHHHHGGSGVLPVFEPKGRVLLVDGHHLAYRNFFALKGLTTSSGEPVQGVYGFAKSLLKALKEDGDVVIVVFDAKAPSFRHEAYEAYKAGRAPTPEDFPRQLALMKELVDLLGLERLEVPGFEADDVLATLAKKAEREGYEVQILTADRDLFQLLSPRISVLHPEGHRITPEWLWEKYGLRPEQWVDFRALAGDPSDNIPGVKGIGEKTALKLLKEWGSLENLLKNLDQVKPESVREKILAHLEDLKLSRELSRVRTDLPLEVDFQRRREPDWEGLKAFLERLEFGSLLHEFGLLESPLPAEEAPWPPPEGAFLGYRLSRPEPMWAELLALAASAQGRVYRAEDPHGALRGLFEVRGLLAKDLAVVALREGLDLPPTDDPMLLAYLLDPSNTTPEGVARRYGGEWTEDAAKRALLAERLHANLLGRLQGEERLLWLYEEVEKPLSRVLAHMEATGVKLDVAYLENLSLEVAAHMRRLEEEVFRLAGRSFRLNSRDQLERVLFDELGLPPIGKTEKTGKRSTSAAVLEALREVHPIVDKILQYRELAKLKGTYIDRLPALVHPKTGRLHTRFNQTATATGRLSSSDPNLQNIPVRTPLGQKIRRAFVAEEGWRLVALDYSQIELRVLAHLSGDENLIRVFQEGKDIHTQTASWMFGLRAEAIDPLMRRAAKTINFGVLYGMSAFRLSQELGIPYEEAQAFIQKYFQSYPKVKAWIEKTLEEGRTRGYVETLFGRRRYVPDLNARVKGKREAAERMAFNMPVQGTAADLMKLAMVRLFPQLREVGARMLLQVHDELLLEAPKERAEEVAALAKEVMEGVWPLAVPLEVEVGIGEDWLAAKG

SEQ ID NO: 3291 - DNA, 2523 bp, synthetic construct; identical to SEQ ID NO: 3289
  misc_feature 1..2523: note = Variant of DNA polymerase I from Thermus sp. strain 2.9
  source 1..2523: mol_type = other DNA

SEQ ID NO: 3292 - protein, 841 aa, synthetic construct; identical to SEQ ID NO: 3290
  REGION 1..841: note = Variant of DNA polymerase I from Thermus sp. strain 2.9

SEQ ID NO: 3293 - DNA, 2523 bp, synthetic construct
  misc_feature 1..2523: note = Variant of DNA polymerase I from Thermus sp. strain 2.9
  source 1..2523: mol_type = other DNA
atgcaccatcatcatcatcatggcggtagcggcgtgttaccggtgttcgagcctaaaggtcgcgtgcttctggttgatggccatcatctcgcgtatcgtaacttctttgccctgaaaggattaaccaccagcagcggcgagccggtacagggtgtctacggctttgcaaagtcgctcctgaaagctctgaaagaagacggtgatgtggtgattgttgtctttgatgcgaaagcgccaagttttcgccacgaagcgtacgaagcttacaaagccgggcgtgctccaacgccggaagactttcctcgccaattggcgcttatgaaggaattagtggatttgcttggcctcgaacgcttggaagttcccggtttcgaggcagacgacgtattagcgactctcgcaaagaaagccgaacgtgagggctatgaagtccagatcttgacagcagatcgcgatcttttccagcttttatctccgcgcatctcggtgttacacccggaagggcatcgtatcaccccggaatggctctgggagaaatatggtttgcgtcccgaacaatgggtggattttcgcgccttagcaggcgatccgagcgacaatattccgggagttaaaggtatcggcgagaagacggcgctcaagctccttaaagaatgggggtcgttggagaacttgcttaagaatttagatcaggtcaaaccagagtcagtgcgtgagaagattcttgctcacctcgaagacctcaaattaagccgcgaattgtcccgtgtacgcaccgatttgccgctcgaagttgatttccaacgccgccgcgaacctgactgggagggtcttaaagcgtttttagagcgtcttgaatttggttcgctcttgcatgaattcggccttttagaaagcccgttaccagccgaagaagcaccttggccaccgcccgagggcgcgtttttaggttaccgtttgagtcgcccggaaccgatgtgggccgaattactggctcttgcagcgtctgcccagggacgtgtgtatcgcgcggaagaccctcatggtgcgctccgcggcctcttcgaagtccgtggactccttgccaaagacttagctgttgttgcattgcgcgaaggtcttgatttacctccgactgatgatccaatgcttcttgcgtacctcttggacccgtcaaacacgacgcccgaaggcgtagcccgtcgttacggcggcgagtggaccgaagatgcagcgaaacgcgcgttattggccgaacgtttgcacgccaatttatggggacgtttgcaaggcgaggaacgtctcctctggctttacgaagaagtggagaaaccattgagtcgcgtgctcgcgcatatggaagctaccggtgtcaaattagacgtggcgtatttggagaatctcagccttgaagttgctgcccacatgcgccgcttggaggaagaagtattccgtttagcaggccgttcctttcgccttaattctcgcgatcagttagaacgtgtgttgttcgatgaacttggtctccctcctatcggcaagacagagaagaccggtaaacgtagcacttcagcggcggttttagaagctcttcgcgaagtccatcccattgtggacaagatcttgcaataccgcgaactcgcgaaattgaaaggcacctatattgaccgtcttccggcattagtccacccgaaaacgggacgcctccatacccgcttcaaccaaacagccacggcgaccggtcgtttgtcctcctctgatccaaaccttcagaatattccagtacgtaccccattgggccagaagatccgccgtgcgtttgtagctgaggagggttggcgtttagtggccctcgattatagccaaattgaattacgtgtccttgcccatctttctggcgatgagaacctcatccgcgtgtttcaggaaggcaaagacattcacactcaaacggcaagctggatgtttggattatcagctgaagcgatcgatcctttgatgcgtcgtgcagcgaagaccatcaatttcggtgttctctacggtatgagtgcctttcgtttgtcgcaggaattaggcattccctatgaagaagctcaggcgttcattcagaaatactttcaaagctatcccaaagttaaagcatggatcgagaagactctcgaagaaggccgcacacgtggttacgtagagaccttatttggacgtcgccgctatgttcccgatttaaacgctcgcgtgaaaggcaagcgtgaagccgccgaacgcatggcgttcaacatgcctgtacagggcacggcagctgacctcatgaaacttgcaatggtgcgcctttttccacaattgcgtgaagttggtgcccgcatgctcttgcaggtccacgatgaactcttgttagaagcgccaaaagagcgtgcggaagaggtggcagccctcgcgaaagaagttatggaaggcgtgtggcccttagcggtgcctcttgaagtcgaagttggtattggcgaggattggctggctgccaaagga

SEQ ID NO: 3294 - protein, 841 aa, synthetic construct
  REGION 1..841: note = Variant of DNA polymerase I from Thermus sp. strain 2.9
MHHHHHHGGSGVLPVFEPKGRVLLVDGHHLAYRNFFALKGLTTSSGEPVQGVYGFAKSLLKALKEDGDVVIVVFDAKAPSFRHEAYEAYKAGRAPTPEDFPRQLALMKELVDLLGLERLEVPGFEADDVLATLAKKAEREGYEVQILTADRDLFQLLSPRISVLHPEGHRITPEWLWEKYGLRPEQWVDFRALAGDPSDNIPGVKGIGEKTALKLLKEWGSLENLLKNLDQVKPESVREKILAHLEDLKLSRELSRVRTDLPLEVDFQRRREPDWEGLKAFLERLEFGSLLHEFGLLESPLPAEEAPWPPPEGAFLGYRLSRPEPMWAELLALAASAQGRVYRAEDPHGALRGLFEVRGLLAKDLAVVALREGLDLPPTDDPMLLAYLLDPSNTTPEGVARRYGGEWTEDAAKRALLAERLHANLWGRLQGEERLLWLYEEVEKPLSRVLAHMEATGVKLDVAYLENLSLEVAAHMRRLEEEVFRLAGRSFRLNSRDQLERVLFDELGLPPIGKTEKTGKRSTSAAVLEALREVHPIVDKILQYRELAKLKGTYIDRLPALVHPKTGRLHTRFNQTATATGRLSSSDPNLQNIPVRTPLGQKIRRAFVAEEGWRLVALDYSQIELRVLAHLSGDENLIRVFQEGKDIHTQTASWMFGLSAEAIDPLMRRAAKTINFGVLYGMSAFRLSQELGIPYEEAQAFIQKYFQSYPKVKAWIEKTLEEGRTRGYVETLFGRRRYVPDLNARVKGKREAAERMAFNMPVQGTAADLMKLAMVRLFPQLREVGARMLLQVHDELLLEAPKERAEEVAALAKEVMEGVWPLAVPLEVEVGIGEDWLAAKG

SEQ ID NO: 3295 - DNA, 2523 bp, synthetic construct
  misc_feature 1..2523: note = Variant of DNA polymerase I from Thermus sp. strain 2.9
  source 1..2523: mol_type = other DNA
atgcaccatcatcatcatcatggcggtagcggcgtgttaccggtgttcgagcctaaaggtcgcgtgcttctggttgatggccatcatctcgcgtatcgtaacttctttgccctgaaaggattaaccaccagcagcggcgagccggtacagggtgtctacggctttgcaaagtcgctcctgaaagctctgaaagaagacggtgatgtggtgattgttgtctttgatgcgaaagcgccaagttttcgccacgaagcgtacgaagcttacaaagccgggcgtgctccaacgccggaagactttcctcgccaattggcgcttatgaaggaattagtggatttgcttggcctcgaacgcttggaagttcccggtttcgaggcagacgacgtattagcgactctcgcaaagaaagccgaacgtgagggctatgaagtccagatcttgacagcagatcgcgatcttttccagcttttatctccgcgcatctcggtgttacacccggaagggcatcgtatcaccccggaatggctctgggagaaatatggtttgcgtcccgaacaatgggtggattttcgcgccttagcaggcgatccgagcgacaatattccgggagttaaaggtatcggcgagaagacggcgctcaagctccttaaagaatgggggtcgttggagaacttgcttaagaatttagatcaggtcaaaccagagtcagtgcgtgagaagattcttgctcacctcgaagacctcaaattaagccgcgaattgtcccgtgtacgcaccgatttgccgctcgaagttgatttccaacgccgccgcgaacctgactgggagggtcttaaagcgtttttagagcgtcttgaatttggttcgctcttgcatgaattcggccttttagaaagcccgttaccagccgaagaagcaccttggccaccgcccgagggcgcgtttttaggttaccgtttgagtcgcccggaaccgatgtgggccgaattactggctcttgcagcgtctgcccagggacgtgtgtatcgcgcggaagaccctcatggtgcgctccgcggcctcttcgaagtccgtggactccttgccaaagacttagctgttgttgcattgcgcgaaggtcttgatttacctccgactgatgatccaatgcttcttgcgtacctcttggacccgtcaaacacgacgcccgaaggcgtagcccgtcgttacggcggcgagtggaccgaagatgcagcgaaacgcgcgttattggccgaacgtttgcacgccaatttattaggacgtttgcaaggcgaggaacgtctcctctggctttacgaagaagtggagaaaccattgagtcgcgtgctcgcgcatatggaagctaccggtgtcaaattagacgtggcgtatttggagaatctcagccttgaagttgctgcccacatgcgccgcttggaggaagaagtattccgtttagcaggccgttcctttcgccttaattctcgcgatcagttagaacgtgtgttgttcgatgaacttggtctccctcctatcggcaagacagagattaccggtaaacgtagcacttcagcggcggttttagaagctcttcgcgaagtccatcccattgtggacaagatcttgcaataccgcgaactcgcgaaattgaaaggcacctatattgaccgtcttccggcattagtccacccgaaaacgggacgcctccatacccgcttcaaccaaacagccacggcgaccggtcgtttgtcctcctctgatccaaaccttcagaatattccagtacgtaccccattgggccagaagatccgccgtgcgtttgtagctgaggagggttggcgtttagtggccctcgattatagccaaattgaattacgtgtccttgcccatctttctggcgatgagaacctcatccgcgtgtttcaggaaggcaaagacattcacactcaaacggcaagctggatgtttggattatcagctgaagcgatcgatcctttgatgcgtcgtgcagcgaagaccatcaatttcggtgttctctacggtatgagtgcctttcgtttgtcgcaggaattaggcattccctatgaagaagctcaggcgttcattcagaaatactttcaaagctatcccaaagttaaagcatggatcgagaagactctcgaagaaggccgcacacgtggttacgtagagaccttatttggacgtcgccgctatgttcccgatttaaacgctcgcgtgaaaggcaagcgtgaagccgccgaacgcatggcgttcaacatgcctgtacagggcacggcagctgacctcatgaaacttgcaatggtgcgcctttttccacaattgcgtgaagttggtgcccgcatgctcttgcaggtccacgatgaactcttgttagaagcgccaaaagagcgtgcggaagaggtggcagccctcgcgaaagaagttatggaaggcgtgtggcccttagcggtgcctcttgaagtcgaagttggtattggcgaggattggctggctgccaaagga

SEQ ID NO: 3296 - protein, 841 aa, synthetic construct
  REGION 1..841: note = Variant of DNA polymerase I from Thermus sp. strain 2.9
MHHHHHHGGSGVLPVFEPKGRVLLVDGHHLAYRNFFALKGLTTSSGEPVQGVYGFAKSLLKALKEDGDVVIVVFDAKAPSFRHEAYEAYKAGRAPTPEDFPRQLALMKELVDLLGLERLEVPGFEADDVLATLAKKAEREGYEVQILTADRDLFQLLSPRISVLHPEGHRITPEWLWEKYGLRPEQWVDFRALAGDPSDNIPGVKGIGEKTALKLLKEWGSLENLLKNLDQVKPESVREKILAHLEDLKLSRELSRVRTDLPLEVDFQRRREPDWEGLKAFLERLEFGSLLHEFGLLESPLPAEEAPWPPPEGAFLGYRLSRPEPMWAELLALAASAQGRVYRAEDPHGALRGLFEVRGLLAKDLAVVALREGLDLPPTDDPMLLAYLLDPSNTTPEGVARRYGGEWTEDAAKRALLAERLHANLLGRLQGEERLLWLYEEVEKPLSRVLAHMEATGVKLDVAYLENLSLEVAAHMRRLEEEVFRLAGRSFRLNSRDQLERVLFDELGLPPIGKTEITGKRSTSAAVLEALREVHPIVDKILQYRELAKLKGTYIDRLPALVHPKTGRLHTRFNQTATATGRLSSSDPNLQNIPVRTPLGQKIRRAFVAEEGWRLVALDYSQIELRVLAHLSGDENLIRVFQEGKDIHTQTASWMFGLSAEAIDPLMRRAAKTINFGVLYGMSAFRLSQELGIPYEEAQAFIQKYFQSYPKVKAWIEKTLEEGRTRGYVETLFGRRRYVPDLNARVKGKREAAERMAFNMPVQGTAADLMKLAMVRLFPQLREVGARMLLQVHDELLLEAPKERAEEVAALAKEVMEGVWPLAVPLEVEVGIGEDWLAAKG

SEQ ID NO: 3297 - DNA, 2523 bp, synthetic construct
  misc_feature 1..2523: note = Variant of DNA polymerase I from Thermus sp. strain 2.9
  source 1..2523: mol_type = other DNA
atgcaccatcatcatcatcatggcggtagcggcgtgttaccggtgttcgagcctaaaggtcgcgtgcttctggttgatggccatcatctcgcgtatcgtaacttctttgccctgaaaggattaaccaccagcagcggcgagccggtacagggtgtctacggctttgcaaagtcgctcctgaaagctctgaaagaagacggtgatgtggtgattgttgtctttgatgcgaaagcgccaagttttcgccacgaagcgtacgaagcttacaaagccgggcgtgctccaacgccggaagactttcctcgccaattggcgcttatgaaggaattagtggatttgcttggcctcgaacgcttggaagttcccggtttcgaggcagacgacgtattagcgactctcgcaaagaaagccgaacgtgagggctatgaagtccagatcttgacagcagatcgcgatcttttccagcttttatctccgcgcatctcggtgttacacccggaagggcatcgtatcaccccggaatggctctgggagaaatatggtttgcgtcccgaacaatgggtggattttcgcgccttagcaggcgatccgagcgacaatattccgggagttaaaggtatcggcgagaagacggcgctcaagctccttaaagaatgggggtcgttggagaacttgcttaagaatttagatcaggtcaaaccagagtcagtgcgtgagaagattcttgctcacctcgaagacctcaaattaagccgcgaattgtcccgtgtacgcaccgatttgccgctcgaagttgatttccaacgccgccgcgaacctgactgggagggtcttaaagcgtttttagagcgtcttgaatttggttcgctcttgcatgaattcggccttttagaaagcccgttaccagccgaagaagcaccttggccaccgcccgagggcgcgtttttaggttaccgtttgagtcgcccggaaccgatgtgggccgaattactggctcttgcagcgtctgcccagggacgtgtgtatcgcgcggaagaccctcatggtgcgctccgcggcctcttcgaagtccgtggactccttgccaaagacttagctgttgttgcattgcgcgaaggtcttgatttacctccgactgatgatccaatgcttcttgcgtacctcttggacccgtcaaacacgacgcccgaaggcgtagcccgtcgttacggcggcgagtggaccgaagatgcagcgaaacgcgcgttattggccgaacgtttgcacgccaatttattatgtcgtttgcaaggcgaggaacgtctcctctggctttacgaagaagtggagaaaccattgagtcgcgtgctcgcgcatatggaagctaccggtgtcaaattagacgtggcgtatttggagaatctcagccttgaagttgctgcccacatgcgccgcttggaggaagaagtattccgtttagcaggccgttcctttcgccttaattctcgcgatcagttagaacgtgtgttgttcgatgaacttggtctccctcctatcggcaagacagagaagaccggtaaacgtagcacttcagcggcggttttagaagctcttcgcgaagtccatcccattgtggacaagatcttgcaataccgcgaactcgcgaaattgaaaggcacctatattgaccgtcttccggcattagtccacccgaaaacgggacgcctccatacccgcttcaaccaaacagccacggcgaccggtcgtttgtcctcctctgatccaaaccttcagaatattccagtacgtaccccattgggccagaagatccgccgtgcgtttgtagctgaggagggttggcgtttagtggccctcgattatagccaaattgaattacgtgtccttgcccatctttctggcgatgagaacctcatccgcgtgtttcaggaaggcaaagacattcacactcaaacggcaagctggatgtttggattatcagctgaagcgatcgatcctttgatgcgtcgtgcagcgaagaccatcaatttcggtgttctctacggtatgagtgcctttcgtttgtcgcaggaattaggcattccctatgaagaagctcaggcgttcattcagaaatactttcaaagctatcccaaagttaaagcatggatcgagaagactctcgaagaaggccgcacacgtggttacgtagagaccttatttggacgtcgccgctatgttcccgatttaaacgctcgcgtgaaaggcaagcgtgaagccgccgaacgcatggcgttcaacatgcctgtacagggcacggcagctgacctcatgaaacttgcaatggtgcgcctttttccacaattgcgtgaagttggtgcccgcatgctcttgcaggtccacgatgaactcttgttagaagcgccaaaagagcgtgcggaagaggtggcagccctcgcgaaagaagttatggaaggcgtgtggcccttagcggtgcctcttgaagtcgaagttggtattggcgaggattggctggctgccaaagga

SEQ ID NO: 3298 - protein, 841 aa, synthetic construct
  REGION 1..841: note = Variant of DNA polymerase I from Thermus sp. strain 2.9
MHHHHHHGGSGVLPVFEPKGRVLLVDGHHLAYRNFFALKGLTTSSGEPVQGVYGFAKSLLKALKEDGDVVIVVFDAKAPSFRHEAYEAYKAGRAPTPEDFPRQLALMKELVDLLGLERLEVPGFEADDVLATLAKKAEREGYEVQILTADRDLFQLLSPRISVLHPEGHRITPEWLWEKYGLRPEQWVDFRALAGDPSDNIPGVKGIGEKTALKLLKEWGSLENLLKNLDQVKPESVREKILAHLEDLKLSRELSRVRTDLPLEVDFQRRREPDWEGLKAFLERLEFGSLLHEFGLLESPLPAEEAPWPPPEGAFLGYRLSRPEPMWAELLALAASAQGRVYRAEDPHGALRGLFEVRGLLAKDLAVVALREGLDLPPTDDPMLLAYLLDPSNTTPEGVARRYGGEWTEDAAKRALLAERLHANLLCRLQGEERLLWLYEEVEKPLSRVLAHMEATGVKLDVAYLENLSLEVAAHMRRLEEEVFRLAGRSFRLNSRDQLERVLFDELGLPPIGKTEKTGKRSTSAAVLEALREVHPIVDKILQYRELAKLKGTYIDRLPALVHPKTGRLHTRFNQTATATGRLSSSDPNLQNIPVRTPLGQKIRRAFVAEEGWRLVALDYSQIELRVLAHLSGDENLIRVFQEGKDIHTQTASWMFGLSAEAIDPLMRRAAKTINFGVLYGMSAFRLSQELGIPYEEAQAFIQKYFQSYPKVKAWIEKTLEEGRTRGYVETLFGRRRYVPDLNARVKGKREAAERMAFNMPVQGTAADLMKLAMVRLFPQLREVGARMLLQVHDELLLEAPKERAEEVAALAKEVMEGVWPLAVPLEVEVGIGEDWLAAKG

SEQ ID NO: 3299 - DNA, 2523 bp, synthetic construct
  misc_feature 1..2523: note = Variant of DNA polymerase I from Thermus sp. strain 2.9
  source 1..2523: mol_type = other DNA
atgcaccatcatcatcatcatggcggtagcggcgtgttaccggtgttcgagcctaaaggtcgcgtgcttctggttgatggccatcatctcgcgtatcgtaacttctttgccctgaaaggattaaccaccagcagcggcgagccggtacagggtgtctacggctttgcaaagtcgctcctgaaagctctgaaagaagacggtgatgtggtgattgttgtctttgatgcgaaagcgccaagttttcgccacgaagcgtacgaagcttacaaagccgggcgtgctccaacgccggaagactttcctcgccaattgacgcttatgaaggaattagtggatttgcttggcctcgaacgcttggaagttcccggtttcgaggcagacgacgtattagcgactctcgcaaagaaagccgaacgtgagggctatgaagtccagatcttgacagcagatcgcgatcttttccagcttttatctccgcgcatctcggtgttacacccggaagggcatcgtatcaccccggaatggctctgggagaaatatggtttgcgtcccgaacaatgggtggattttcgcgccttagcaggcgatccgagcgacaatattccgggagttaaaggtatcggcgagaagacggcgctcaagctccttaaagaatgggggtcgttggagaacttgcttaagaatttagatcaggtcaaaccagagtcagtgcgtgagaagattcttgctcacctcgaagacctcaaattaagccgcgaattgtcccgtgtacgcaccgatttgccgctcgaagttgatttccaacgccgccgcgaacctgactgggagggtcttaaagcgtttttagagcgtcttgaatttggttcgctcttgcatgaattcggccttttagaaagcccgttaccagccgaagaagcaccttggccaccgcccgagggcgcgtttttaggttaccgtttgagtcgcccggaaccgatgtgggccgaattactggctcttgcagcgtctgcccagggacgtgtgtatcgcgcggaagaccctcatggtgcgctccgcggcctcttcgaagtccgtggactccttgccaaagacttagctgttgttgcattgcgcgaaggtcttgatttacctccgactgatgatccaatgcttcttgcgtacctcttggacccgtcaaacacgacgcccgaaggcgtagcccgtcgttacggcggcgagtggaccgaagatgcagcgaaacgcgcgttattggccgaacgtttgcacgccaatttattaggacgtttgcaaggcgaggaacgtctcctctggctttacgaagaagtggagaaaccattgagtcgcgtgctcgcgcatatggaagctaccggtgtcaaattagacgtggcgtatttggagaatctcagccttgaagttgctgcccacatgcgccgcttggaggaagaagtattccgtttagcaggccgttcctttcgccttaattctcgcgatcagttagaacgtgtgttgttcgatgaacttggtctccctcctatcggcaagacagagaagaccggtaaacgtagcacttcagcggcggttttagaagctcttcgcgaagtccatcccattgtggacaagatcttgcaataccgcgaactcgcgaaattgaaaggcacctatattgaccgtcttccggcattagtccacccgaaaacgggacgcctccatacccgcttcaaccaaacagccacggcgaccggtcgtttgtcctcctctgatccaaaccttcagaatattccagtacgtaccccattgggccagaagatccgccgtgcgtttgtagctgaggagggttggcgtttagtggccctcgattatagccaaattgaattacgtgtccttgcccatctttctggcgatgagaacctcatccgcgtgtttcaggaaggcaaagacattcacactcaaacggcaagctggatgtttggattatcagctgaagcgatcgatcctttgatgcgtcgtgcagcgaagaccatcaatttcggtgttctctacggtatgagtgcctttcgtttgtcgcaggaattaggcattccctatgaagaagctcaggcgttcattcagaaatactttcaaagctatcccaaagttaaagcatggatcgagaagactctcgaagaaggccgcacacgtggttacgtagagaccttatttggacgtcgccgctatgttcccgatttaaacgctcgcgtgaaaggcaagcgtgaagccgccgaacgcatggcgttcaacatgcctgtacagggcacggcagctgacctcatgaaacttgcaatggtgcgcctttttccacaattgcgtgaagttggtgcccgcatgctcttgcaggtccacgatgaactcttgttagaagcgccaaaagagcgtgcggaagaggtggcagccctcgcgaaagaagttatggaaggcgtgtggcccttagcggtgcctcttgaagtcgaagttggtattggcgaggattggctggctgccaaagga

SEQ ID NO: 3300 - protein, 841 aa, synthetic construct
  REGION 1..841: note = Variant of DNA polymerase I from Thermus sp. strain 2.9
MHHHHHHGGSGVLPVFEPKGRVLLVDGHHLAYRNFFALKGLTTSSGEPVQGVYGFAKSLLKALKEDGDVVIVVFDAKAPSFRHEAYEAYKAGRAPTPEDFPRQLTLMKELVDLLGLERLEVPGFEADDVLATLAKKAEREGYEVQILTADRDLFQLLSPRISVLHPEGHRITPEWLWEKYGLRPEQWVDFRALAGDPSDNIPGVKGIGEKTALKLLKEWGSLENLLKNLDQVKPESVREKILAHLEDLKLSRELSRVRTDLPLEVDFQRRREPDWEGLKAFLERLEFGSLLHEFGLLESPLPAEEAPWPPPEGAFLGYRLSRPEPMWAELLALAASAQGRVYRAEDPHGALRGLFEVRGLLAKDLAVVALREGLDLPPTDDPMLLAYLLDPSNTTPEGVARRYGGEWTEDAAKRALLAERLHANLLGRLQGEERLLWLYEEVEKPLSRVLAHMEATGVKLDVAYLENLSLEVAAHMRRLEEEVFRLAGRSFRLNSRDQLERVLFDELGLPPIGKTEKTGKRSTSAAVLEALREVHPIVDKILQYRELAKLKGTYIDRLPALVHPKTGRLHTRFNQTATATGRLSSSDPNLQNIPVRTPLGQKIRRAFVAEEGWRLVALDYSQIELRVLAHLSGDENLIRVFQEGKDIHTQTASWMFGLSAEAIDPLMRRAAKTINFGVLYGMSAFRLSQELGIPYEEAQAFIQKYFQSYPKVKAWIEKTLEEGRTRGYVETLFGRRRYVPDLNARVKGKREAAERMAFNMPVQGTAADLMKLAMVRLFPQLREVGARMLLQVHDELLLEAPKERAEEVAALAKEVMEGVWPLAVPLEVEVGIGEDWLAAKG

SEQ ID NO: 3301 - DNA, 2523 bp, synthetic construct
  misc_feature 1..2523: note = Variant of DNA polymerase I from Thermus sp. strain 2.9
  source 1..2523: mol_type = other DNA
atgcaccatcatcatcatcatggcggtagcggcgtgttaccggtgttcgagcctaaaggtcgcgtgcttctggttgatggccatcatctcgcgtatcgtaacttctttgccctgaaaggattaaccaccagcagcggcgagccggtacagggtgtctacggctttgcaaagtcgctcctgaaagctctgaaagaagacggtgatgtggtgattgttgtctttgatgcgaaagcgccaagttttcgccacgaagcgtacgaagcttacaaagccgggcgtgctccaacgccggaagactttcctcgccaattggcgcttatgaaggaattagtggatttgcttggcctcgaacgcttggaagttcccggtttcgaggcagacgacgtattagcgactctcgcaaagaaagccgaacgtgagggctatgaagtccagatcttgacagcagatcgcgatcttttccagcttttatctccgcgcatctcggtgttacacccggaagggcatcgtatcaccccggaatggctctgggagaaatatggtttgcgtcccgaacaatgggtggattttcgcgccttagcaggcgatccgagcgacaatattccgggagttaaaggtatcggcgagaagacggcgctcaagctccttaaagaatgggggtcgttggagaacttgcttaagaatttagatcaggtcaaaccagagtcagtgcgtgagaagattcttgctcacctcgaagacctcaaattaagccgcgaattgtcccgtgtacgcaccgatttgccgctcgaagttgatttccaacgccgccgcgaacctgactgggagggtcttaaagcgtttttagagcgtcttgaatttggttcgctcttgcatgaattcggccttttagaaagcccgttaccagccgaagaagcaccttggccaccgcccgagggcgcgtttttaggttaccgtttgagtcgcccggaaccgatgtgggccgaattactggctcttgcagcgtctgcccagggacgtgtgtatcgcgcggaagaccctcatggtgcgctccgcggcctcttcgaagtccgtggactccttgccaaagacttagctgttgttgcattgcgcgaaggtcttgatttacctccgactgatgatccaatgcttcttgcgtacctcttggacccgtcaaacacgacgcccgaaggcgtagcccgtcgttacggcggcgagtggaccgaagatgcagcgaaacgcgcgttattggccgaacgtttgcacgccaatttattaggacgtttgcaaggcgaggaacgtctcctctggctttacgaagaagtggagaaaccattgagtcgcgtgctcgcgcatatggaagctaccggtgtcaaattagacgtggcgtatttggagaatctcagccttgaagttgctgcccacatgcgccgcttggaggaagaagtattccgtttagcaggccgttcctttcgccttaattctcgcgatcagttagaacgtgtgttgttcgatgaacttggtctccctcctatcggcaagacagagaagaccggtaaacgtagcacttcagcggcggttttagaagctcttcgcgaagtccatcccattgtggacaagatcttgcaataccgcgaactcgcgaaattgaaaggcacctatattgaccgtcttccggcattagtccacccgaaaacgggacgcctccatacccgcttcaaccaaacagccacggcgaccggtcgtttgtcctcctctgatccaaaccttcagaatattccagtacgtaccccattgggccagaagatccgccgtgcgtttgtagctgaggagggttggcgtttagtggccctcgattatagccaaattgaattacgtgtccttgcccatctttctggcgatgagaacctcatccgcgtgtttcaggaaggcaaagacattcacactcaaacggcaagctggatgtttggattatcagctgaagcgatcgatcctttgatgcgtcgtgcagcgaagaccatcaatttcggtgttctctacggtatgagtgcctttcgtttgtcgcaggggttaggcattccctatgaagaagctcaggcgttcattcagaaatactttcaaagctatcccaaagttaaagcatggatcgagaagactctcgaagaaggccgcacacgtggttacgtagagaccttatttggacgtcgccgctatgttcccgatttaaacgctcgcgtgaaaggcaagcgtgaagccgccgaacgcatggcgttcaacatgcctgtacagggcacggcagctgacctcatgaaacttgcaatggtgcgcctttttccacaattgcgtgaagttggtgcccgcatgctcttgcaggtccacgatgaactcttgttagaagcgccaaaagagcgtgcggaagaggtggcagccctcgcgaaagaagttatggaaggcgtgtggcccttagcggtgcctcttgaagtcgaagttggtattggcgaggattggctggctgccaaagga

SEQ ID NO: 3302 - protein, 841 aa, synthetic construct
  REGION 1..841: note = Variant of DNA polymerase I from Thermus sp. strain 2.9
MHHHHHHGGSGVLPVFEPKGRVLLVDGHHLAYRNFFALKGLTTSSGEPVQGVYGFAKSLLKALKEDGDVVIVVFDAKAPSFRHEAYEAYKAGRAPTPEDFPRQLALMKELVDLLGLERLEVPGFEADDVLATLAKKAEREGYEVQILTADRDLFQLLSPRISVLHPEGHRITPEWLWEKYGLRPEQWVDFRALAGDPSDNIPGVKGIGEKTALKLLKEWGSLENLLKNLDQVKPESVREKILAHLEDLKLSRELSRVRTDLPLEVDFQRRREPDWEGLKAFLERLEFGSLLHEFGLLESPLPAEEAPWPPPEGAFLGYRLSRPEPMWAELLALAASAQGRVYRAEDPHGALRGLFEVRGLLAKDLAVVALREGLDLPPTDDPMLLAYLLDPSNTTPEGVARRYGGEWTEDAAKRALLAERLHANLLGRLQGEERLLWLYEEVEKPLSRVLAHMEATGVKLDVAYLENLSLEVAAHMRRLEEEVFRLAGRSFRLNSRDQLERVLFDELGLPPIGKTEKTGKRSTSAAVLEALREVHPIVDKILQYRELAKLKGTYIDRLPALVHPKTGRLHTRFNQTATATGRLSSSDPNLQNIPVRTPLGQKIRRAFVAEEGWRLVALDYSQIELRVLAHLSGDENLIRVFQEGKDIHTQTASWMFGLSAEAIDPLMRRAAKTINFGVLYGMSAFRLSQGLGIPYEEAQAFIQKYFQSYPKVKAWIEKTLEEGRTRGYVETLFGRRRYVPDLNARVKGKREAAERMAFNMPVQGTAADLMKLAMVRLFPQLREVGARMLLQVHDELLLEAPKERAEEVAALAKEVMEGVWPLAVPLEVEVGIGEDWLAAKG

SEQ ID NO: 3303 - DNA, 2523 bp, synthetic construct
  misc_feature 1..2523: note = Variant of DNA polymerase I from Thermus sp. strain 2.9
  source 1..2523: mol_type = other DNA
atgcaccatcatcatcatcatggcggtagcggcgtgttaccggtgttcgagcctaaaggtcgcgtgcttctggttgatggccatcatctcgcgtatcgtaacttctttgccctgaaaggattaaccaccagcagcggcgagccggtacagggtgtctacggctttgcaaagtcgctcctgaaagctctgaaagaagacggtgatgtggtgattgttgtctttgatgcgaaagcgccaagttttcgccacgaagcgtacgaagcttacaaagccgggcgtgctccaacgccggaagactttcctcgccaattggcgcttatgaaggaattagtggatttgcttggcctcgaacgcttggaagttcccggtttcgaggcagacgacgtattagcgactctcgcaaagaaagccgaacgtgagggctatgaagtccagatcttgacagcagatcgcgatcttttccagcttttatctccgcgcatctcggtgttacacccggaagggcatcgtatcaccccggaatggctctgggagaaatatggtttgcgtcccgaacaatgggtggattttcgcgccttagcaggcgatccgagcgacaatattccgggagttaaaggtatcggcgagaagacggcgctcaagctccttaaagaatgggggtcgttggagaacttgcttaagaatttagatcaggtcaaaccagagtcagtgcgtgagaagattcttgctcacctcgaagacctcaaattaagccgcgaattgtcccgtgtacgcaccgatttgccgctcgaagttgatttccaacgccgccgcgaacctgactgggagggtcttaaagcgtttttagagcgtcttgaatttggttcgctcttgcatgaattcggccttttagaaagcccgttaccagccgaagaagcaccttggccaccgcccgagggcgcgtttttaggttaccgtttgagtcgcccggaaccgatgtgggccgaattactggctcttgcagcgtctgcccagggacgtgtgtatcgcgcggaagaccctcatggtgcgctccgcggcctcttcgaagtccgtggactccttgccaaagacttagctgttgttgcattgcgcgaaggtcttgatttacctccgactgatgatccaatgcttcttgcgtacctcttggacccgtcaaacacgacgcccgaaggcgtagcccgtcgttacggcggcgagtggaccgaagatgcagcgaaacgcgcgttattggccgaacgtttgcacgccaatttattaggacgtttgcaaggcgaggaacgtctcctctggctttacgaagaagtggagaaaccattgagtcgcgtgctcgcgcatatggaagctaccggtgtcaaattagacgtggcgtatttggagaatctcagccttgaagttgctgcccacatgcgccgcttggaggaagaagtattccgtttagcaggccgttcctttcgccttaattctcgcgatcagttagaacgtgtgttgttcgatgaacttggtctccctcctatcggcaagacagagaagaccggtaaacgtagcacttcagcggcggttttagaagctcttcgcgaagtccatcccattgtggacaagatcttgcaataccgcgaactcgcgaaattgaaaggcacctatattgaccgtcttccggcattagtccacccgaaaacgggacgcctccatacccgcttcaaccaaacagccacggcgaccggtcgtttgtcctcctctgatccaaaccttcagaatattccagtacgtaccccattgggccagaagatccgccgtgcgtttgtagctgaggagggttggcgtttagtggccctcgattatagccaaattgaattacgtgtccttgcccatctttctggcgatgagaacctcatccgcgtgtttcaggaaggcaaagacattcacactcaaacggcaagctggatgtttggattatcagctgaatggatcgatcctttgatgcgtcgtgcagcgaagaccatcaatttcggtgttctctacggtatgagtgcctttcgtttgtcgcaggaattaggcattccctatgaagaagctcaggcgttcattcagaaatactttcaaagctatcccaaagttaaagcatggatcgagaagactctcgaagaaggccgcacacgtggttacgtagagaccttatttggacgtcgccgctatgttcccgatttaaacgctcgcgtgaaaggcaagcgtgaagccgccgaacgcatggcgttcaacatgcctgtacagggcacggcagctgacctcatgaaacttgcaatggtgcgcctttttccacaattgcgtgaagttggtgcccgcatgctcttgcaggtccacgatgaactcttgttagaagcgccaaaagagcgtgcggaagaggtggcagccctcgcgaaagaagttatggaaggcgtgtggcccttagcggtgcctcttgaagtcgaagttggtattggcgaggattggctggctgccaaagga

SEQ ID NO: 3304 - protein, 841 aa, synthetic construct
  REGION 1..841: note = Variant of DNA polymerase I from Thermus sp. strain 2.9
MHHHHHHGGSGVLPVFEPKGRVLLVDGHHLAYRNFFALKGLTTSSGEPVQGVYGFAKSLLKALKEDGDVVIVVFDAKAPSFRHEAYEAYKAGRAPTPEDFPRQLALMKELVDLLGLERLEVPGFEADDVLATLAKKAEREGYEVQILTADRDLFQLLSPRISVLHPEGHRITPEWLWEKYGLRPEQWVDFRALAGDPSDNIPGVKGIGEKTALKLLKEWGSLENLLKNLDQVKPESVREKILAHLEDLKLSRELSRVRTDLPLEVDFQRRREPDWEGLKAFLERLEFGSLLHEFGLLESPLPAEEAPWPPPEGAFLGYRLSRPEPMWAELLALAASAQGRVYRAEDPHGALRGLFEVRGLLAKDLAVVALREGLDLPPTDDPMLLAYLLDPSNTTPEGVARRYGGEWTEDAAKRALLAERLHANLLGRLQGEERLLWLYEEVEKPLSRVLAHMEATGVKLDVAYLENLSLEVAAHMRRLEEEVFRLAGRSFRLNSRDQLERVLFDELGLPPIGKTEKTGKRSTSAAVLEALREVHPIVDKILQYRELAKLKGTYIDRLPALVHPKTGRLHTRFNQTATATGRLSSSDPNLQNIPVRTPLGQKIRRAFVAEEGWRLVALDYSQIELRVLAHLSGDENLIRVFQEGKDIHTQTASWMFGLSAEWIDPLMRRAAKTINFGVLYGMSAFRLSQELGIPYEEAQAFIQKYFQSYPKVKAWIEKTLEEGRTRGYVETLFGRRRYVPDLNARVKGKREAAERMAFNMPVQGTAADLMKLAMVRLFPQLREVGARMLLQVHDELLLEAPKERAEEVAALAKEVMEGVWPLAVPLEVEVGIGEDWLAAKG

SEQ ID NO: 3305 - DNA, 2523 bp, synthetic construct
  misc_feature 1..2523: note = Variant of DNA polymerase I from Thermus sp. strain 2.9
  source 1..2523: mol_type = other DNA
atgcaccatcatcatcatcatggcggtagcggcgtgttaccggtgttcgagcctaaaggtcgcgtgcttctggttgatggccatcatctcgcgtatcgtaacttctttgccctgaaaggattaaccaccagcagcggcgagccggtacagggtgtctacggctttgcaaagtcgctcctgaaagctctgaaagaagacggtgatgtggtgattgttgtctttgatgcgaaagcgccaagttttcgccacgaagcgtacgaagcttacaaagccgggcgtgctccaacgccggaagactttcctcgccaattggcgcttatgaaggaattagtggatttgcttggcctcgaacgcttggaagttcccggtttcgaggcagacgacgtattagcgactctcgcaaagaaagccgaacgtgagggctatgaagtccagatcttgacagcagatcgcgatcttttccagcttttatctccgcgcatctcggtgttacacccggaagggcatcgtatcaccccggaatggctctgggagaaatatggtttgcgtcccgaacaatgggtggattttcgcgccttagcaggcgatccgagcgacaatattccgggagttaaaggtatcggcgagaagacggcgctcaagctccttaaagaatgggggtcgttggagaacttgcttaagaatttagatcaggtcaaaccagagtcagtgcgtgagaagattcttgctcacctcgaagacctcaaattaagccgcgaattgtcccgtgtacgcaccgatttgccgctcgaagttgatttccaacgccgccgcgaacctgactgggagggtcttaaagcgtttttagagcgtcttgaatttggttcgctcttgcatgaattcggccttttagaaagcccgttaccagccgaagaagcaccttggccaccgcccgagggcgcgtttttaggttaccgtttgagtcgcccggaaccgatgtgggccgaattactggctcttgcagcgtctgcccagggacgtgtgtatcgcgcggaagaccctcatggtgcgctccgcggcctcttcgaagtccgtggactccttgccaaagacttagctgttgttgcattgcgcgaaggtcttgatttacctccgactgatgatccaatgcttcttgcgtacctcttggacccgtcaaacacgacgcccgaaggcgtagcccgtcgttacggcggcgagtggaccgaagatgcagcgaaacgcgcgttattggccgaacgtttgcacgccaatttacggggacgtttgcaaggcgaggaacgtctcctctggctttacgaagaagtggagaaaccattgagtcgcgtgctcgcgcatatggaagctaccggtgtcaaattagacgtggcgtatttggagaatctcagccttgaagttgctgcccacatgcgccgcttggaggaagaagtattccgtttagcaggccgttcctttcgccttaattctcgcgatcagttagaacgtgtgttgttcgatgaacttggtctccctcctatcggcaagacagagaagaccggtaaacgtagcacttcagcggcggttttagaagctcttcgcgaagtccatcccattgtggacaagatcttgcaataccgcgaactcgcgaaattgaaaggcacctatattgaccgtcttccggcattagtccacccgaaaacgggacgcctccatacccgcttcaaccaaacagccacggcgaccggtcgtttgtcctcctctgatccaaaccttcagaatattccagtacgtaccccattgggccagaagatccgccgtgcgtttgtagctgaggagggttggcgtttagtggccctcgattatagccaaattgaattacgtgtccttgcccatctttctggcgatgagaacctcatccgcgtgtttcaggaaggcaaagacattcacactcaaacggcaagctggatgtttggattatcagctgaagcgatcgatcctttgatgcgtcgtgcagcgaagaccatcaatttcggtgttctctacggtatgagtgcctttcgtttgtcgcaggaattaggcattccctatgaagaagctcaggcgttcattcagaaatactttcaaagctatcccaaagttaaagcatggatcgagaagactctcgaagaaggccgcacacgtggttacgtagagaccttatttggacgtcgccgctatgttcccgatttaaacgctcgcgtgaaaggcaagcgtgaagccgccgaacgcatggcgttcaacatgcctgtacagggcacggcagctgacctcatgaaacttgcaatggtgcgcctttttccacaattgcgtgaagttggtgcccgcatgctcttgcaggtccacgatgaactcttgtttgaagcgccaaaagagcgtgcggaagaggtggcagccctcgcgaaagaagttatggaaggcgtgtggcccttagcggtgcctcttgaagtcgaagttggtattggcgaggattggctggctgccaaagga

SEQ ID NO: 3306 - protein, 841 aa, synthetic construct
  REGION 1..841: note = Variant of DNA polymerase I from Thermus sp. strain 2.9
MHHHHHHGGSGVLPVFEPKGRVLLVDGHHLAYRNFFALKGLTTSSGEPVQGVYGFAKSLLKALKEDGDVVIVVFDAKAPSFRHEAYEAYKAGRAPTPEDFPRQLALMKELVDLLGLERLEVPGFEADDVLATLAKKAEREGYEVQILTADRDLFQLLSPRISVLHPEGHRITPEWLWEKYGLRPEQWVDFRALAGDPSDNIPGVKGIGEKTALKLLKEWGSLENLLKNLDQVKPESVREKILAHLEDLKLSRELSRVRTDLPLEVDFQRRREPDWEGLKAFLERLEFGSLLHEFGLLESPLPAEEAPWPPPEGAFLGYRLSRPEPMWAELLALAASAQGRVYRAEDPHGALRGLFEVRGLLAKDLAVVALREGLDLPPTDDPMLLAYLLDPSNTTPEGVARRYGGEWTEDAAKRALLAERLHANLRGRLQGEERLLWLYEEVEKPLSRVLAHMEATGVKLDVAYLENLSLEVAAHMRRLEEEVFRLAGRSFRLNSRDQLERVLFDELGLPPIGKTEKTGKRSTSAAVLEALREVHPIVDKILQYRELAKLKGTYIDRLPALVHPKTGRLHTRFNQTATATGRLSSSDPNLQNIPVRTPLGQKIRRAFVAEEGWRLVALDYSQIELRVLAHLSGDENLIRVFQEGKDIHTQTASWMFGLSAEAIDPLMRRAAKTINFGVLYGMSAFRLSQELGIPYEEAQAFIQKYFQSYPKVKAWIEKTLEEGRTRGYVETLFGRRRYVPDLNARVKGKREAAERMAFNMPVQGTAADLMKLAMVRLFPQLREVGARMLLQVHDELLFEAPKERAEEVAALAKEVMEGVWPLAVPLEVEVGIGEDWLAAKG

SEQ ID NO: 3307 - DNA, 2523 bp, synthetic construct
  misc_feature 1..2523: note = Variant of DNA polymerase I from Thermus sp. strain 2.9
  source 1..2523: mol_type = other DNA
atgcaccatcatcatcatcatggcggtagcggcgtgttaccggtgttcgagcctaaaggtcgcgtgcttctggttgatggccatcatctcgcgtatcgtaacttctttgccctgaaaggattaaccaccagcagcggcgagccggtacagggtgtctacggctttgcaaagtcgctcctgaaagctctgaaagaagacggtgatgtggtgattgttgtctttgatgcgaaagcgccaagttttcgccacgaagcgtacgaagcttacaaagccgggcgtgctccaacgccggaagactttcctcgccaattggcgcttatgaaggaattagtggatttgcttggcctcgaacgcttggaagttcccggtttcgaggcagacgacgtattagcgactctcgcaaagaaagccgaacgtgagggctatgaagtccagatcttgacagcagatcgcgatcttttccagcttttatctccgcgcatctcggtgttacacccggaagggcatcgtatcaccccggaatggctctgggagaaatatggtttgcgtcccgaacaatgggtggattttcgcgccttagcaggcgatccgagcgacaatattccgggagttaaaggtatcggcgagaagacggcgctcaagctccttaaagaatgggggtcgttggagaacttgcttaagaatttagatcaggtcaaaccagagtcagtgcgtgagaagattcttgctcacctcgaagacctcaaattaagccgcgaattgtcccgtgtacgcaccgatttgccgctcgaagttgatttccaacgccgccgcgaacctgactgggagggtcttaaagcgtttttagagcgtcttgaatttggttcgctcttgcatgaattcggccttttagaaagcccgttaccagccgaagaagcaccttggccaccgcccgagggcgcgtttttaggttaccgtttgagtcgcccggaaccgatgtgggccgaattactggctcttgcagcgtctgcccagggacgtgtgtatcgcgcggaagaccctcatggtgcgctccgcggcctcttcgaagtccgtggactccttgccaaagacttagctgttgttgcattgcgcgaaggtcttgatttacctccgactgatgatccaatgcttcttgcgtacctcttggacccgtcaaacacgacgcccgaaggcgtagcccgtcgttacggcggcgagtggaccgaagatgcagcgaaacgcgcgttattggccgaacgtttgcacgccaatttattaggacgtttgcaaggcgaggaacgtctcctctggctttacgaagaagtggagaaaccattgagtcgcgtgctcgcgcatatggaagctaccggtgtcaaattagacgtggcgtatttggagaatctcagccttgaagttgctgcccacatgcgccgcttggaggaagaagtattccgtttagcaggccgttcctttcgccttaattctcgcgatcagttagaacgtgtgttgttcgatgaacttggtctccctcctatcggcaagacagagaagaccggtaaacgtagcacttcagcggcggttttagaagctcttcgcgaagtccatcccattgtggacaagatcttgcaataccgcgaactcgcgaaattgaaaggcacctatattgaccgtcttccggcattagtccacccgcgtacgggacgcctccatacccgcttcaaccaaacagccacggcgaccggtcgtttgtcctcctctgatccaaaccttcagaatattccagtacgtaccccattgggccagaagatccgccgtgcgtttgtagctgaggagggttggcgtttagtggccctcgattatagccaaattgaattacgtgtccttgcccatctttctggcgatgagaacctcatccgcgtgtttcaggaaggcaaagacattcacactcaaacggcaagctggatgtttggattatcagctgaagcgatcgatcctttgatgcgtcgtgcagcgaagaccatcaatttcggtgttctctacggtatgagtgcctttcgtttgtcgcaggaattaggcattccctatgaagaagctcaggcgttcattcagaaatactttcaaagctatcccaaagttaaagcatggatcgagaagactctcgaagaaggccgcacacgtggttacgtagagaccttatttggacgtcgccgctatgttcccgatttaaacgctcgcgtgaaaggcaagcgtgaagccgccgaacgcatggcgttcaacatgcctgtacagggcacggcagctgacctcatgaaacttgcaatggtgcgcctttttccacaattgcgtgaagttggtgcccgcatgctcttgcaggtccacgatgaactcttgttagaagcgccaaaagagcgtgcggaagaggtggcagccctcgcgaaagaagttatggaaggcgtgtggcccttagcggtgcctcttgaagtcgaagttggtattggcgaggattggctggctgccaaagga

SEQ ID NO: 3308 - protein, 841 aa, synthetic construct
  REGION 1..841: note = Variant of DNA polymerase I from Thermus sp. strain 2.9
MHHHHHHGGSGVLPVFEPKGRVLLVDGHHLAYRNFFALKGLTTSSGEPVQGVYGFAKSLLKALKEDGDVVIVVFDAKAPSFRHEAYEAYKAGRAPTPEDFPRQLALMKELVDLLGLERLEVPGFEADDVLATLAKKAEREGYEVQILTADRDLFQLLSPRISVLHPEGHRITPEWLWEKYGLRPEQWVDFRALAGDPSDNIPGVKGIGEKTALKLLKEWGSLENLLKNLDQVKPESVREKILAHLEDLKLSRELSRVRTDLPLEVDFQRRREPDWEGLKAFLERLEFGSLLHEFGLLESPLPAEEAPWPPPEGAFLGYRLSRPEPMWAELLALAASAQGRVYRAEDPHGALRGLFEVRGLLAKDLAVVALREGLDLPPTDDPMLLAYLLDPSNTTPEGVARRYGGEWTEDAAKRALLAERLHANLLGRLQGEERLLWLYEEVEKPLSRVLAHMEATGVKLDVAYLENLSLEVAAHMRRLEEEVFRLAGRSFRLNSRDQLERVLFDELGLPPIGKTEKTGKRSTSAAVLEALREVHPIVDKILQYRELAKLKGTYIDRLPALVHPRTGRLHTRFNQTATATGRLSSSDPNLQNIPVRTPLGQKIRRAFVAEEGWRLVALDYSQIELRVLAHLSGDENLIRVFQEGKDIHTQTASWMFGLSAEAIDPLMRRAAKTINFGVLYGMSAFRLSQELGIPYEEAQAFIQKYFQSYPKVKAWIEKTLEEGRTRGYVETLFGRRRYVPDLNARVKGKREAAERMAFNMPVQGTAADLMKLAMVRLFPQLREVGARMLLQVHDELLLEAPKERAEEVAALAKEVMEGVWPLAVPLEVEVGIGEDWLAAKG

SEQ ID NO: 3309 - DNA, 2523 bp, synthetic construct
  misc_feature 1..2523: note = Variant of DNA polymerase I from Thermus sp. strain 2.9
  source 1..2523: mol_type = other DNA
atgcaccatcatcatcatcatggcggtagcttggtgttaccggtgttcgagcctaaaggtcgcgtgcttctggttgatggccatcatctcgcgtatcgtaacttctttgccctgaaaggattaaccaccagcagcggcgagccggtacagggtgtctacggctttgcaaagtcgctcctgaaagctctgaaagaagacggtgatgtggtgattgttgtctttgatgcgaaagcgccaagttttcgccacgaagcgtacgaagcttacaaagccgggcgtgctccaacgccggaagactttcctcgccaattggcgcttatgaaggaattagtggatttgcttggcctcgaacgcttggaagttcccggtttcgaggcagacgacgtattagcgactctcgcaaagaaagccgaacgtgagggctatgaagtccagatcttgacagcagatcgcgatcttttccagcttttatctccgcgcatctcggtgttacacccggaagggcatcgtatcaccccggaatggctctgggagaaatatggtttgcgtcccgaacaatgggtggattttcgcgccttagcaggcgatccgagcgacaatattccgggagttaaaggtatcggcgagaagacggcgctcaagctccttaaagaatgggggtcgttggagaacttgcttaagaatttagatcaggtcaaaccagagtcagtgcgtgagaagattcttgctcacctcgaagacctcaaattaagccgcgaattgtcccgtgtacgcaccgatttgccgctcgaagttgatttccaacgccgccgcgaacctgactgggagggtcttaaagcgtttttagagcgtcttgaatttggttcgctcttgcatgaattcggccttttagaaagcccgttaccagccgaagaagcaccttggccaccgcccgagggcgcgtttttaggttaccgtttgagtcgcccggaaccgatgtgggccgaattactggctcttgcagcgtctgcccagggacgtgtgtatcgcgcggaagaccctcatggtgcgctccgcggcctcttcgaagtccgtggactccttgccaaagacttagctgttgttgcattgcgcgaaggtcttgatttacctccgactgatgatccaatgcttcttgcgtacctcttggacccgtcaaacacgacgcccgaaggcgtagcccgtcgttacggcggcgagtggaccgaagatgcagcgaaacgcgcgttattggccgaacgtttgcacgccaatttattaggacgtttgcaaggcgaggaacgtctcctctggctttacgaagaagtggagaaaccattgagtcgcgtgctcgcgcatatggaagctaccggtgtcaaattagacgtggcgtatttggagaatctcagccttgaagttgctgcccacatgcgccgcttggaggaagaagtattccgtttagcaggccgttcctttcgccttaattctcgcgatcagttagaacgtgtgttgttcgatgaacttggtctccctcctatcggcaagacagagaagaccggtaaacgtagcacttcagcggcggttttagaagctcttcgcgaagtccatcccattgtggacaagatcttgcaataccgcgaactcgcgaaattgaaaggcacctatattgaccgtcttccggcattagtccacccgaaaacgggacgcctccatacccgcttcaaccaaacagccacggcgaccggtcgtttgtcctcctctgatccaaaccttcagaatattccagtacgtaccccattgggccagaagatccgccgtgcgtttgtagctgaggagggttggcgtttagtggccctcgattatagccaaattgaattacgtgtccttgcccatctttctggcgatgagaacctcatccgcgtgtttcaggaaggcaaagacattcacactcaaacggcaagctggatgtttggattatcagctgaagcgatcgatcctttgatgcgtcgtgcagcgaagaccatcaatttcggtgttctctacggtatgagtgcctttcgtttgtcgcaggaattaggcattccctatgaagaagctcaggcgttcattcagaaatactttcaaagctatcccaaagttaaagcatggatcgagaagactctcgaagaaggccgcacacgtggttacgtagagaccttatttggacgtcgccgctatgttcccgatttaaacgctcgcgtgaaaggcaagcgtgaagccgccgaacgcatggcgttcaacatgcctgtacagggcacggcagctgacctcatgaaacttgcaatggtgcgcctttttccacaattgcgtgaagttggtgcccgcatgctcttgcaggtccacgatgaactcttgttagaagcgccaaaagagcgtgcggaagaggtggcagccctcgcgaaagaagttatggaaggcgtgtggcccttagcggtgcctcttgaagtcgaagttggtattggcgaggattggctggctgccaaagga

SEQ ID NO: 3310 - protein, 841 aa, synthetic construct
  REGION 1..841: note = Variant of DNA polymerase I from Thermus sp. strain 2.9
MHHHHHHGGSLVLPVFEPKGRVLLVDGHHLAYRNFFALKGLTTSSGEPVQGVYGFAKSLLKALKEDGDVVIVVFDAKAPSFRHEAYEAYKAGRAPTPEDFPRQLALMKELVDLLGLERLEVPGFEADDVLATLAKKAEREGYEVQILTADRDLFQLLSPRISVLHPEGHRITPEWLWEKYGLRPEQWVDFRALAGDPSDNIPGVKGIGEKTALKLLKEWGSLENLLKNLDQVKPESVREKILAHLEDLKLSRELSRVRTDLPLEVDFQRRREPDWEGLKAFLERLEFGSLLHEFGLLESPLPAEEAPWPPPEGAFLGYRLSRPEPMWAELLALAASAQGRVYRAEDPHGALRGLFEVRGLLAKDLAVVALREGLDLPPTDDPMLLAYLLDPSNTTPEGVARRYGGEWTEDAAKRALLAERLHANLLGRLQGEERLLWLYEEVEKPLSRVLAHMEATGVKLDVAYLENLSLEVAAHMRRLEEEVFRLAGRSFRLNSRDQLERVLFDELGLPPIGKTEKTGKRSTSAAVLEALREVHPIVDKILQYRELAKLKGTYIDRLPALVHPKTGRLHTRFNQTATATGRLSSSDPNLQNIPVRTPLGQKIRRAFVAEEGWRLVALDYSQIELRVLAHLSGDENLIRVFQEGKDIHTQTASWMFGLSAEAIDPLMRRAAKTINFGVLYGMSAFRLSQELGIPYEEAQAFIQKYFQSYPKVKAWIEKTLEEGRTRGYVETLFGRRRYVPDLNARVKGKREAAERMAFNMPVQGTAADLMKLAMVRLFPQLREVGARMLLQVHDELLLEAPKERAEEVAALAKEVMEGVWPLAVPLEVEVGIGEDWLAAKG

SEQ ID NO: 3311 - DNA, 2523 bp, synthetic construct
  misc_feature 1..2523: note = Variant of DNA polymerase I from Thermus sp. strain 2.9
  source 1..2523: mol_type = other DNA
atgcaccatcatcatcatcatggcggtagcggcgtgttaccggtgttcgagcctaaaggtcgcgtgcttctggttgatggccatcatctcgcgtatcgtaacttctttgccctgaaaggattaaccaccagcagcggcgagccggtacagggtgtctacggctttgcaaagtcgctcctgaaagctctgaaagaagacggtgatgtggtgattgttgtctttgatgcgaaagcgccaagttttcgccacgaagcgtacgaagcttacaaagccgggcgtgctccaacgccggaagactttcctcgccaattgtttcttatgaaggaattagtggatttgcttggcctcgaacgcttggaagttcccggtttcgaggcagacgacgtattagcgactctcgcaaagaaagccgaacgtgagggctatgaagtccagatcttgacagcagatcgcgatcttttccagcttttatctccgcgcatctcggtgttacacccggaagggcatcgtatcaccccggaatggctctgggagaaatatggtttgcgtcccgaacaatgggtggattttcgcgccttagcaggcgatccgagcgacaatattccgggagttaaaggtatcggcgagaagacggcgctcaagctccttaaagaatgggggtcgttggagaacttgcttaagaatttagatcaggtcaaaccagagtcagtgcgtgagaagattcttgctcacctcgaagacctcaaattaagccgcgaattgtcccgtgtacgcaccgatttgccgctcgaagttgatttccaacgccgccgcgaacctgactgggagggtcttaaagcgtttttagagcgtcttgaatttggttcgctcttgcatgaattcggccttttagaaagcccgttaccagccgaagaagcaccttggccaccgcccgagggcgcgtttttaggttaccgtttgagtcgcccggaaccgatgtgggccgaattactggctcttgcagcgtctgcccagggacgtgtgtatcgcgcggaagaccctcatggtgcgctccgcggcctcttcgaagtccgtggactccttgccaaagacttagctgttgttgcattgcgcgaaggtcttgatttacctccgactgatgatccaatgcttcttgcgtacctcttggacccgtcaaacacgacgcccgaaggcgtagcccgtcgttacggcggcgagtggaccgaagatgcagcgaaacgcgcgttattggccgaacgtttgcacgccaatttattaggacgtttgcaaggcgaggaacgtctcctctggctttacgaagaagtggagaaaccattgagtcgcgtgctcgcgcatatggaagctaccggtgtcaaattagacgtggcgtatttggagaatctcagccttgaagttgctgcccacatgcgccgcttggaggaagaagtattccgtttagcaggccgttcctttcgccttaattctcgcgatcagttagaacgtgtgttgttcgatgaacttggtctccctcctatcggcaagacagagaagaccggtaaacgtagcacttcagcggcggttttagaagctcttcgcgaagtccatcccattgtggacaagatcttgcaataccgcgaactcgcgaaattgaaaggcacctatattgaccgtcttccggcattagtccacccgaaaacgggacgcctccatacccgcttcaaccaaacagccacggcgaccggtcgtttgtcctcctctgatccaaaccttcagaatattccagtacgtaccccattgggccagaagatccgccgtgcgtttgtagctgaggagggttggcgtttagtggccctcgattatagccaaattgaattacgtgtccttgcccatctttctggcgatgagaacctcatccgcgtgtttcaggaaggcaaagacattcacactcaaacggcaagctggatgtttggattatcagctgaagcgatcgatcctttgatgcgtcgtgcagcgaagaccatcaatttcggtgttctctacggtatgagtgcctttcgtttgtcgcaggaattaggcattccctatgaagaagctcaggcgttcattcagaaatactttcaaagctatcccaaagttaaagcatggatcgagaagactctcgaagaaggccgcacacgtggttacgtagagaccttatttggacgtcgccgctatgttcccgatttaaacgctcgcgtgaaaggcaagcgtgaagccgccgaacgcatggcgttcaacatgcctgtacagggcacggcagctgacctcatgaaacttgcaatggtgcgcctttttccacaattgcgtgaagttggtgcccgcatgctcttgcaggtccacgatgaactcttgttagaagcgccaaaagagcgtgcggaagaggtggcagccctcgcgaaagaagttatggaaggcgtgtggcccttagcggtgcctcttgaagtcgaagttggtattggcgaggattggctggctgccaaagga

SEQ ID NO: 3312 - protein, 841 aa, synthetic construct
  REGION 1..841: note = Variant of DNA polymerase I from Thermus sp. strain 2.9
MHHHHHHGGSGVLPVFEPKGRVLLVDGHHLAYRNFFALKGLTTSSGEPVQGVYGFAKSLLKALKEDGDVVIVVFDAKAPSFRHEAYEAYKAGRAPTPEDFPRQLFLMKELVDLLGLERLEVPGFEADDVLATLAKKAEREGYEVQILTADRDLFQLLSPRISVLHPEGHRITPEWLWEKYGLRPEQWVDFRALAGDPSDNIPGVKGIGEKTALKLLKEWGSLENLLKNLDQVKPESVREKILAHLEDLKLSRELSRVRTDLPLEVDFQRRREPDWEGLKAFLERLEFGSLLHEFGLLESPLPAEEAPWPPPEGAFLGYRLSRPEPMWAELLALAASAQGRVYRAEDPHGALRGLFEVRGLLAKDLAVVALREGLDLPPTDDPMLLAYLLDPSNTTPEGVARRYGGEWTEDAAKRALLAERLHANLLGRLQGEERLLWLYEEVEKPLSRVLAHMEATGVKLDVAYLENLSLEVAAHMRRLEEEVFRLAGRSFRLNSRDQLERVLFDELGLPPIGKTEKTGKRSTSAAVLEALREVHPIVDKILQYRELAKLKGTYIDRLPALVHPKTGRLHTRFNQTATATGRLSSSDPNLQNIPVRTPLGQKIRRAFVAEEGWRLVALDYSQIELRVLAHLSGDENLIRVFQEGKDIHTQTASWMFGLSAEAIDPLMRRAAKTINFGVLYGMSAFRLSQELGIPYEEAQAFIQKYFQSYPKVKAWIEKTLEEGRTRGYVETLFGRRRYVPDLNARVKGKREAAERMAFNMPVQGTAADLMKLAMVRLFPQLREVGARMLLQVHDELLLEAPKERAEEVAALAKEVMEGVWPLAVPLEVEVGIGEDWLAAKG

SEQ ID NO: 3313 - DNA, 2523 bp, synthetic construct
  misc_feature 1..2523: note = Variant of DNA polymerase I from Thermus sp. strain 2.9
  source 1..2523: mol_type = other DNA
atgcaccatcatcatcatcatggcggtagcggcgtgttaccggtgttcgagcctaaaggtcgcgtgcttctggttgatggccatcatctcgcgtatcgtaacttctttgccctgaaaggattaaccaccagcagcggcgagccggtacagggtgtctacggctttgcaaagtcgctcctgaaagctctgaaagaagacggtgatgtggtgattgttgtctttgattcgaaagcgccaagttttcgccacgaagcgtacgaagcttacaaagccgggcgtgctccaacgccggaagactttcctcgccaattggcgcttatgaaggaattagtggatttgcttggcctcgaacgcttggaagttcccggtttcgaggcagacgacgtattagcgactctcgcaaagaaagccgaacgtgagggctatgaagtccagatcttgacagcagatcgcgatcttttccagcttttatctccgcgcatctcggtgttacacccggaagggcatcgtatcaccccggaatggctctgggagaaatatggtttgcgtcccgaacaatgggtggattttcgcgccttagcaggcgatccgagcgacaatattccgggagttaaaggtatcggcgagaagacggcgctcaagctccttaaagaatgggggtcgttggagaacttgcttaagaatttagatcaggtcaaaccagagtcagtgcgtgagaagattcttgctcacctcgaagacctcaaattaagccgcgaattgtcccgtgtacgcaccgatttgccgctcgaagttgatttccaacgccgccgcgaacctgactgggagggtcttaaagcgtttttagagcgtcttgaatttggttcgctcttgcatgaattcggccttttagaaagcccgttaccagccgaagaagcaccttggccaccgcccgagggcgcgtttttaggttaccgtttgagtcgcccggaaccgatgtgggccgaattactggctcttgcagcgtctgcccagggacgtgtgtatcgcgcggaagaccctcatggtgcgctccgcggcctcttcgaagtccgtggactccttgccaaagacttagctgttgttgcattgcgcgaaggtcttgatttacctccgactgatgatccaatgcttcttgcgtacctcttggacccgtcaaacacgacgcccgaaggcgtagcccgtcgttacggcggcgagtggaccgaagatgcagcgaaacgcgcgttattggccgaacgtttgcacgccaatttattaggacgtttgcaaggcgaggaacgtctcctctggctttacgaagaagtggagaaaccattgagtcgcgtgctcgcgcatatggaagctaccggtgtcaaattagacgtggcgtatttggagaatctcagccttgaagttgctgcccacatgcgccgcttggaggaagaagtattccgtttagcaggccgttcctttcgccttaattctcgcgatcagttagaacgtgtgttgttcgatgaacttggtctccctcctatcggcaagacagagaagaccggtaaacgtagcacttcagcggcggttttagaagctcttcgcgaagtccatcccattgtggacaagatcttgcaataccgcgaactcgcgaaattgaaaggcacctatattgaccgtcttccggcattagtccacccgaaaacgggacgcctccatacccgcttcaaccaaacagccacggcgaccggtcgtttgtcctcctctgatccaaaccttcagaatattccagtacgtaccccattgggccagaagatccgccgtgcgtttgtagctgaggagggttggcgtttagtggccctcgattatagccaaattgaattacgtgtccttgcccatctttctggcgatgagaacctcatccgcgtgtttcaggaaggcaaagacattcacactcaaacggcaagctggatgtttggattatcagctgaagcgatcgatcctttgatgcgtcgtgcagcgaagaccatcaatttcggtgttctctacggtatgagtgcctttcgtttgtcgcaggaattaggcattccctatgaagaagctcaggcgttcattcagaaatactttcaaagctatcccaaagttaaagcatggatcgagaagactctcgaagaaggccgcacacgtggttacgtagagaccttatttggacgtcgccgctatgttcccgatttaaacgctcgcgtgaaaggcaagcgtgaagccgccgaacgcatggcgttcaacatgcctgtacagggcacggcagctgacctcatgaaacttgcaatggtgcgcctttttccacaattgcgtgaagttggtgcccgcatgctcttgcaggtccacgatgaactcttgttagaagcgccaaaagagcgtgcggaagaggtggcagccctcgcgaaagaagttatggaaggcgtgtggcccttagcggtgcctcttgaagtcgaagttggtattggcgaggattggctggctgccaaagga

SEQ ID NO: 3314 - protein, 841 aa, synthetic construct
  REGION 1..841: note = Variant of DNA polymerase I from Thermus sp. strain 2.9
MHHHHHHGGSGVLPVFEPKGRVLLVDGHHLAYRNFFALKGLTTSSGEPVQGVYGFAKSLLKALKEDGDVVIVVFDSKAPSFRHEAYEAYKAGRAPTPEDFPRQLALMKELVDLLGLERLEVPGFEADDVLATLAKKAEREGYEVQILTADRDLFQLLSPRISVLHPEGHRITPEWLWEKYGLRPEQWVDFRALAGDPSDNIPGVKGIGEKTALKLLKEWGSLENLLKNLDQVKPESVREKILAHLEDLKLSRELSRVRTDLPLEVDFQRRREPDWEGLKAFLERLEFGSLLHEFGLLESPLPAEEAPWPPPEGAFLGYRLSRPEPMWAELLALAASAQGRVYRAEDPHGALRGLFEVRGLLAKDLAVVALREGLDLPPTDDPMLLAYLLDPSNTTPEGVARRYGGEWTEDAAKRALLAERLHANLLGRLQGEERLLWLYEEVEKPLSRVLAHMEATGVKLDVAYLENLSLEVAAHMRRLEEEVFRLAGRSFRLNSRDQLERVLFDELGLPPIGKTEKTGKRSTSAAVLEALREVHPIVDKILQYRELAKLKGTYIDRLPALVHPKTGRLHTRFNQTATATGRLSSSDPNLQNIPVRTPLGQKIRRAFVAEEGWRLVALDYSQIELRVLAHLSGDENLIRVFQEGKDIHTQTASWMFGLSAEAIDPLMRRAAKTINFGVLYGMSAFRLSQELGIPYEEAQAFIQKYFQSYPKVKAWIEKTLEEGRTRGYVETLFGRRRYVPDLNARVKGKREAAERMAFNMPVQGTAADLMKLAMVRLFPQLREVGARMLLQVHDELLLEAPKERAEEVAALAKEVMEGVWPLAVPLEVEVGIGEDWLAAKG

SEQ ID NO: 3315 - DNA, 2523 bp, synthetic construct
  misc_feature 1..2523: note = Variant of DNA polymerase I from Thermus sp. strain 2.9
  source 1..2523: mol_type = other DNA
atgcaccatcatcatcatcatggcggtagcggcgtgttaccggtgttcgagcctaaaggtcgcgtgcttctggttgatggccatcatctcgcgtatcgtaacttctttgccctgaaaggattaaccaccagcagcggcgagccggtacagggtgtctacggctttgcaaagtcgctcctgaaagctctgaaagaagacggtgatgtggtgattgttgtctttgatgcgaaagcgccaagttttcgccacgaagcgtacgaagcttacaaagccgggcgtgctccaacgccggaagactttcctcgccaattggcgcttatgaaggaattagtggatttgcttggcctcgaacgcttggaagttcccggtttcgaggcagacgacgtattagcgactctcgcaaagaaagccgaacgtgagggctatgaagtccagatcttgacagcagatcgcgatcttttccagcttttatctccgcgcatctcggtgttacacccggaagggcatcgtatcaccccggaatggctctgggagaaatatggtttgcgtcccgaacaatgggtggattttcgcgccttagcaggcgatccgagcgacaatattccgggagttaaaggtatcggcgagaagacggcgctcaagctccttaaagaatgggggtcgttggagaacttgcttaagaatttagatcaggtcaaaccagagtcagtgcgtgagaagattcttgctcacctcgaagacctcaaattaagccgcgaattgtcccgtgtacgcaccgatttgccgctcgaagttgatttccaacgccgccgcgaacctgactgggagggtcttaaagcgtttttagagcgtcttgaatttggttcgctcttgcatgaattcggccttttagaaagcccgttaccagccgaagaagcaccttggccaccgcccgagggcgcgtttttaggttaccgtttgagtcgcccggaaccgatgtgggccgaattactggctcttgcagcgtctgcccagggacgtgtgtatcgcgcggaagaccctcatggtgcgctccgcggcctcttcgaagtccgtggactccttgccaaagacttagctgttgttgcattgcgcgaaggtcttgatttacctccgactgatgatccaatgcttcttgcgtacctcttggacccgtcaaacacgacgcccgaaggcgtagcccgtcgttacggcggcgagtggaccgaagatgcagcgaaacgcgcgttattggccgaacgtttgcacgccaatttattaggacgtttgcaaggcgaggaacgtctcctctggctttacgaagaagtggagaaaccattgagtcgcgtgctcgcgcatatggaagctaccggtgtcaaattagacgtggcgtatttggagaatctcagccttgaagttgctgcccacatgcgccgcttggaggaagaagtattcaatttagcaggccgttcctttcgccttaattctcgcgatcagttagaacgtgtgttgttcgatgaacttggtctccctcctatcggcaagacagagaagaccggtaaacgtagcacttcagcggcggttttagaagctcttcgcgaagtccatcccattgtggacaagatcttgcaataccgcgaactcgcgaaattgaaaggcacctatattgaccgtcttccggcattagtccacccgaaaacgggacgcctccatacccgcttcaaccaaacagccacggcgaccggtcgtttgtcctcctctgatccaaaccttcagaatattccagtacgtaccccattgggccagaagatccgccgtgcgtttgtagctgaggagggttggcgtttagtggccctcgattatagccaaattgaattacgtgtccttgcccatctttctggcgatgagaacctcatccgcgtgtttcaggaaggcaaagacattcacactcaaacggcaagctggatgtttggattatcagctgaagcgatcgatcctttgatgcgtcgtgcagcgaagaccatcaatttcggtgttctctacggtatgagtgcctttcgtttgtcgcaggaattaggcattccctatgaagaagctcaggcgttcattcagaaatactttcaaagctatcccaaagttaaagcatggatcgagaagactctcgaagaaggccgcacacgtggttacgtagagaccttatttggacgtcgccgctatgttcccgatttaaacgctcgcgtgaaaggcaagcgtgaagccgccgaacgcatggcgttcaacatgcctgtacagggcacggcagctgacctcatgaaacttgcaatggtgcgcctttttccacaattgcgtgaagttggtgcccgcatgctcttgcaggtccacgatgaactcttgttagaagcgccaaaagagcgtgcggaagaggtggcagccctcgcgaaagaagttatggaaggcgtgtggcccttagcggtgcctcttgaagtcgaagttggtattggcgaggattggctggctgccaaagga

SEQ ID NO: 3316 - protein, 841 aa, synthetic construct
  REGION 1..841: note = Variant of DNA polymerase I from Thermus sp. strain 2.9
MHHHHHHGGSGVLPVFEPKGRVLLVDGHHLAYRNFFALKGLTTSSGEPVQGVYGFAKSLLKALKEDGDVVIVVFDAKAPSFRHEAYEAYKAGRAPTPEDFPRQLALMKELVDLLGLERLEVPGFEADDVLATLAKKAEREGYEVQILTADRDLFQLLSPRISVLHPEGHRITPEWLWEKYGLRPEQWVDFRALAGDPSDNIPGVKGIGEKTALKLLKEWGSLENLLKNLDQVKPESVREKILAHLEDLKLSRELSRVRTDLPLEVDFQRRREPDWEGLKAFLERLEFGSLLHEFGLLESPLPAEEAPWPPPEGAFLGYRLSRPEPMWAELLALAASAQGRVYRAEDPHGALRGLFEVRGLLAKDLAVVALREGLDLPPTDDPMLLAYLLDPSNTTPEGVARRYGGEWTEDAAKRALLAERLHANLLGRLQGEERLLWLYEEVEKPLSRVLAHMEATGVKLDVAYLENLSLEVAAHMRRLEEEVFNLAGRSFRLNSRDQLERVLFDELGLPPIGKTEKTGKRSTSAAVLEALREVHPIVDKILQYRELAKLKGTYIDRLPALVHPKTGRLHTRFNQTATATGRLSSSDPNLQNIPVRTPLGQKIRRAFVAEEGWRLVALDYSQIELRVLAHLSGDENLIRVFQEGKDIHTQTASWMFGLSAEAIDPLMRRAAKTINFGVLYGMSAFRLSQELGIPYEEAQAFIQKYFQSYPKVKAWIEKTLEEGRTRGYVETLFGRRRYVPDLNARVKGKREAAERMAFNMPVQGTAADLMKLAMVRLFPQLREVGARMLLQVHDELLLEAPKERAEEVAALAKEVMEGVWPLAVPLEVEVGIGEDWLAAKG

SEQ ID NO: 3317 - DNA, 2523 bp, synthetic construct
  misc_feature 1..2523: note = Variant of DNA polymerase I from Thermus sp. strain 2.9
  source 1..2523: mol_type = other DNA
atgcaccatcatcatcatcatggcggtagcggcgtgttaccggtgttcgagcctaaaggtcgcgtgcttctggttgatggccatcatctcgcgtatcgtaacttctttgccctgaaaggattaaccaccagcagcggcgagccggtacagggtgtctacggctttgcaaagtcgctcctgaaagctctgaaagaagacggtgatgtggtgattgttgtctttgatgcgaaagcgccaagttttcgccacgaagcgtacgaagcttacaaagccgggcgtgctccaacgccggaagactttcctcgccaattggcgcttatgaaggaattagtggatttgcttggcctcgaacgcttggaagttcccggtttcgaggcagacgacgtattagcgactctcgcaaagaaagccgaacgtgagggctatgaagtccagatcttgacagcagatcgcgatcttttccagcttttatctccgcgcatctcggtgttacacccggaagggcatcgtatcaccccggaatggctctgggagaaatatggtttgcgtcccgaacaatgggtggattttcgcgccttagcaggcgatccgagcgacaatattccgggagttaaaggtatcggcgagaagacggcgctcaagctccttaaagaatgggggtcgttggagaacttgcttaagaatttagatcaggtcaaaccagagtcagtgcgtgagaagattcttgctcacctcgaagacctcaaattaagccgcgaattgtcccgtgtacgcaccgatttgccgctcgaagttgatttccaacgccgccgcgaacctgactgggagggtcttaaagcgtttttagagcgtcttgaatttggttcgctcttgcatgaattcggccttttagaaagcccgttaccagccgaagaagcaccttggccaccgcccgagggcgcgtttttaggttaccgtttgagtcgcccggaaccgatgtgggccgaattactggctcttgcagcgtctgcccagggacgtgtgtatcgcgcggaagaccctcatggtgcgctccgcggcctcttcgaagtccgtggactccttgccaaagacttagctgttgttgcattgcgcgaaggtcttgatttacctccgactgatgatccaatgcttcttgcgtacctcttggacccgtcaaacacgacgcccgaaggcgtagcccgtcgttacggcggcgagtggaccgaagatgcagcgaaacgcgcgttattggccgaacgtttgcacgccaatttattaggacgtttgcaaggcgaggaacgtctcctctggctttacgaagaagtggagaaaccattgagtcgcgtgctcgcgcatatggaagctaccggtgtcaaattagacgtggcgtatttggagaatctcagccttgaagttgctgcccacatgcgccgcttggaggaagaagtattcgatttagcaggccgttcctttcgccttaattctcgcgatcagttagaacgtgtgttgttcgatgaacttggtctccctcctatcggcaagacagagaagaccggtaaacgtagcacttcagcggcggttttagaagctcttcgcgaagtccatcccattgtggacaagatcttgcaataccgcgaactcgcgaaattgaaaggcacctatattgaccgtcttccggcattagtccacccgaaaacgggacgcctccatacccgcttcaaccaaacagccacggcgaccggtcgtttgtcctcctctgatccaaaccttcagaatattccagtacgtaccccattgggccagaagatccgccgtgcgtttgtagctgaggagggttggcgtttagtggccctcgattatagccaaattgaattacgtgtccttgcccatctttctggcgatgagaacctcatccgcgtgtttcaggaaggcaaagacattcacactcaaacggcaagctggatgtttggattatcagctgaagcgatcgatcctttgatgcgtcgtgcagcgaagaccatcaatttcggtgttctctacggtatgagtgcctttcgtttgtcgcaggaattaggcattccctatgaagaagctcaggcgttcattcagaaatactttcaaagctatcccaaagttaaagcatggatcgagaagactctcgaagaaggccgcacacgtggttacgtagagaccttatttggacgtcgccgctatgttcccgatttaaacgctcgcgtgaaaggcaagcgtgaagccgccgaacgcatggcgttcaacatgcctgtacagggcacggcagctgacctcatgaaacttgcaatggtgcgcctttttccacaattgcgtgaagttggtgcccgcatgctcttgcaggtccacgatgaactcttgttagaagcgccaaaagagcgtgcggaagaggtggcagccctcgcgaaagaagttatggaaggcgtgtggcccttagcggtgcctcttgaagtcgaagttggtattggcgaggattggctggctgccaaagga

SEQ ID NO: 3318 - protein, 841 aa, synthetic construct
  REGION 1..841: note = Variant of DNA polymerase I from Thermus sp. strain 2.9
MHHHHHHGGSGVLPVFEPKGRVLLVDGHHLAYRNFFALKGLTTSSGEPVQGVYGFAKSLLKALKEDGDVVIVVFDAKAPSFRHEAYEAYKAGRAPTPEDFPRQLALMKELVDLLGLERLEVPGFEADDVLATLAKKAEREGYEVQILTADRDLFQLLSPRISVLHPEGHRITPEWLWEKYGLRPEQWVDFRALAGDPSDNIPGVKGIGEKTALKLLKEWGSLENLLKNLDQVKPESVREKILAHLEDLKLSRELSRVRTDLPLEVDFQRRREPDWEGLKAFLERLEFGSLLHEFGLLESPLPAEEAPWPPPEGAFLGYRLSRPEPMWAELLALAASAQGRVYRAEDPHGALRGLFEVRGLLAKDLAVVALREGLDLPPTDDPMLLAYLLDPSNTTPEGVARRYGGEWTEDAAKRALLAERLHANLLGRLQGEERLLWLYEEVEKPLSRVLAHMEATGVKLDVAYLENLSLEVAAHMRRLEEEVFDLAGRSFRLNSRDQLERVLFDELGLPPIGKTEKTGKRSTSAAVLEALREVHPIVDKILQYRELAKLKGTYIDRLPALVHPKTGRLHTRFNQTATATGRLSSSDPNLQNIPVRTPLGQKIRRAFVAEEGWRLVALDYSQIELRVLAHLSGDENLIRVFQEGKDIHTQTASWMFGLSAEAIDPLMRRAAKTINFGVLYGMSAFRLSQELGIPYEEAQAFIQKYFQSYPKVKAWIEKTLEEGRTRGYVETLFGRRRYVPDLNARVKGKREAAERMAFNMPVQGTAADLMKLAMVRLFPQLREVGARMLLQVHDELLLEAPKERAEEVAALAKEVMEGVWPLAVPLEVEVGIGEDWLAAKG

SEQ ID NO: 3319 - DNA, 2523 bp, synthetic construct
  misc_feature 1..2523: note = Variant of DNA polymerase I from Thermus sp. strain 2.9
  source 1..2523: mol_type = other DNA
atgcaccatcatcatcatcatggcggtagcggcgtgttaccggtgttcgagcctaaaggtcgcgtgcttctggttgatggccatcatctcgcgtatcgtaacttctttgccctgaaaggattaaccaccagcagcggcgagccggtacagggtgtctacggctttgcaaagtcgctcctgaaagctctgaaagaagacggtgatgtggtgattgttgtctttgatgcgaaagcgccaagttttcgccacgaagcgtacgaagcttacaaagccgggcgtgctccaacgccggaagactttcctcgccaattggcgcttatgaaggaattagtggatttgcttggcctcgaacgcttggaagttcccggtttcgaggcagacgacgtattagcgactctcgcaaagaaagccgaacgtgagggctatgaagtccagatcttgacagcagatcgcgatcttttccagcttttatctccgcgcatctcggtgttacacccggaagggcatcgtatcaccccggaatggctctgggagaaatatggtttgcgtcccgaacaatgggtggattttcgcgccttagcaggcgatccgagcgacaatattccgggagttaaaggtatcggcgagaagacggcgctcaagctccttaaagaatgggggtcgttggagaacttgcttaagaatttagatcaggtcaaaccagagtcagtgcgtgagaagattcttgctcacctcgaagacctcaaattaagccgcgaattgtcccgtgtacgcaccgatttgccgctcgaagttgatttccaacgccgccgcgaacctgactgggagggtcttaaagcgtttttagagcgtcttgaatttggttcgctcttgcatgaattcggccttttagaaagcccgttaccagccgaagaagcaccttggccaccgcccgagggcgcgtttttaggttaccgtttgagtcgcccggaaccgatgtgggccgaattactggctcttgcagcgtctgcccagggacgtgtgtatcgcgcggaagaccctcatggtgcgctccgcggcctcttcgaagtccgtggactccttgccaaagacttagctgttgttgcattgcgcgaaggtcttgatttacctccgactgatgatccaatgcttcttgcgtacctcttggacccgtcaaacacgacgcccgaaggcgtagcccgtcgttacggcggcgagtggaccgaagatgcagcgaaacgcgcgttattggccgaacgtttgcacgccaatttattaggacgtttgcaaggcgaggaacgtctcctctggctttacgaagaagtggagaaaccattgagtcgcgtgctcgcgcatatggaagctaccggtgtcaaattagacgtggcgtatttggagaatctcagccttgaagttgctgcccacatgcgccgcttggaggaagaagtattccgtttagcaggccgttcctttcgccttaattctcgcgatcagttagaacgtgtgttgttcgatgaacttggtctccctcctatcggcaagacagagaagaccggtaaacgtagcacttcagcggcggttttagaagctcttcgcgaagtccatcccattgtggacaagatcttgcaataccgcgaactcgcgaaattgaaaggcacctatattgaccgtcttccggcattagtccacccgaaaacgggacgcctccatacccgcttcaaccaaacagccacggcgaccggtcgtttgtcctcctctgatccaaaccttcagaatattccagtacgtaccccattgggccagaagatccgccgtgcgtttgtagctgaggagggttggcgtttagtggccctcgattatagccaaattgaattacgtgtccttgcccatctttctggcgatgagaacctcatccgcgtgtttcaggaaggcaaagacattcacactcaaacggcaagctggatgtttggattatcagctgaagcgatcgatcctttgatgcgtcgtgcagcgaagaccatcaatttcggtgttctctacggtatgagtgcctttcgtttgtcgcaggaattaggcattccctatgaagaagctcaggcgttcattcagaaatactttcaaagctatcccaaagttaaagcatggatcgagaagactctcgaagaaggccgcacacgtggttacgtagagaccttatttggacgtcgccgctatgttcccgatttaaacgctcgcgtgaaaggcaagcgtgaagccgccgaacgcatggcgttcaacatgcctgtacagggcacggcagctgacctcatgaaacttgcaatggtgcgcctttttccacaattgcgtgaagttggtgcccgcatgctcttgcaggtccacgatgaactcttgttagaagcgccaaaagagcgtgcggaagaggtggcaaatctcgcgaaagaagttatggaaggcgtgtggcccttagcggtgcctcttgaagtcgaagttggtattggcgaggattggctggctgccaaagga

SEQ ID NO: 3320 - protein, 841 aa, synthetic construct
  REGION 1..841: note = Variant of DNA polymerase I from Thermus sp. strain 2.9
MHHHHHHGGSGVLPVFEPKGRVLLVDGHHLAYRNFFALKGLTTSSGEPVQGVYGFAKSLLKALKEDGDVVIVVFDAKAPSFRHEAYEAYKAGRAPTPEDFPRQLALMKELVDLLGLERLEVPGFEADDVLATLAKKAEREGYEVQILTADRDLFQLLSPRISVLHPEGHRITPEWLWEKYGLRPEQWVDFRALAGDPSDNIPGVKGIGEKTALKLLKEWGSLENLLKNLDQVKPESVREKILAHLEDLKLSRELSRVRTDLPLEVDFQRRREPDWEGLKAFLERLEFGSLLHEFGLLESPLPAEEAPWPPPEGAFLGYRLSRPEPMWAELLALAASAQGRVYRAEDPHGALRGLFEVRGLLAKDLAVVALREGLDLPPTDDPMLLAYLLDPSNTTPEGVARRYGGEWTEDAAKRALLAERLHANLLGRLQGEERLLWLYEEVEKPLSRVLAHMEATGVKLDVAYLENLSLEVAAHMRRLEEEVFRLAGRSFRLNSRDQLERVLFDELGLPPIGKTEKTGKRSTSAAVLEALREVHPIVDKILQYRELAKLKGTYIDRLPALVHPKTGRLHTRFNQTATATGRLSSSDPNLQNIPVRTPLGQKIRRAFVAEEGWRLVALDYSQIELRVLAHLSGDENLIRVFQEGKDIHTQTASWMFGLSAEAIDPLMRRAAKTINFGVLYGMSAFRLSQELGIPYEEAQAFIQKYFQSYPKVKAWIEKTLEEGRTRGYVETLFGRRRYVPDLNARVKGKREAAERMAFNMPVQGTAADLMKLAMVRLFPQLREVGARMLLQVHDELLLEAPKERAEEVANLAKEVMEGVWPLAVPLEVEVGIGEDWLAAKG

SEQ ID NO: 3321 - DNA, 2523 bp, synthetic construct
  misc_feature 1..2523: note = Variant of DNA polymerase I from Thermus sp. strain 2.9
  source 1..2523: mol_type = other DNA
atgcaccatcatcatcatcatggcggtagcggcgtgttaccggtgttcgagcctaaaggtcgcgtgcttctggttgatggccatcatctcgcgtatcgtaacttctttgccctgaaaggattaaccaccagcagcggcgagccggtacagggtgtctacggctttgcaaagtcgctcctgaaagctctgaaagaagacggtgatgtggtgattgttgtctttgatgcgaaagcgccaagttttcgccacgaagcgtacgaagcttacaaagccgggcgtgctccaacgccggaagactttcctcgccaattggcgcttatgaaggaattagtggatttgcttggcctcgaacgcttggaagttcccggtttcgaggcagacgacgtattagcgactctcgcaaagaaagccgaacgtgagggctatgaagtccagatcttgacagcagatcgcgatcttttccagcttttatctccgcgcatctcggtgttacacccggaagggcatcgtatcaccccggaatggctctgtgagaaatatggtttgcgtcccgaacaatgggtggattttcgcgccttagcaggcgatccgagcgacaatattccgggagttaaaggtatcggcgagaagacggcgctcaagctccttaaagaatgggggtcgttggagaacttgcttaagaatttagatcaggtcaaaccagagtcagtgcgtgagaagattcttgctcacctcgaagacctcaaattaagccgcgaattgtcccgtgtacgcaccgatttgccgctcgaagttgatttccaacgccgccgcgaacctgactgggagggtcttaaagcgtttttagagcgtcttgaatttggttcgctcttgcatgaattcggccttttagaaagcccgttaccagccgaagaagcaccttggccaccgcccgagggcgcgtttttaggttaccgtttgagtcgcccggaaccgatgtgggccgaattactggctcttgcagcgtctgcccagggacgtgtgtatcgcgcggaagaccctcatggtgcgctccgcggcctcttcgaagtccgtggactccttgccaaagacttagctgttgttgcattgcgcgaaggtcttgatttacctccgactgatgatccaatgcttcttgcgtacctcttggacccgtcaaacacgacgcccgaaggcgtagcccgtcgttacggcggcgagtggaccgaagatgcagcgaaacgcgcgttattggccgaacgtttgcacgccaatttattaggacgtttgcaaggcgaggaacgtctcctctggctttacgaagaagtggagaaaccattgagtcgcgtgctcgcgcatatggaagctaccggtgtcaaattagacgtggcgtatttggagaatctcagccttgaagttgctgcccacatgcgccgcttggaggaagaagtattccgtttagcaggccgttcctttcgccttaattctcgcgatcagttagaacgtgtgttgttcgatgaacttggtctccctcctatcggcaagacagagaagaccggtaaacgtagcacttcagcggcggttttagaagctcttcgcgaagtccatcccattgtggacaagatcttgcaataccgcgaactcgcgaaattgaaaggcacctatattgaccgtcttccggcattagtccacccgaaaacgggacgcctccatacccgcttcaaccaaacagccacggcgaccggtcgtttgtcctcctctgatccaaaccttcagaatattccagtacgtaccccattgggccagaagatccgccgtgcgtttgtagctgaggagggttggcgtttagtggccctcgattatagccaaattgaattacgtgtccttgcccatctttctggcgatgagaacctcatccgcgtgtttcaggaaggcaaagacattcacactcaaacggcaagctggatgtttggattatcagctgaagcgatcgatcctttgatgcgtcgtgcagcgaagaccatcaatttcggtgttctctacggtatgagtgcctttcgtttgtcgcaggaattaggcattccctatgaagaagctcaggcgttcattcagaaatactttcaaagctatcccaaagttaaagcatggatcgagaagactctcgaagaaggccgcacacgtggttacgtagagaccttatttggacgtcgccgctatgttcccgatttaaacgctcgcgtgaaaggcaagcgtgaagccgccgaacgcatggcgttcaacatgcctgtacagggcacggcagctgacctcatgaaacttgcaatggtgcgcctttttccacaattgcgtgaagttggtgcccgcatgctcttgcaggtccacgatgaactcttgttagaagcgccaaaagagcgtgcggaagaggtggcagccctcgcgaaagaagttatggaaggcgtgtggcccttagcggtgcctcttgaagtcgaagttggtattggcgaggattggctggctgccaaagga

SEQ ID NO: 3322 - protein, 841 aa, synthetic construct
  REGION 1..841: note = Variant of DNA polymerase I from Thermus sp. strain 2.9
MHHHHHHGGSGVLPVFEPKGRVLLVDGHHLAYRNFFALKGLTTSSGEPVQGVYGFAKSLLKALKEDGDVVIVVFDAKAPSFRHEAYEAYKAGRAPTPEDFPRQLALMKELVDLLGLERLEVPGFEADDVLATLAKKAEREGYEVQILTADRDLFQLLSPRISVLHPEGHRITPEWLCEKYGLRPEQWVDFRALAGDPSDNIPGVKGIGEKTALKLLKEWGSLENLLKNLDQVKPESVREKILAHLEDLKLSRELSRVRTDLPLEVDFQRRREPDWEGLKAFLERLEFGSLLHEFGLLESPLPAEEAPWPPPEGAFLGYRLSRPEPMWAELLALAASAQGRVYRAEDPHGALRGLFEVRGLLAKDLAVVALREGLDLPPTDDPMLLAYLLDPSNTTPEGVARRYGGEWTEDAAKRALLAERLHANLLGRLQGEERLLWLYEEVEKPLSRVLAHMEATGVKLDVAYLENLSLEVAAHMRRLEEEVFRLAGRSFRLNSRDQLERVLFDELGLPPIGKTEKTGKRSTSAAVLEALREVHPIVDKILQYRELAKLKGTYIDRLPALVHPKTGRLHTRFNQTATATGRLSSSDPNLQNIPVRTPLGQKIRRAFVAEEGWRLVALDYSQIELRVLAHLSGDENLIRVFQEGKDIHTQTASWMFGLSAEAIDPLMRRAAKTINFGVLYGMSAFRLSQELGIPYEEAQAFIQKYFQSYPKVKAWIEKTLEEGRTRGYVETLFGRRRYVPDLNARVKGKREAAERMAFNMPVQGTAADLMKLAMVRLFPQLREVGARMLLQVHDELLLEAPKERAEEVAALAKEVMEGVWPLAVPLEVEVGIGEDWLAAKG

SEQ ID NO: 3323 - DNA, 2523 bp, synthetic construct
  misc_feature 1..2523: note = Variant of DNA polymerase I from Thermus sp. strain 2.9
  source 1..2523: mol_type = other DNA
atgcaccatcatcattttcatggcggtagcggcgtgttaccggtgttcgagcctaaaggtcgcgtgcttctggttgatggccatcatctcgcgtatcgtaacttctttgccctgaaaggattaaccaccagcagcggcgagccggtacagggtgtctacggctttgcaaagtcgctcctgaaagctctgaaagaagacggtgatgtggtgattgttgtctttgatgcgaaagcgccaagttttcgccacgaagcgtacgaagcttacaaagccgggcgtgctccaacgccggaagactttcctcgccaattggcgcttatgaaggaattagtggatttgcttggcctcgaacgcttggaagttcccggtttcgaggcagacgacgtattagcgactctcgcaaagaaagccgaacgtgagggctatgaagtccagatcttgacagcagatcgcgatcttttccagcttttatctccgcgcatctcggtgttacacccggaagggcatcgtatcaccccggaatggctctgggagaaatatggtttgcgtcccgaacaatgggtggattttcgcgccttagcaggcgatccgagcgacaatattccgggagttaaaggtatcggcgagaagacggcgctcaagctccttaaagaatgggggtcgttggagaacttgcttaagaatttagatcaggtcaaaccagagtcagtgcgtgagaagattcttgctcacctcgaagacctcaaattaagccgcgaattgtcccgtgtacgcaccgatttgccgctcgaagttgatttccaacgccgccgcgaacctgactgggagggtcttaaagcgtttttagagcgtcttgaatttggttcgctcttgcatgaattcggccttttagaaagcccgttaccagccgaagaagcaccttggccaccgcccgagggcgcgtttttaggttaccgtttgagtcgcccggaaccgatgtgggccgaattactggctcttgcagcgtctgcccagggacgtgtgtatcgcgcggaagaccctcatggtgcgctccgcggcctcttcgaagtccgtggactccttgccaaagacttagctgttgttgcattgcgcgaaggtcttgatttacctccgactgatgatccaatgcttcttgcgtacctcttggacccgtcaaacacgacgcccgaaggcgtagcccgtcgttacggcggcgagtggaccgaagatgcagcgaaacgcgcgttattggccgaacgtttgcacgccaatttattaggacgtttgcaaggcgaggaacgtctcctctggctttacgaagaagtggagaaaccattgagtcgcgtgctcgcgcatatggaagctaccggtgtcaaattagacgtggcgtatttggagaatctcagccttgaagttgctgcccacatgcgccgcttggaggaagaagtattccgtttagcaggccgttcctttcgccttaattctcgcgatcagttagaacgtgtgttgttcgatgaacttggtctccctcctatcggcaagacagagaagaccggtaaacgtagcacttcagcggcggttttagaagctcttcgcgaagtccatcccattgtggacaagatcttgcaataccgcgaactcgcgaaattgaaaggcacctatattgaccgtcttccggcattagtccacccgaaaacgggacgcctccatacccgcttcaaccaaacagccacggcgaccggtcgtttgtcctcctctgatccaaaccttcagaatattccagtacgtaccccattgggccagaagatccgccgtgcgtttgtagctgaggagggttggcgtttagtggccctcgattatagccaaattgaattacgtgtccttgcccatctttctggcgatgagaacctcatccgcgtgtttcaggaaggcaaagacattcacactcaaacggcaagctggatgtttggattatcagctgaagcgatcgatcctttgatgcgtcgtgcagcgaagaccatcaatttcggtgttctctacggtatgagtgcctttcgtttgtcgcaggaattaggcattccctatgaagaagctcaggcgttcattcagaaatactttcaaagctatcccaaagttaaagcatggatcgagaagactctcgaagaaggccgcacacgtggttacgtagagaccttatttggacgtcgccgctatgttcccgatttaaacgctcgcgtgaaaggcaagcgtgaagccgccgaacgcatggcgttcaacatgcctgtacagggcacggcagctgacctcatgaaacttgcaatggtgcgcctttttccacaattgcgtgaagttggtgcccgcatgctcttgcaggtccacgatgaactcttgttagaagcgccaaaagagcgtgcggaagaggtggcagccctcgcgaaagaagttatggaaggcgtgtggcccttagcggtgcctcttgaagtcgaagttggtattggcgaggattggctggctgccaaagga

SEQ ID NO: 3324 - protein, 841 aa, synthetic construct
  REGION 1..841: note = Variant of DNA polymerase I from Thermus sp. strain 2.9
MHHHHFHGGSGVLPVFEPKGRVLLVDGHHLAYRNFFALKGLTTSSGEPVQGVYGFAKSLLKALKEDGDVVIVVFDAKAPSFRHEAYEAYKAGRAPTPEDFPRQLALMKELVDLLGLERLEVPGFEADDVLATLAKKAEREGYEVQILTADRDLFQLLSPRISVLHPEGHRITPEWLWEKYGLRPEQWVDFRALAGDPSDNIPGVKGIGEKTALKLLKEWGSLENLLKNLDQVKPESVREKILAHLEDLKLSRELSRVRTDLPLEVDFQRRREPDWEGLKAFLERLEFGSLLHEFGLLESPLPAEEAPWPPPEGAFLGYRLSRPEPMWAELLALAASAQGRVYRAEDPHGALRGLFEVRGLLAKDLAVVALREGLDLPPTDDPMLLAYLLDPSNTTPEGVARRYGGEWTEDAAKRALLAERLHANLLGRLQGEERLLWLYEEVEKPLSRVLAHMEATGVKLDVAYLENLSLEVAAHMRRLEEEVFRLAGRSFRLNSRDQLERVLFDELGLPPIGKTEKTGKRSTSAAVLEALREVHPIVDKILQYRELAKLKGTYIDRLPALVHPKTGRLHTRFNQTATATGRLSSSDPNLQNIPVRTPLGQKIRRAFVAEEGWRLVALDYSQIELRVLAHLSGDENLIRVFQEGKDIHTQTASWMFGLSAEAIDPLMRRAAKTINFGVLYGMSAFRLSQELGIPYEEAQAFIQKYFQSYPKVKAWIEKTLEEGRTRGYVETLFGRRRYVPDLNARVKGKREAAERMAFNMPVQGTAADLMKLAMVRLFPQLREVGARMLLQVHDELLLEAPKERAEEVAALAKEVMEGVWPLAVPLEVEVGIGEDWLAAKG

SEQ ID NO: 3325 - DNA, 2523 bp, synthetic construct
  misc_feature 1..2523: note = Variant of DNA polymerase I from Thermus sp. strain 2.9
  source 1..2523: mol_type = other DNA
atgcaccatcatcatcatcatggcggtagcggcgtgttaccggtgttcgagcctaaaggtcgcgtgcttctggttgatggccatcatctcgcgtatcgtaacttctttgccctgaaaggattaaccaccagcagcggcgagccggtacagggtgtctacggctttgcaaagtcgctcctgaaagctctgaaagaagacggtgatgtggtgattgttgtctttgatgcgaaagcgccaagttttcgccacgaagcgtacgaagcttacaaagccgggcgtgctccaacgccggaagactttcctcgccaattggcgcttatgaaggaattagtggatttgcttggcctcgaacgcttggaagttcccggtttcgaggcagacgacgtattagcgactctcgcaaagaaagccgaacgtgagggctatgaagtccagatcttgacagcagatcgcgatcttttccagcttttatctccgcgcatctcggtgttacacccggaagggcatcgtatcaccccggaatggctctgggagaaatatggtttgcgtcccgaacaatgggtggattttcgcgccttagcaggcgatccgagcgacaatattccgggagttaaaggtatcggcgagaagacggcgctcaagctccttaaagaatgggggtcgttggagaacttgcttaagaatttagatcaggtcaaaccagagtcagtgcgtgagaagattcttgctcacctcgaagacctcaaattaagccgcgaattgtcccgtgtacgcaccgatttgccgctcgaagttgatttccaacgccgccgcgaacctgactgggagggtcttaaagcgtttttagagcgtcttgaatttggttcgctcttgcatgaattcggccttttagaaagcccgttaccagccgaagaagcaccttggccaccgcccgagggcgcgtttttaggttaccgtttgagtcgcccggaaccgatgtgggccgaattactggctcttgcagcgtctgcccagggacgtgtgtatcgcgcggaagaccctcatggtgcgctccgcggcctcttcgaagtccgtggactccttgccaaagacttagctgttgttgcattgcgcgaaggtcttgatttacctccgactgatgatccaatgcttcttgcgtacctcttggacccgtcaaacacgacgcccgaaggcgtagcccgtcgttacggcggcgagtggaccgaagatgcagcgaaacgcgcgttattggccgaacgtttgcacgccaatttattaggacgtttgcaaggcgaggaacgtctcctctggctttacgaagaagtggagaaaccattgagtcgcgtgctcgcgcatatggaagctaccggtgtcaaattagacgtggcgtatttggagaatctcagccttgaagttgctgcccacatgcgccgcttggaggaagaagtattccgtttagcaggccgttcctttcgccttaattctcgcgatcagttagaacgtgtgttgttcgatgaacttggtctccctcctatcggcaagacagagaagaccggtaaacgtagcacttcagcggcggttttagaagctcttcgcgaagtccatcccattgtggacaagatcttgcaataccgcgaactcgcgaaattgaaaggcacctatattgaccgtcttccggcattagtccacccgaaaacgggacgcctccatacccgcttcaaccaaacagccacggcgaccggtcgtttgtcctcctctgatccaaaccttcagaatattccagtacgtaccccattgggctctaagatccgccgtgcgtttgtagctgaggagggttggcgtttagtggccctcgattatagccaaattgaattacgtgtccttgcccatctttctggcgatgagaacctcatccgcgtgtttcaggaaggcaaagacattcacactcaaacggcaagctggatgtttggattatcagctgaagcgatcgatcctttgatgcgtcgtgcagcgaagaccatcaatttcggtgttctctacggtatgagtgcctttcgtttgtcgcaggaattaggcattccctatgaagaagctcaggcgttcattcagaaatactttcaaagctatcccaaagttaaagcatggatcgagaagactctcgaagaaggccgcacacgtggttacgtagagaccttatttggacgtcgccgctatgttcccgatttaaacgctcgcgtgaaaggcaagcgtgaagccgccgaacgcatggcgttcaacatgcctgtacagggcacggcagctgacctcatgaaacttgcaatggtgcgcctttttccacaattgcgtgaagttggtgcccgcatgctcttgcaggtccacgatgaactcttgttagaagcgccaaaagagcgtgcggaagaggtggcagccctcgcgaaagaagttatggaaggcgtgtggcccttagcggtgcctcttgaagtcgaagttggtattggcgaggattggctggctgccaaagga

SEQ ID NO: 3326 - protein, 841 aa, synthetic construct
  REGION 1..841: note = Variant of DNA polymerase I from Thermus sp. strain 2.9
MHHHHHHGGSGVLPVFEPKGRVLLVDGHHLAYRNFFALKGLTTSSGEPVQGVYGFAKSLLKALKEDGDVVIVVFDAKAPSFRHEAYEAYKAGRAPTPEDFPRQLALMKELVDLLGLERLEVPGFEADDVLATLAKKAEREGYEVQILTADRDLFQLLSPRISVLHPEGHRITPEWLWEKYGLRPEQWVDFRALAGDPSDNIPGVKGIGEKTALKLLKEWGSLENLLKNLDQVKPESVREKILAHLEDLKLSRELSRVRTDLPLEVDFQRRREPDWEGLKAFLERLEFGSLLHEFGLLESPLPAEEAPWPPPEGAFLGYRLSRPEPMWAELLALAASAQGRVYRAEDPHGALRGLFEVRGLLAKDLAVVALREGLDLPPTDDPMLLAYLLDPSNTTPEGVARRYGGEWTEDAAKRALLAERLHANLLGRLQGEERLLWLYEEVEKPLSRVLAHMEATGVKLDVAYLENLSLEVAAHMRRLEEEVFRLAGRSFRLNSRDQLERVLFDELGLPPIGKTEKTGKRSTSAAVLEALREVHPIVDKILQYRELAKLKGTYIDRLPALVHPKTGRLHTRFNQTATATGRLSSSDPNLQNIPVRTPLGSKIRRAFVAEEGWRLVALDYSQIELRVLAHLSGDENLIRVFQEGKDIHTQTASWMFGLSAEAIDPLMRRAAKTINFGVLYGMSAFRLSQELGIPYEEAQAFIQKYFQSYPKVKAWIEKTLEEGRTRGYVETLFGRRRYVPDLNARVKGKREAAERMAFNMPVQGTAADLMKLAMVRLFPQLREVGARMLLQVHDELLLEAPKERAEEVAALAKEVMEGVWPLAVPLEVEVGIGEDWLAAKG

SEQ ID NO: 3327 - DNA, 2523 bp, synthetic construct
  misc_feature 1..2523: note = Variant of DNA polymerase I from Thermus sp. strain 2.9
  source 1..2523: mol_type = other DNA
atgcaccatcatcatcatcatggcggtagcggcgtgttaccggtgttcgagcctaaaggtcgcgtgcttctggttgatggccatcatctcgcgtatcgtaacttctttgccctgaaaggattaaccaccagcagcggcgagccggtacagggtgtctacggctttgcaaagtcgctcctgaaagctctgaaagaagacggtgatgtggtgattgttgtctttgatgcgaaagcgccaagttttcgccacgaagcgtacgaagcttacaaagccgggcgtgctccaacgccggaagactttcctcgccaattggcgcttatgaaggaattagtggatttgcttggcctcgaacgcttggaagttcccggtttcgaggcagacgacgtattagcgactctcgcaaagaaagccgaacgtgagggctatgaagtccagatcttgacagcagatcgcgatcttttccagcttttatctccgcgcatctcggtgttacacccggaagggcatcgtatcaccccggaatggctctgggagaaatatggtttgcgtcccgaacaatgggtggattttcgcgccttagcaggcgatccgagcgacaatattccgggagttaaaggtatcggcgagaagacggcgctcaagctccttaaagaatgggggtcgttggagaacttgcttaagaatttagatcaggtcaaaccagagtcagtgcgtgagaagattcttgctcacctcgaagacctcaaattaagccgcgaattgtcccgtgtacgcaccgatttgccgctcgaagttgatttccaacgccctcgcgaacctgactgggagggtcttaaagcgtttttagagcgtcttgaatttggttcgctcttgcatgaattcggccttttagaaagcccgttaccagccgaagaagcaccttggccaccgcccgagggcgcgtttttaggttaccgtttgagtcgcccggaaccgatgtgggccgaattactggctcttgcagcgtctgcccagggacgtgtgtatcgcgcggaagaccctcatggtgcgctccgcggcctcttcgaagtccgtggactccttgccaaagacttagctgttgttgcattgcgcgaaggtcttgatttacctccgactgatgatccaatgcttcttgcgtacctcttggacccgtcaaacacgacgcccgaaggcgtagcccgtcgttacggcggcgagtggaccgaagatgcagcgaaacgcgcgttattggccgaacgtttgcacgccaatttattaggacgtttgcaaggcgaggaacgtctcctctggctttacgaagaagtggagaaaccattgagtcgcgtgctcgcgcatatggaagctaccggtgtcaaattagacgtggcgtatttggagaatctcagccttgaagttgctgcccacatgcgccgcttggaggaagaagtattccgtttagcaggccgttcctttcgccttaattctcgcgatcagttagaacgtgtgttgttcgatgaacttggtctccctcctatcggcaagacagagaagaccggtaaacgtagcacttcagcggcggttttagaagctcttcgcgaagtccatcccattgtggacaagatcttgcaataccgcgaactcgcgaaattgaaaggcacctatattgaccgtcttccggcattagtccacccgaaaacgggacgcctccatacccgcttcaaccaaacagccacggcgaccggtcgtttgtcctcctctgatccaaaccttcagaatattccagtacgtaccccattgggccagaagatccgccgtgcgtttgtagctgaggagggttggcgtttagtggccctcgattatagccaaattgaattacgtgtccttgcccatctttctggcgatgagaacctcatccgcgtgtttcaggaaggcaaagacattcacactcaaacggcaagctggatgtttggattatcagctgaagcgatcgatcctttgatgcgtcgtgcagcgaagaccatcaatttcggtgttctctacggtatgagtgcctttcgtttgtcgcaggaattaggcattccctatgaagaagctcaggcgttcattcagaaatactttcaaagctatcccaaagttaaagcatggatcgagaagactctcgaagaaggccgcacacgtggttacgtagagaccttatttggacgtcgccgctatgttcccgatttaaacgctcgcgtgaaaggcaagcgtgaagccgccgaacgcatggcgttcaacatgcctgtacagggcacggcagctgacctcatgaaacttgcaatggtgcgcctttttccacaattgcgtgaagttggtgcccgcatgctcttgcaggtccacgatgaactcttgttagaagcgccaaaagagcgtgcggaagaggtggcagccctcgcgaaagaagttatggaaggcgtgtggcccttagcggtgcctcttgaagtcgaagttggtattggcgaggattggctggctgccaaagga

SEQ ID NO: 3328 - protein, 841 aa, synthetic construct
  REGION 1..841: note = Variant of DNA polymerase I from Thermus sp. strain 2.9
MHHHHHHGGSGVLPVFEPKGRVLLVDGHHLAYRNFFALKGLTTSSGEPVQGVYGFAKSLLKALKEDGDVVIVVFDAKAPSFRHEAYEAYKAGRAPTPEDFPRQLALMKELVDLLGLERLEVPGFEADDVLATLAKKAEREGYEVQILTADRDLFQLLSPRISVLHPEGHRITPEWLWEKYGLRPEQWVDFRALAGDPSDNIPGVKGIGEKTALKLLKEWGSLENLLKNLDQVKPESVREKILAHLEDLKLSRELSRVRTDLPLEVDFQRPREPDWEGLKAFLERLEFGSLLHEFGLLESPLPAEEAPWPPPEGAFLGYRLSRPEPMWAELLALAASAQGRVYRAEDPHGALRGLFEVRGLLAKDLAVVALREGLDLPPTDDPMLLAYLLDPSNTTPEGVARRYGGEWTEDAAKRALLAERLHANLLGRLQGEERLLWLYEEVEKPLSRVLAHMEATGVKLDVAYLENLSLEVAAHMRRLEEEVFRLAGRSFRLNSRDQLERVLFDELGLPPIGKTEKTGKRSTSAAVLEALREVHPIVDKILQYRELAKLKGTYIDRLPALVHPKTGRLHTRFNQTATATGRLSSSDPNLQNIPVRTPLGQKIRRAFVAEEGWRLVALDYSQIELRVLAHLSGDENLIRVFQEGKDIHTQTASWMFGLSAEAIDPLMRRAAKTINFGVLYGMSAFRLSQELGIPYEEAQAFIQKYFQSYPKVKAWIEKTLEEGRTRGYVETLFGRRRYVPDLNARVKGKREAAERMAFNMPVQGTAADLMKLAMVRLFPQLREVGARMLLQVHDELLLEAPKERAEEVAALAKEVMEGVWPLAVPLEVEVGIGEDWLAAKG

SEQ ID NO: 3329 - DNA, 2523 bp, synthetic construct
  misc_feature 1..2523: note = Variant of DNA polymerase I from Thermus sp. strain 2.9
  source 1..2523: mol_type = other DNA
atgcaccatcatcatcatcatggcggtagcggcgtgttaccggtgttcgagcctaaaggtcgcgtgcttctggttgatggccatcatctcgcgtatcgtaacttctttgccctgaaaggattaaccaccagcagcggcgagccggtacagggtgtctacggctttgcaaagtcgctcctgaaagctctgaaagaagacggtgatgtggtgattgttgtctttgatgcgaaagcgccaagttttcgccacgaagcgtacgaagcttacaaagccgggcgtgctccaacgccggaagactttcctcgccaattggcgcttatgaaggaattagtggatttgcttggcctcgaacgcttggaagttcccggtttcgaggcagacgacgtattagcgactctcgcaaagaaagccgaacgtgagggctatgaagtccagatcttgacagcagatcgcgatcttttccagcttttatctccgcgcatctcggtgttacacccggaagggcatcgtatcaccccggaatggctctgggagaaatatggtttgcgtcccgaacaatgggtggattttcgcgccttagcaggcgatccgagcgacaatattccgggagttaaaggtatcggcgagaagacggcgctcaagctccttaaagaatgggggtcgttggagaacttgcttaagaatttagatcaggtcaaaccagagtcagtgcgtgagaagattcttgctcacctcgaagacctcaaattaagccgcgaattgtcccgtgtacgcaccgatttgccgctcgaagttgatttccaacgccgccgcgaacctgactgggagggtcttaaagcgtttttagagcgtcttgaatttggttcgctcttgcatgaattcggccttttagaaagcccgttaccagccgaagaagcaccttggccaccgcccgagagtgcgtttttaggttaccgtttgagtcgcccggaaccgatgtgggccgaattactggctcttgcagcgtctgcccagggacgtgtgtatcgcgcggaagaccctcatggtgcgctccgcggcctcttcgaagtccgtggactccttgccaaagacttagctgttgttgcattgcgcgaaggtcttgatttacctccgactgatgatccaatgcttcttgcgtacctcttggacccgtcaaacacgacgcccgaaggcgtagcccgtcgttacggcggcgagtggaccgaagatgcagcgaaacgcgcgttattggccgaacgtttgcacgccaatttattaggacgtttgcaaggcgaggaacgtctcctctggctttacgaagaagtggagaaaccattgagtcgcgtgctcgcgcatatggaagctaccggtgtcaaattagacgtggcgtatttggagaatctcagccttgaagttgctgcccacatgcgccgcttggaggaagaagtattccgtttagcaggccgttcctttcgccttaattctcgcgatcagttagaacgtgtgttgttcgatgaacttggtctccctcctatcggcaagacagagaagaccggtaaacgtagcacttcagcggcggttttagaagctcttcgcgaagtccatcccattgtggacaagatcttgcaataccgcgaactcgcgaaattgaaaggcacctatattgaccgtcttccggcattagtccacccgaaaacgggacgcctccatacccgcttcaaccaaacagccacggcgaccggtcgtttgtcctcctctgatccaaaccttcagaatattccagtacgtaccccattgggccagaagatccgccgtgcgtttgtagctgaggagggttggcgtttagtggccctcgattatagccaaattgaattacgtgtccttgcccatctttctggcgatgagaacctcatccgcgtgtttcaggaaggcaaagacattcacactcaaacggcaagctggatgtttggattatcagctgaagcgatcgatcctttgatgcgtcgtgcagcgaagaccatcaatttcggtgttctctacggtatgagtgcctttcgtttgtcgcaggaattaggcattccctatgaagaagctcaggcgttcattcagaaatactttcaaagctatcccaaagttaaagcatggatcgagaagactctcgaagaaggccgcacacgtggttacgtagagaccttatttggacgtcgccgctatgttcccgatttaaacgctcgcgtgaaaggcaagcgtgaagccgccgaacgcatggcgttcaacatgcctgtacagggcacggcagctgacctcatgaaacttgcaatggtgcgcctttttccacaattgcgtgaagttggtgcccgcatgctcttgcaggtccacgatgaactcttgttagaagcgccaaaagagcgtgcggaagaggtggcagccctcgcgaaagaagttatggaaggcgtgtggcccttagcggtgcctcttgaagtcgaagttggtattggcgaggattggctggctgccaaagga

SEQ ID NO: 3330 - protein, 841 aa, synthetic construct
  REGION 1..841: note = Variant of DNA polymerase I from Thermus sp. strain 2.9
MHHHHHHGGSGVLPVFEPKGRVLLVDGHHLAYRNFFALKGLTTSSGEPVQGVYGFAKSLLKALKEDGDVVIVVFDAKAPSFRHEAYEAYKAGRAPTPEDFPRQLALMKELVDLLGLERLEVPGFEADDVLATLAKKAEREGYEVQILTADRDLFQLLSPRISVLHPEGHRITPEWLWEKYGLRPEQWVDFRALAGDPSDNIPGVKGIGEKTALKLLKEWGSLENLLKNLDQVKPESVREKILAHLEDLKLSRELSRVRTDLPLEVDFQRRREPDWEGLKAFLERLEFGSLLHEFGLLESPLPAEEAPWPPPESAFLGYRLSRPEPMWAELLALAASAQGRVYRAEDPHGALRGLFEVRGLLAKDLAVVALREGLDLPPTDDPMLLAYLLDPSNTTPEGVARRYGGEWTEDAAKRALLAERLHANLLGRLQGEERLLWLYEEVEKPLSRVLAHMEATGVKLDVAYLENLSLEVAAHMRRLEEEVFRLAGRSFRLNSRDQLERVLFDELGLPPIGKTEKTGKRSTSAAVLEALREVHPIVDKILQYRELAKLKGTYIDRLPALVHPKTGRLHTRFNQTATATGRLSSSDPNLQNIPVRTPLGQKIRRAFVAEEGWRLVALDYSQIELRVLAHLSGDENLIRVFQEGKDIHTQTASWMFGLSAEAIDPLMRRAAKTINFGVLYGMSAFRLSQELGIPYEEAQAFIQKYFQSYPKVKAWIEKTLEEGRTRGYVETLFGRRRYVPDLNARVKGKREAAERMAFNMPVQGTAADLMKLAMVRLFPQLREVGARMLLQVHDELLLEAPKERAEEVAALAKEVMEGVWPLAVPLEVEVGIGEDWLAAKG

SEQ ID NO: 3331 - DNA, 2523 bp, synthetic construct
  misc_feature 1..2523: note = Variant of DNA polymerase I from Thermus sp. strain 2.9
  source 1..2523: mol_type = other DNA
atgcaccatcatcatcatcatggcggtagcggcgtgttaccggtgttcgagcctaaaggtcgcgtgcttctggttgatggccatcatctcgcgtatcgtaacttctttgccctgaaaggattaaccaccagcagcggcgagccggtacagggtgtctacggctttgcaaagtcgctcctgaaagctctgaaagaagacggtgatgtggtgattgttgtctttgatgcgaaagcgccaagttttcgccacgaagcgtacgaagcttacaaagccgggcgtgctccaacgccggaagactttcctcgccaattggcgcttatgaaggaattagtggatttgcttggcctcgaacgcttggaagttcccggtttcgaggcagacgacgtattagcgactctcgcaaagaaagccgaacgtgagggctatgaagtccagatcttgacagcagatcgcgatcttttccagcttttatctccgcgcatctcggtgttacacccggaagggcatcgtatcaccccggaatggctctgggagaaatatggtttgcgtcccgaacaatgggtggattttcgcgccttagcaggcgatccgagcgacaatattccgggagttaaaggtatcggcgagaagacggcgctcaagctccttaaagaatgggggtcgttggagaacttgcttaagaatttagatcaggtcaaaccagagtcagtgcgtgagaagattcttgctcacctcgaagacctcaaattaagccgcgaattgtcccgtgtacgcaccgatttgccgctcgaagttgatttccaacgccgccgcgaacctgactgggagggtcttaaagcgtttttagagcgtcttgaatttggttcgctcttgcatgaattcggccttttagaaagcccgttaccagccgaagaagcaccttggccaccgcccgagggcgcgtttttaggttaccgtttgagtcgcccggaaccgatgtgggccgaattactggctcttgcagcgtctgcccagggacgtgtgtatcgcgcggaagaccctcatggtgcgctccgcggcctcttcgaagtccgtggactccttgccaaagacttagctgttgttgcattgcgcgaaggtcttgatttacctccgactgatgatccaatgcttcttgcgtacctcttggacccgtcaaacacgacgcccgaaggcgtagcccgtcgttacggcggcgagtggaccgaagatgcagcgaaacgcgcgttattggccgaacgtttgcacgccaatttattaggacgtttgcaaggcgaggaacgtctcctctggctttacgaagaagtggagaaaccattgagtcgcgtgctcgcgcatatggaagctaccggtgtcaaattagacgtggcgtatttggagaatctcagccttgaagttgctgcccacatgcgccgcttggaggaagaagtattccgtttagcaggccgttcctttcgccttaattctcgcgatcagttagaacgtgtgttgttcgatgaacttggtctccctcctatcggcaagacagagaagaccggtaaacgtagcacttcagcggcggttttagaagctcttcgcgaagtccatcccattgtggacaagatcttgcaataccgcgaactcgcgaaattgaaaggcacctatattgaccgtcttccggcattagtccacccgaaaacgggacgcctccatacccgcttcaaccaaacagccacggcgaccggtcgtttgtcctcctctgatccaaaccttcagaatattccagtacgtaccccattgggccagaagatccgccgtgcgtttgtagctgaggagggttggcgtttagtggccctcgattatagccaaattgaattacgtgtccttgcccatctttctggcgatgagaacctcatccgcgtgtttcaggaaggcaaagacattcacactcaaacggcaagctggatgtttggattatcagctgaagcgatcgatcctttgatgcgtcgtgcagcgaagaccatcaatttcggtgttctctacggtatgagtgcctttcgtttgtcgcaggaattaggcattccctatgaagaagctcaggcgttcattcagaaatactttcaaagctatcccaaagttaaagcatggatcgagaagactctcgaagaaggccgcacacgtggttacgtagagaccttatttggacgtcgccgctatgttcccgatttaaacgctcgcgtgaaaggcaagcgtgaagccgccgaacgcatggcgttcaacatgcctgtacagggcacggcagctgacctcatgaaacttgcaatggtgcgcctttttccacaattgcgtgaagttggtgcccgcatgctcttgcaggtccacgatgaactcttgttagaagcgccaaaagagcgtgcggaagaggtggcagccctcgcgaaagaagttatggaaggcgtgtggcccttagcggtgcctcttgaagtcgaagttggttatggcgaggattggctggctgccaaagga

SEQ ID NO: 3332 - protein, 841 aa, synthetic construct
  REGION 1..841: note = Variant of DNA polymerase I from Thermus sp. strain 2.9
MHHHHHHGGSGVLPVFEPKGRVLLVDGHHLAYRNFFALKGLTTSSGEPVQGVYGFAKSLLKALKEDGDVVIVVFDAKAPSFRHEAYEAYKAGRAPTPEDFPRQLALMKELVDLLGLERLEVPGFEADDVLATLAKKAEREGYEVQILTADRDLFQLLSPRISVLHPEGHRITPEWLWEKYGLRPEQWVDFRALAGDPSDNIPGVKGIGEKTALKLLKEWGSLENLLKNLDQVKPESVREKILAHLEDLKLSRELSRVRTDLPLEVDFQRRREPDWEGLKAFLERLEFGSLLHEFGLLESPLPAEEAPWPPPEGAFLGYRLSRPEPMWAELLALAASAQGRVYRAEDPHGALRGLFEVRGLLAKDLAVVALREGLDLPPTDDPMLLAYLLDPSNTTPEGVARRYGGEWTEDAAKRALLAERLHANLLGRLQGEERLLWLYEEVEKPLSRVLAHMEATGVKLDVAYLENLSLEVAAHMRRLEEEVFRLAGRSFRLNSRDQLERVLFDELGLPPIGKTEKTGKRSTSAAVLEALREVHPIVDKILQYRELAKLKGTYIDRLPALVHPKTGRLHTRFNQTATATGRLSSSDPNLQNIPVRTPLGQKIRRAFVAEEGWRLVALDYSQIELRVLAHLSGDENLIRVFQEGKDIHTQTASWMFGLSAEAIDPLMRRAAKTINFGVLYGMSAFRLSQELGIPYEEAQAFIQKYFQSYPKVKAWIEKTLEEGRTRGYVETLFGRRRYVPDLNARVKGKREAAERMAFNMPVQGTAADLMKLAMVRLFPQLREVGARMLLQVHDELLLEAPKERAEEVAALAKEVMEGVWPLAVPLEVEVGYGEDWLAAKG

SEQ ID NO: 3333 - DNA, 2523 bp, synthetic construct
  misc_feature 1..2523: note = Variant of DNA polymerase I from Thermus sp. strain 2.9
  source 1..2523: mol_type = other DNA
atgcaccatcatcatcatcatggcggtagcggcgtgttaccggtgttcgagcctaaaggtcgcgtgcttctggttgatggccatcatctcgcgtatcgtaacttctttgccctgaaaggattaaccaccagcagcggcgagccggtacagggtgtctacggctttgcaaagtcgctcctgaaagctctgaaagaagacggtgatgtggtgattgttgtctttgatgcgaaagcgccaagttttcgccacgaagcgtacgaagcttacaaagccgggcgtgctccaacgccggaagactttcctcgccaattggcgcttatgaaggaattagtggatttgcttggcctcgaacgcttggaagttcccggtttcgaggcagacgacgtattagcgactctcgcaaagaaagccgaacgtgagggctatgaagtccagatcttgacagcagatcgcgatcttttccagcttttatctccgcgcatctcggtgttacacccggaagggcatcgtatcaccccggaatggctctgggagaaatatggtttgcgtcccgaacaatgggtggattttcgcgccttagcaggcgatccgagcgacaatattccgggagttaaaggtatcggcgagaagacggcgctcaagctccttaaagaatgggggtcgttggagaacttgcttaagaatttagatcaggtcaaaccagagtcagtgcgtgagaagattcttgctcacctcgaagacctcaaattaagccgcgaattgtcccgtgtacgcaccgatttgccgctcgaagttgatttccaacgccgccgcgaacctgactgggagggtcttaaagcgtttttagagcgtcttgaatttggttcgctcttgcatgaattcggccttttagaaagcccgttaccagccgaagaagcaccttggccaccgcccgagggcgcgtttttaggttaccgtttgagtcgcccggaaccgatgtgggccgaattactggctcttgcagcgtctgcccagggacgtgtgtatcgcgcggaagaccctcatggtgcgctccgcggcctcttcgaagtccgtggactccttgccaaagacttagctgttgttgcatatcgcgaaggtcttgatttacctccgactgatgatccaatgcttcttgcgtacctcttggacccgtcaaacacgacgcccgaaggcgtagcccgtcgttacggcggcgagtggaccgaagatgcagcgaaacgcgcgttattggccgaacgtttgcacgccaatttattaggacgtttgcaaggcgaggaacgtctcctctggctttacgaagaagtggagaaaccattgagtcgcgtgctcgcgcatatggaagctaccggtgtcaaattagacgtggcgtatttggagaatctcagccttgaagttgctgcccacatgcgccgcttggaggaagaagtattccgtttagcaggccgttcctttcgccttaattctcgcgatcagttagaacgtgtgttgttcgatgaacttggtctccctcctatcggcaagacagagaagaccggtaaacgtagcacttcagcggcggttttagaagctcttcgcgaagtccatcccattgtggacaagatcttgcaataccgcgaactcgcgaaattgaaaggcacctatattgaccgtcttccggcattagtccacccgaaaacgggacgcctccatacccgcttcaaccaaacagccacggcgaccggtcgtttgtcctcctctgatccaaaccttcagaatattccagtacgtaccccattgggccagaagatccgccgtgcgtttgtagctgaggagggttggcgtttagtggccctcgattatagccaaattgaattacgtgtccttgcccatctttctggcgatgagaacctcatccgcgtgtttcaggaaggcaaagacattcacactcaaacggcaagctggatgtttggattatcagctgaagcgatcgatcctttgatgcgtcgtgcagcgaagaccatcaatttcggtgttctctacggtatgagtgcctttcgtttgtcgcaggaattaggcattccctatgaagaagctcaggcgttcattcagaaatactttcaaagctatcccaaagttaaagcatggatcgagaagactctcgaagaaggccgcacacgtggttacgtagagaccttatttggacgtcgccgctatgttcccgatttaaacgctcgcgtgaaaggcaagcgtgaagccgccgaacgcatggcgttcaacatgcctgtacagggcacggcagctgacctcatgaaacttgcaatggtgcgcctttttccacaattgcgtgaagttggtgcccgcatgctcttgcaggtccacgatgaactcttgttagaagcgccaaaagagcgtgcggaagaggtggcagccctcgcgaaagaagttatggaaggcgtgtggcccttagcggtgcctcttgaagtcgaagttggtattggcgaggattggctggctgccaaagga

SEQ ID NO: 3334 - protein, 841 aa, synthetic construct
  REGION 1..841: note = Variant of DNA polymerase I from Thermus sp. strain 2.9
MHHHHHHGGSGVLPVFEPKGRVLLVDGHHLAYRNFFALKGLTTSSGEPVQGVYGFAKSLLKALKEDGDVVIVVFDAKAPSFRHEAYEAYKAGRAPTPEDFPRQLALMKELVDLLGLERLEVPGFEADDVLATLAKKAEREGYEVQILTADRDLFQLLSPRISVLHPEGHRITPEWLWEKYGLRPEQWVDFRALAGDPSDNIPGVKGIGEKTALKLLKEWGSLENLLKNLDQVKPESVREKILAHLEDLKLSRELSRVRTDLPLEVDFQRRREPDWEGLKAFLERLEFGSLLHEFGLLESPLPAEEAPWPPPEGAFLGYRLSRPEPMWAELLALAASAQGRVYRAEDPHGALRGLFEVRGLLAKDLAVVAYREGLDLPPTDDPMLLAYLLDPSNTTPEGVARRYGGEWTEDAAKRALLAERLHANLLGRLQGEERLLWLYEEVEKPLSRVLAHMEATGVKLDVAYLENLSLEVAAHMRRLEEEVFRLAGRSFRLNSRDQLERVLFDELGLPPIGKTEKTGKRSTSAAVLEALREVHPIVDKILQYRELAKLKGTYIDRLPALVHPKTGRLHTRFNQTATATGRLSSSDPNLQNIPVRTPLGQKIRRAFVAEEGWRLVALDYSQIELRVLAHLSGDENLIRVFQEGKDIHTQTASWMFGLSAEAIDPLMRRAAKTINFGVLYGMSAFRLSQELGIPYEEAQAFIQKYFQSYPKVKAWIEKTLEEGRTRGYVETLFGRRRYVPDLNARVKGKREAAERMAFNMPVQGTAADLMKLAMVRLFPQLREVGARMLLQVHDELLLEAPKERAEEVAALAKEVMEGVWPLAVPLEVEVGIGEDWLAAKG

SEQ ID NO: 3335 - DNA, 2523 bp, synthetic construct; identical to SEQ ID NO: 3275
  misc_feature 1..2523: note = Variant of DNA polymerase I from Thermus sp. strain 2.9
  source 1..2523: mol_type = other DNA

SEQ ID NO: 3336 - protein, 841 aa, synthetic construct; identical to SEQ ID NO: 3276
  REGION 1..841: note = Variant of DNA polymerase I from Thermus sp. strain 2.9

SEQ ID NO: 3337 - DNA, 2523 bp, synthetic construct
  misc_feature 1..2523: note = Variant of DNA polymerase I from Thermus sp. strain 2.9
  source 1..2523: mol_type = other DNA
atgcaccatcatcatcatcatggcggtagcggcgtgttaccggtgttcgagcctaaaggtcgcgtgcttctggttgatggccatcatctcgcgtatcgtaacttctttgccctgaaaggattaaccaccagcagcggcgagccggtacagggtgtctacggctttgcaaagtcgctcctgaaagctctgaaagaagacggtgatgtggtgattgttgtctttgatgcgcgggcgccaagttttcgccacgaagcgtacgaagcttacaaagccgggcgtgctccaacgccggaagactttcctcgccaattggcgcttatgaaggaattagtggatttgcttggcctcgaacgcttggaagttcccggtttcgaggcagacgacgtattagcgactctcgcaaagaaagccgaacgtgagggctatgaagtccagatcttgacagcagatcgcgatcttttccagcttttatctccgcgcatctcggtgttacacccggaagggcatcgtatcaccccggaatggctctgggagaaatatggtttgcgtcccgaacaatgggtggattttcgcgccttagcaggcgatccgagcgacaatattccgggagttaaaggtatcggcgagaagacggcgctcaagctccttaaagaatgggggtcgttggagaacttgcttaagaatttagatcaggtcaaaccagagtcagtgcgtgagaagattcttgctcacctcgaagacctcaaattaagccgcgaattgtcccgtgtacgcaccgatttgccgctcgaagttgatttccaacgccgccgcgaacctgactgggagggtcttaaagcgtttttagagcgtcttgaatttggttcgctcttgcatgaattcggccttttagaaagcccgttaccagccgaagaagcaccttggccaccgcccgagggcgcgtttttaggttaccgtttgagtcgcccggaaccgatgtgggccgaattactggctcttgcagcgtctgcccagggacgtgtgtatcgcgcggaagaccctcatggtgcgctccgcggcctcttcgaagtccgtggactccttgccaaagacttagctgttgttgcattgcgcgaaggtcttgatttacctccgactgatgatccaatgcttcttgcgtacctcttggacccgtcaaacacgacgcccgaaggcgtagcccgtcgttacggcggcgagtggaccgaagatgcagcgaaacgcgcgttattggccgaacgtttgcacgccaatttattaggacgtttgcaaggcgaggaacgtctcctctggctttacgaagaagtggagaaaccattgagtcgcgtgctcgcgcatatggaagctaccggtgtcaaattagacgtggcgtatttggagaatctcagccttgaagttgctgcccacatgcgccgcttggaggaagaagtattccgtttagcaggccgttcctttcgccttaattctcgcgatcagttagaacgtgtgttgttcgatgaacttggtctccctcctatcggcaagacagagaagaccggtaaacgtagcacttcagcggcggttttagaagctcttcgcgaagtccatcccattgtggacaagatcttgcaataccgcgaactcgcgaaattgaaaggcacctatattgaccgtcttccggcattagtccacccgaaaacgggacgcctccatacccgcttcaaccaaacagccacggcgaccggtcgtttgtcctcctctgatccaaaccttcagaatattccagtacgtaccccattgggccagaagatccgccgtgcgtttgtagctgaggagggttggcgtttagtggccctcgattatagccaaattgaattacgtgtccttgcccatctttctggcgatgagaacctcatccgcgtgtttcaggaaggcaaagacattcacactcaaacggcaagctggatgtttggattatcagctgaagcgatcgatcctttgatgcgtcgtgcagcgaagaccatcaatttcggtgttctctacggtatgagtgcctttcgtttgtcgcaggaattaggcattccctatgaagaagctcaggcgttcattcagaaatactttcaaagctatcccaaagttaaagcatggatcgagaagactctcgaagaaggccgcacacgtggttacgtagagaccttatttggacgtcgccgctatgttcccgatttaaacgctcgcgtgaaaggcaagcgtgaagccgccgaacgcatggcgttcaacatgcctgtacagggcacggcagctgacctcatgaaacttgcaatggtgcgcctttttccacaattgcgtgaagttggtgcccgcatgctcttgcaggtccacgatgaactcttgttagaagcgccaaaagagcgtgcggaagaggtggcagccctcgcgaaagaagttatggaaggcgtgtggcccttagcggtgcctcttgaagtcgaagttggtattggcgaggattggctggctgccaaagga

SEQ ID NO: 3338 - protein, 841 aa, synthetic construct
  REGION 1..841: note = Variant of DNA polymerase I from Thermus sp. strain 2.9
MHHHHHHGGSGVLPVFEPKGRVLLVDGHHLAYRNFFALKGLTTSSGEPVQGVYGFAKSLLKALKEDGDVVIVVFDARAPSFRHEAYEAYKAGRAPTPEDFPRQLALMKELVDLLGLERLEVPGFEADDVLATLAKKAEREGYEVQILTADRDLFQLLSPRISVLHPEGHRITPEWLWEKYGLRPEQWVDFRALAGDPSDNIPGVKGIGEKTALKLLKEWGSLENLLKNLDQVKPESVREKILAHLEDLKLSRELSRVRTDLPLEVDFQRRREPDWEGLKAFLERLEFGSLLHEFGLLESPLPAEEAPWPPPEGAFLGYRLSRPEPMWAELLALAASAQGRVYRAEDPHGALRGLFEVRGLLAKDLAVVALREGLDLPPTDDPMLLAYLLDPSNTTPEGVARRYGGEWTEDAAKRALLAERLHANLLGRLQGEERLLWLYEEVEKPLSRVLAHMEATGVKLDVAYLENLSLEVAAHMRRLEEEVFRLAGRSFRLNSRDQLERVLFDELGLPPIGKTEKTGKRSTSAAVLEALREVHPIVDKILQYRELAKLKGTYIDRLPALVHPKTGRLHTRFNQTATATGRLSSSDPNLQNIPVRTPLGQKIRRAFVAEEGWRLVALDYSQIELRVLAHLSGDENLIRVFQEGKDIHTQTASWMFGLSAEAIDPLMRRAAKTINFGVLYGMSAFRLSQELGIPYEEAQAFIQKYFQSYPKVKAWIEKTLEEGRTRGYVETLFGRRRYVPDLNARVKGKREAAERMAFNMPVQGTAADLMKLAMVRLFPQLREVGARMLLQVHDELLLEAPKERAEEVAALAKEVMEGVWPLAVPLEVEVGIGEDWLAAKG

SEQ ID NO: 3339 - DNA, 2523 bp, synthetic construct
  misc_feature 1..2523: note = Variant of DNA polymerase I from Thermus sp. strain 2.9
  source 1..2523: mol_type = other DNA
atgcaccatcatcatcatcatggcggtagcggcgtgttaccggtgttcgagcctaaaggtcgcgtgcttctggttgatggccatcatctcgcgtatcgtaacttctttgccctgaaaggattaaccaccagcagcggcgagccggtacagggtgtctacggctttgcaaagtcgctcctgaaagctctgaaagaagacggtgatgtggtgattgttgtctttgatgcgaaagcgccaagttttcgccacgaagcgtacgaagcttacaaagccgggcgtgctccaacgccggaagactttcctcgccaattggcgcttatgaaggaattagtggatttgcttggcctcgaacgcttggaagttcccggtttcgaggcagacgacgtattagcgactctcgcaaagaaagccgaacgtgagggctatgaagtccagatcttgacagcagatcgcgatcttttccagcttttatctccgcgcatctcggtgttacacccggaagggcatcgtatcaccccggaatggctctgggagaaatatggtttgcgtcccgaacaatgggtggattttcgcgccttagcaggcgatccgagcgacaatattccgggagttaaaggtatcggcgagaagacggcgctcaagctccttaaagaatgggggtcgttggagaacttgcttaagaatttagatcaggtcaaaccagagtcagtgcgtgagaagattcttgctcacctcgaagacctcaaattaagccgcgaattgtcccgtgtacgcaccgatttgccgctcgaagttgatttccaacgccgccgcgaacctgactgggagggtcttaaagcgtttttagagcgtcttgaatttggttcgctcttgcatgaattcggccttttagaaagcccgttaccagccgaagaagcaccttggccaccgcccgagggcgcgtttttaggttaccgtttgagtcgcccggaaccgatgtgggccgaattactggctcttgcagcgtctgcccagggacgtgtgtatcgcgcggaagaccctcatggtgcgctccgcggcctcttcgaagtccgtggactccttgccaaagacttagctgttgttgcattgcgcgaaggtcttgatttacctccgactgatgatccaatgcttcttgcgtacctcttggacccgtcaaacacgacgcccgaaggcgtagcccgtcgttacggcggcgagtggaccgaagatgcagcgaaacgcgcgttattggccgaacgtttgcacgccaatttattaggacgtttgcaaggcgaggaacgtctcctctggctttacgaagaagtggagaaaccattgagtcgcgtgctcgcgcatatggaagctaccggtgtcaaattagacgtggcgtatttggagaatctcagccttgaagttgctgcccacatgcgccgcttggaggaagaagtattccgtttagcaggccgttcctttcgccttaattctcgcgatcagttagaacgtgtgttgttcgatgaacttggtctccctcctatcggcaagacagagaagaccggtaaacgtagcacttcagcggcggttttagaagctcttcgcgaagtccatcccattgtggacaagatcttgcaataccgcgaactcgcgaaattgaaaggcacctatattgaccgtcttccggcattagtccacccgaaaacgggacgcctccatacccgcttcaaccaaacagccacggcgaccggtcgtttgtcctcctctgatccaaaccttcagaatattccagtacgtaccccattgggccagaagatccgccgtgcgtttgtagctgaggagggttggcgtttagtggccctcgattatagccaaattgaattacgtgtccttgcccatctttctggcgatgagaacctcatccgcgtgtttcaggaaggcaaagacattcacactcaaacggcaagctggatgtttggattatcagctgaaacgatcgatcctttgatgcgtcgtgcagcgaagaccatcaatttcggtgttctctacggtatgagtgcctttcgtttgtcgcaggaattaggcattccctatgaagaagctcaggcgttcattcagaaatactttcaaagctatcccaaagttaaagcatggatcgagaagactctcgaagaaggccgcacacgtggttacgtagagaccttatttggacgtcgccgctatgttcccgatttaaacgctcgcgtgaaaggcaagcgtgaagccgccgaacgcatggcgttcaacatgcctgtacagggcacggcagctgacctcatgaaacttgcaatggtgcgcctttttccacaattgcgtgaagttggtgcccgcatgctcttgcaggtccacgatgaactcttgttagaagcgccaaaagagcgtgcggaagaggtggcagccctcgcgaaagaagttatggaaggcgtgtggcccttagcggtgcctcttgaagtcgaagttggtattggcgaggattggctggctgccaaagga

SEQ ID NO: 3340 - protein, 841 aa, synthetic construct
  REGION 1..841: note = Variant of DNA polymerase I from Thermus sp. strain 2.9
MHHHHHHGGSGVLPVFEPKGRVLLVDGHHLAYRNFFALKGLTTSSGEPVQGVYGFAKSLLKALKEDGDVVIVVFDAKAPSFRHEAYEAYKAGRAPTPEDFPRQLALMKELVDLLGLERLEVPGFEADDVLATLAKKAEREGYEVQILTADRDLFQLLSPRISVLHPEGHRITPEWLWEKYGLRPEQWVDFRALAGDPSDNIPGVKGIGEKTALKLLKEWGSLENLLKNLDQVKPESVREKILAHLEDLKLSRELSRVRTDLPLEVDFQRRREPDWEGLKAFLERLEFGSLLHEFGLLESPLPAEEAPWPPPEGAFLGYRLSRPEPMWAELLALAASAQGRVYRAEDPHGALRGLFEVRGLLAKDLAVVALREGLDLPPTDDPMLLAYLLDPSNTTPEGVARRYGGEWTEDAAKRALLAERLHANLLGRLQGEERLLWLYEEVEKPLSRVLAHMEATGVKLDVAYLENLSLEVAAHMRRLEEEVFRLAGRSFRLNSRDQLERVLFDELGLPPIGKTEKTGKRSTSAAVLEALREVHPIVDKILQYRELAKLKGTYIDRLPALVHPKTGRLHTRFNQTATATGRLSSSDPNLQNIPVRTPLGQKIRRAFVAEEGWRLVALDYSQIELRVLAHLSGDENLIRVFQEGKDIHTQTASWMFGLSAETIDPLMRRAAKTINFGVLYGMSAFRLSQELGIPYEEAQAFIQKYFQSYPKVKAWIEKTLEEGRTRGYVETLFGRRRYVPDLNARVKGKREAAERMAFNMPVQGTAADLMKLAMVRLFPQLREVGARMLLQVHDELLLEAPKERAEEVAALAKEVMEGVWPLAVPLEVEVGIGEDWLAAKG

SEQ ID NO: 3341 - DNA, 2523 bp, synthetic construct
  misc_feature 1..2523: note = Variant of DNA polymerase I from Thermus sp. strain 2.9
  source 1..2523: mol_type = other DNA
atgcaccatcatcatcatcatggcggtagcggcgtgttaccggtgttcgagcctaaaggtcgcgtgcttctggttgatggccatcatctcgcgtatcgtaacttctttgccctgaaaggattaaccaccagcagcggcgagccggtacagggtgtctacggctttgcaaagtcgctcctgaaagctctgaaagaagacggtgatgtggtgattgttgtctttgatgcgaaagcgccaagttttcgccacgaagcgtacgaagcttacaaagccgggcgtgctccaacgccggaagactttcctcgccaattggcgcttatgaaggaattagtggatttgcttggcctcgaacgcttggaagttcccggtttcgaggcagacgacgtattagcgactctcgcaaagaaagccgaacgtgagggctatgaagtccagatcttgacagcagatcgcgatcttttccagcttttatctccgcgcatctcggtgttacacccggaagggcatcgtatcaccccggaatggctctgggagaaatatggtttgcgtcccgaacaatgggtggattttcgcgccttagcaggcgatccgagcgacaatattccgggagttaaaggtatcggcgagaagacggcgctcaagctccttaaagaatgggggtcgttggagaacttgcttaagaatttagatcaggtcaaaccagagtcagtgcgtgagaagattcttgctcacctcgaagacctcaaattaagccgcgaattgtcccgtgtacgcaccgatttgccgctcgaagttgatttccaacgccgccgcgaacctgactgggagggtcttaaagcgtttttagagcgtcttgaatttggttcgctcttgcatgaattcggccttttagaaagcccgttaccagccgaagaagcaccttggccaccgcccgagggcgcgtttttaggttaccgtttgagtcgcccggaaccgatgtgggccgaattactggctcttgcagcgtctgcccagggacgtgtgtatcgcgcggaagaccctcatggtgcgctccgcggcctcttcgaagtccgtggactccttgccaaagacttagctgttgttgcagatcgcgaaggtcttgatttacctccgactgatgatccaatgcttcttgcgtacctcttggacccgtcaaacacgacgcccgaaggcgtagcccgtcgttacggcggcgagtggaccgaagatgcagcgaaacgcgcgttattggccgaacgtttgcacgccaatttattaggacgtttgcaaggcgaggaacgtctcctctggctttacgaagaagtggagaaaccattgagtcgcgtgctcgcgcatatggaagctaccggtgtcaaattagacgtggcgtatttggagaatctcagccttgaagttgctgcccacatgcgccgcttggaggaagaagtattccgtttagcaggccgttcctttcgccttaattctcgcgatcagttagaacgtgtgttgttcgatgaacttggtctccctcctatcggcaagacagagaagaccggtaaacgtagcacttcagcggcggttttagaagctcttcgcgaagtccatcccattgtggacaagatcttgcaataccgcgaactcgcgaaattgaaaggcacctatattgaccgtcttccggcattagtccacccgaaaacgggacgcctccatacccgcttcaaccaaacagccacggcgaccggtcgtttgtcctcctctgatccaaaccttcagaatattccagtacgtaccccattgggccagaagatccgccgtgcgtttgtagctgaggagggttggcgtttagtggccctcgattatagccaaattgaattacgtgtccttgcccatctttctggcgatgagaacctcatccgcgtgtttcaggaaggcaaagacattcacactcaaacggcaagctggatgtttggattatcagctgaagcgatcgatcctttgatgcgtcgtgcagcgaagaccatcaatttcggtgttctctacggtatgagtgcctttcgtttgtcgcaggaattaggcattccctatgaagaagctcaggcgttcattcagaaatactttcaaagctatcccaaagttaaagcatggatcgagaagactctcgaagaaggccgcacacgtggttacgtagagaccttatttggacgtcgccgctatgttcccgatttaaacgctcgcgtgaaaggcaagcgtgaagccgccgaacgcatggcgttcaacatgcctgtacagggcacggcagctgacctcatgaaacttgcaatggtgcgcctttttccacaattgcgtgaagttggtgcccgcatgctcttgcaggtccacgatgaactcttgttagaagcgccaaaagagcgtgcggaagaggtggcagccctcgcgaaagaagttatggaaggcgtgtggcccttagcggtgcctcttgaagtcgaagttggtattggcgaggattggctggctgccaaagga

SEQ ID NO: 3342 - protein, 841 aa, synthetic construct
  REGION 1..841: note = Variant of DNA polymerase I from Thermus sp. strain 2.9
MHHHHHHGGSGVLPVFEPKGRVLLVDGHHLAYRNFFALKGLTTSSGEPVQGVYGFAKSLLKALKEDGDVVIVVFDAKAPSFRHEAYEAYKAGRAPTPEDFPRQLALMKELVDLLGLERLEVPGFEADDVLATLAKKAEREGYEVQILTADRDLFQLLSPRISVLHPEGHRITPEWLWEKYGLRPEQWVDFRALAGDPSDNIPGVKGIGEKTALKLLKEWGSLENLLKNLDQVKPESVREKILAHLEDLKLSRELSRVRTDLPLEVDFQRRREPDWEGLKAFLERLEFGSLLHEFGLLESPLPAEEAPWPPPEGAFLGYRLSRPEPMWAELLALAASAQGRVYRAEDPHGALRGLFEVRGLLAKDLAVVADREGLDLPPTDDPMLLAYLLDPSNTTPEGVARRYGGEWTEDAAKRALLAERLHANLLGRLQGEERLLWLYEEVEKPLSRVLAHMEATGVKLDVAYLENLSLEVAAHMRRLEEEVFRLAGRSFRLNSRDQLERVLFDELGLPPIGKTEKTGKRSTSAAVLEALREVHPIVDKILQYRELAKLKGTYIDRLPALVHPKTGRLHTRFNQTATATGRLSSSDPNLQNIPVRTPLGQKIRRAFVAEEGWRLVALDYSQIELRVLAHLSGDENLIRVFQEGKDIHTQTASWMFGLSAEAIDPLMRRAAKTINFGVLYGMSAFRLSQELGIPYEEAQAFIQKYFQSYPKVKAWIEKTLEEGRTRGYVETLFGRRRYVPDLNARVKGKREAAERMAFNMPVQGTAADLMKLAMVRLFPQLREVGARMLLQVHDELLLEAPKERAEEVAALAKEVMEGVWPLAVPLEVEVGIGEDWLAAKG

SEQ ID NO: 3343 - DNA, 2523 bp, synthetic construct
  misc_feature 1..2523: note = Variant of DNA polymerase I from Thermus sp. strain 2.9
  source 1..2523: mol_type = other DNA
atgcaccatcatcatcatcatggcggtagcggcgtgttaccggtgttcgagcctaaaggtcgcgtgcttctggttgatggccatcatctcgcgtatcgtaacttctttgccctgaaaggattaaccaccagcagcggcgagccggtacagggtgtctacggctttgcaaagtcgctcctgaaagctctgaaagaagacggtgatgtggtgattgttgtctttgatgcgaaagcgccaagttttcgccacgaagcgtacgaagcttacaaagccgggcgtgctccaacgccggaagactttcctcgccaattggcgcttatgaaggaattagtggatttgcttggcctcgaacgcttggaagttcccggtttcgaggcagacgacgtattagcgactctcgcaaagaaagccgaacgtgagggctatgaagtccagatcttgacagcagatcgcgatcttttccagcttttatctccgcgcatctcggtgttacacccggaagggcatcgtatcaccccggaatggctctgggagaaatatggtttgcgtcccgaacaatgggtggattttcgcgccttagcaggcgatccgagcgacaatattccgggagttaaaggtatcggcgagaagacggcgctcaagctccttaaagaatgggggtcgttggagaacttgcttaagaatttagatcaggtcaaaccagagtcagtgcgtgagaagattcttgctcacctcgaagacctcaaattaagccgcgaattgtcccgtgtacgcaccgatttgccgctcgaagttgatttccaacgccgccgcgaacctgactgggagggtcttaaagcgtttttagagcgtcttgaatttggttcgctcttgcatgaattcggccttttagaaagcccgttaccagccgaagaagcaccttggccaccgcccgagggcgcgtttttaggttaccgtttgagtcgcccggaaccgatgtgggccgaattactggctcttgcagcgtctgcccagggacgtgtgtatcgcgcggaagaccctcatggtgcgctccgcggcctcttcgaagtccgtggactccttgccaaagacttagctgttgttgcattgcgcgaaggtcttgatttacctccgactgatgatccaatgcttcttgcgtacctcttggacccgtcaaacacgacgcccgaaggcgtagcccgtcgttacggcggcgagtggaccgaagatgcagcgaaacgcgcgttattggccgaacgtttgcacgccaatttattagagcgtttgcaaggcgaggaacgtctcctctggctttacgaagaagtggagaaaccattgagtcgcgtgctcgcgcatatggaagctaccggtgtcaaattagacgtggcgtatttggagaatctcagccttgaagttgctgcccacatgcgccgcttggaggaagaagtattccgtttagcaggccgttcctttcgccttaattctcgcgatcagttagaacgtgtgttgttcgatgaacttggtctccctcctatcggcaagacagagaagaccggtaaacgtagcacttcagcggcggttttagaagctcttcgcgaagtccatcccattgtggacaagatcttgcaataccgcgaactcgcgaaattgaaaggcacctatattgaccgtcttccggcattagtccacccgaaaacgggacgcctccatacccgcttcaaccaaacagccacggcgaccggtcgtttgtcctcctctgatccaaaccttcagaatattccagtacgtaccccattgggccagaagatccgccgtgcgtttgtagctgaggagggttggcgtttagtggccctcgattatagccaaattgaattacgtgtccttgcccatctttctggcgatgagaacctcatccgcgtgtttcaggaaggcaaagacattcacactcaaacggcaagctggatgtttggattatcagctgaagcgatcgatcctttgatgcgtcgtgcagcgaagaccatcaatttcggtgttctctacggtatgagtgcctttcgtttgtcgcaggaattaggcattccctatgaagaagctcaggcgttcattcagaaatactttcaaagctatcccaaagttaaagcatggatcgagaagactctcgaagaaggccgcacacgtggttacgtagagaccttatttggacgtcgccgctatgttcccgatttaaacgctcgcgtgaaaggcaagcgtgaagccgccgaacgcatggcgttcaacatgcctgtacagggcacggcagctgacctcatgaaacttgcaatggtgcgcctttttccacaattgcgtgaagttggtgcccgcatgctcttgcaggtccacgatgaactcttgttagaagcgccaaaagagcgtgcggaagaggtggcagccctcgcgaaagaagttatggaaggcgtgtggcccttagcggtgcctcttgaagtcgaagttggtattggcgaggattggctggctgccaaagga

SEQ ID NO: 3344 - protein, 841 aa, synthetic construct
  REGION 1..841: note = Variant of DNA polymerase I from Thermus sp. strain 2.9
MHHHHHHGGSGVLPVFEPKGRVLLVDGHHLAYRNFFALKGLTTSSGEPVQGVYGFAKSLLKALKEDGDVVIVVFDAKAPSFRHEAYEAYKAGRAPTPEDFPRQLALMKELVDLLGLERLEVPGFEADDVLATLAKKAEREGYEVQILTADRDLFQLLSPRISVLHPEGHRITPEWLWEKYGLRPEQWVDFRALAGDPSDNIPGVKGIGEKTALKLLKEWGSLENLLKNLDQVKPESVREKILAHLEDLKLSRELSRVRTDLPLEVDFQRRREPDWEGLKAFLERLEFGSLLHEFGLLESPLPAEEAPWPPPEGAFLGYRLSRPEPMWAELLALAASAQGRVYRAEDPHGALRGLFEVRGLLAKDLAVVALREGLDLPPTDDPMLLAYLLDPSNTTPEGVARRYGGEWTEDAAKRALLAERLHANLLERLQGEERLLWLYEEVEKPLSRVLAHMEATGVKLDVAYLENLSLEVAAHMRRLEEEVFRLAGRSFRLNSRDQLERVLFDELGLPPIGKTEKTGKRSTSAAVLEALREVHPIVDKILQYRELAKLKGTYIDRLPALVHPKTGRLHTRFNQTATATGRLSSSDPNLQNIPVRTPLGQKIRRAFVAEEGWRLVALDYSQIELRVLAHLSGDENLIRVFQEGKDIHTQTASWMFGLSAEAIDPLMRRAAKTINFGVLYGMSAFRLSQELGIPYEEAQAFIQKYFQSYPKVKAWIEKTLEEGRTRGYVETLFGRRRYVPDLNARVKGKREAAERMAFNMPVQGTAADLMKLAMVRLFPQLREVGARMLLQVHDELLLEAPKERAEEVAALAKEVMEGVWPLAVPLEVEVGIGEDWLAAKG

SEQ ID NO: 3345 - DNA, 2523 bp, synthetic construct
  misc_feature 1..2523: note = Variant of DNA polymerase I from Thermus sp. strain 2.9
  source 1..2523: mol_type = other DNA
atgcaccatcatcatcatcatggcggtagcggctggttaccggtgttcgagcctaaaggtcgcgtgcttctggttgatggccatcatctcgcgtatcgtaacttctttgccctgaaaggattaaccaccagcagcggcgagccggtacagggtgtctacggctttgcaaagtcgctcctgaaagctctgaaagaagacggtgatgtggtgattgttgtctttgatgcgaaagcgccaagttttcgccacgaagcgtacgaagcttacaaagccgggcgtgctccaacgccggaagactttcctcgccaattggcgcttatgaaggaattagtggatttgcttggcctcgaacgcttggaagttcccggtttcgaggcagacgacgtattagcgactctcgcaaagaaagccgaacgtgagggctatgaagtccagatcttgacagcagatcgcgatcttttccagcttttatctccgcgcatctcggtgttacacccggaagggcatcgtatcaccccggaatggctctgggagaaatatggtttgcgtcccgaacaatgggtggattttcgcgccttagcaggcgatccgagcgacaatattccgggagttaaaggtatcggcgagaagacggcgctcaagctccttaaagaatgggggtcgttggagaacttgcttaagaatttagatcaggtcaaaccagagtcagtgcgtgagaagattcttgctcacctcgaagacctcaaattaagccgcgaattgtcccgtgtacgcaccgatttgccgctcgaagttgatttccaacgccgccgcgaacctgactgggagggtcttaaagcgtttttagagcgtcttgaatttggttcgctcttgcatgaattcggccttttagaaagcccgttaccagccgaagaagcaccttggccaccgcccgagggcgcgtttttaggttaccgtttgagtcgcccggaaccgatgtgggccgaattactggctcttgcagcgtctgcccagggacgtgtgtatcgcgcggaagaccctcatggtgcgctccgcggcctcttcgaagtccgtggactccttgccaaagacttagctgttgttgcattgcgcgaaggtcttgatttacctccgactgatgatccaatgcttcttgcgtacctcttggacccgtcaaacacgacgcccgaaggcgtagcccgtcgttacggcggcgagtggaccgaagatgcagcgaaacgcgcgttattggccgaacgtttgcacgccaatttattaggacgtttgcaaggcgaggaacgtctcctctggctttacgaagaagtggagaaaccattgagtcgcgtgctcgcgcatatggaagctaccggtgtcaaattagacgtggcgtatttggagaatctcagccttgaagttgctgcccacatgcgccgcttggaggaagaagtattccgtttagcaggccgttcctttcgccttaattctcgcgatcagttagaacgtgtgttgttcgatgaacttggtctccctcctatcggcaagacagagaagaccggtaaacgtagcacttcagcggcggttttagaagctcttcgcgaagtccatcccattgtggacaagatcttgcaataccgcgaactcgcgaaattgaaaggcacctatattgaccgtcttccggcattagtccacccgaaaacgggacgcctccatacccgcttcaaccaaacagccacggcgaccggtcgtttgtcctcctctgatccaaaccttcagaatattccagtacgtaccccattgggccagaagatccgccgtgcgtttgtagctgaggagggttggcgtttagtggccctcgattatagccaaattgaattacgtgtccttgcccatctttctggcgatgagaacctcatccgcgtgtttcaggaaggcaaagacattcacactcaaacggcaagctggatgtttggattatcagctgaagcgatcgatcctttgatgcgtcgtgcagcgaagaccatcaatttcggtgttctctacggtatgagtgcctttcgtttgtcgcaggaattaggcattccctatgaagaagctcaggcgttcattcagaaatactttcaaagctatcccaaagttaaagcatggatcgagaagactctcgaagaaggccgcacacgtggttacgtagagaccttatttggacgtcgccgctatgttcccgatttaaacgctcgcgtgaaaggcaagcgtgaagccgccgaacgcatggcgttcaacatgcctgtacagggcacggcagctgacctcatgaaacttgcaatggtgcgcctttttccacaattgcgtgaagttggtgcccgcatgctcttgcaggtccacgatgaactcttgttagaagcgccaaaagagcgtgcggaagaggtggcagccctcgcgaaagaagttatggaaggcgtgtggcccttagcggtgcctcttgaagtcgaagttggtattggcgaggattggctggctgccaaagga

SEQ ID NO: 3346 - protein, 841 aa, synthetic construct
  REGION 1..841: note = Variant of DNA polymerase I from Thermus sp. strain 2.9
MHHHHHHGGSGWLPVFEPKGRVLLVDGHHLAYRNFFALKGLTTSSGEPVQGVYGFAKSLLKALKEDGDVVIVVFDAKAPSFRHEAYEAYKAGRAPTPEDFPRQLALMKELVDLLGLERLEVPGFEADDVLATLAKKAEREGYEVQILTADRDLFQLLSPRISVLHPEGHRITPEWLWEKYGLRPEQWVDFRALAGDPSDNIPGVKGIGEKTALKLLKEWGSLENLLKNLDQVKPESVREKILAHLEDLKLSRELSRVRTDLPLEVDFQRRREPDWEGLKAFLERLEFGSLLHEFGLLESPLPAEEAPWPPPEGAFLGYRLSRPEPMWAELLALAASAQGRVYRAEDPHGALRGLFEVRGLLAKDLAVVALREGLDLPPTDDPMLLAYLLDPSNTTPEGVARRYGGEWTEDAAKRALLAERLHANLLGRLQGEERLLWLYEEVEKPLSRVLAHMEATGVKLDVAYLENLSLEVAAHMRRLEEEVFRLAGRSFRLNSRDQLERVLFDELGLPPIGKTEKTGKRSTSAAVLEALREVHPIVDKILQYRELAKLKGTYIDRLPALVHPKTGRLHTRFNQTATATGRLSSSDPNLQNIPVRTPLGQKIRRAFVAEEGWRLVALDYSQIELRVLAHLSGDENLIRVFQEGKDIHTQTASWMFGLSAEAIDPLMRRAAKTINFGVLYGMSAFRLSQELGIPYEEAQAFIQKYFQSYPKVKAWIEKTLEEGRTRGYVETLFGRRRYVPDLNARVKGKREAAERMAFNMPVQGTAADLMKLAMVRLFPQLREVGARMLLQVHDELLLEAPKERAEEVAALAKEVMEGVWPLAVPLEVEVGIGEDWLAAKG

SEQ ID NO: 3347 - DNA, 2523 bp, synthetic construct
  misc_feature 1..2523: note = Variant of DNA polymerase I from Thermus sp. strain 2.9
  source 1..2523: mol_type = other DNA
atgcaccatcatcatcatcatggcggtagcggcgtgttaccggtgttcgagcctaaaggtcgcgtgcttctggttgatggccatcatctcgcgtatcgtaacttctttgccctgaaaggattaaccaccagcagcggcgagccggtacagggtgtctacggctttgcaaagtcgctcctgaaagctctgaaagaagacggtgatgtggtgattgttgtctttgatgcgaaagcgccaagttttcgccacgaagcgtacgaagcttacaaagccgggcgtgctccaacgccggaagactttcctcgccaattggcgcttatgaaggaattagtggatttgcttggcctcgaacgcttggaagttcccggtttcgaggcagacgacgtattagcgactctcgcaaagaaagccgaacgtgagggctatgaagtccagatcttgacagcagatcgcgatcttttccagcttttatctccgcgcatctcggtgttacacccggaagggcatcgtatcaccccggaatggctctgggagaaatatggtttgcgtcccgaacaatgggtggattttcgcgccttagcaggcgatccgagcgacaatattccgggagttaaaggtatcggcgagaagacggcgctcaagctccttaaagaatgggggtcgttggagaacttgcttaagaatttagatcaggtcaaaccagagtcagtgcgtgagaagattcttgctcacctcgaagacctcaaattaagccgcgaattgtcccgtgtacgcaccgatttgccgctcgaagttgatttccaacgccgccgcgaacctgactgggagggtcttaaagcgtttttagagcgtcttgaatttggttcgctcttgcatgaattcggccttttagaaagcccgttaccagccgaagaagcaccttggccaccgcccgagggcgcgtttttaggttaccgtttgagtcgcccggaaccgatgtgggccgaattactggctcttgcagcgtctgcccagggacgtgtgtatcgcgcggaagaccctcatggtgcgctccgcggcctcttcgtggtccgtggactccttgccaaagacttagctgttgttgcattgcgcgaaggtcttgatttacctccgactgatgatccaatgcttcttgcgtacctcttggacccgtcaaacacgacgcccgaaggcgtagcccgtcgttacggcggcgagtggaccgaagatgcagcgaaacgcgcgttattggccgaacgtttgcacgccaatttattaggacgtttgcaaggcgaggaacgtctcctctggctttacgaagaagtggagaaaccattgagtcgcgtgctcgcgcatatggaagctaccggtgtcaaattagacgtggcgtatttggagaatctcagccttgaagttgctgcccacatgcgccgcttggaggaagaagtattccgtttagcaggccgttcctttcgccttaattctcgcgatcagttagaacgtgtgttgttcgatgaacttggtctccctcctatcggcaagacagagaagaccggtaaacgtagcacttcagcggcggttttagaagctcttcgcgaagtccatcccattgtggacaagatcttgcaataccgcgaactcgcgaaattgaaaggcacctatattgaccgtcttccggcattagtccacccgaaaacgggacgcctccatacccgcttcaaccaaacagccacggcgaccggtcgtttgtcctcctctgatccaaaccttcagaatattccagtacgtaccccattgggccagaagatccgccgtgcgtttgtagctgaggagggttggcgtttagtggccctcgattatagccaaattgaattacgtgtccttgcccatctttctggcgatgagaacctcatccgcgtgtttcaggaaggcaaagacattcacactcaaacggcaagctggatgtttggattatcagctgaagcgatcgatcctttgatgcgtcgtgcagcgaagaccatcaatttcggtgttctctacggtatgagtgcctttcgtttgtcgcaggaattaggcattccctatgaagaagctcaggcgttcattcagaaatactttcaaagctatcccaaagttaaagcatggatcgagaagactctcgaagaaggccgcacacgtggttacgtagagaccttatttggacgtcgccgctatgttcccgatttaaacgctcgcgtgaaaggcaagcgtgaagccgccgaacgcatggcgttcaacatgcctgtacagggcacggcagctgacctcatgaaacttgcaatggtgcgcctttttccacaattgcgtgaagttggtgcccgcatgctcttgcaggtccacgatgaactcttgttagaagcgccaaaagagcgtgcggaagaggtggcagccctcgcgaaagaagttatggaaggcgtgtggcccttagcggtgcctcttgaagtcgaagttggtattggcgaggattggctggctgccaaagga

SEQ ID NO: 3348 - protein, 841 aa, synthetic construct
  REGION 1..841: note = Variant of DNA polymerase I from Thermus sp. strain 2.9
MHHHHHHGGSGVLPVFEPKGRVLLVDGHHLAYRNFFALKGLTTSSGEPVQGVYGFAKSLLKALKEDGDVVIVVFDAKAPSFRHEAYEAYKAGRAPTPEDFPRQLALMKELVDLLGLERLEVPGFEADDVLATLAKKAEREGYEVQILTADRDLFQLLSPRISVLHPEGHRITPEWLWEKYGLRPEQWVDFRALAGDPSDNIPGVKGIGEKTALKLLKEWGSLENLLKNLDQVKPESVREKILAHLEDLKLSRELSRVRTDLPLEVDFQRRREPDWEGLKAFLERLEFGSLLHEFGLLESPLPAEEAPWPPPEGAFLGYRLSRPEPMWAELLALAASAQGRVYRAEDPHGALRGLFVVRGLLAKDLAVVALREGLDLPPTDDPMLLAYLLDPSNTTPEGVARRYGGEWTEDAAKRALLAERLHANLLGRLQGEERLLWLYEEVEKPLSRVLAHMEATGVKLDVAYLENLSLEVAAHMRRLEEEVFRLAGRSFRLNSRDQLERVLFDELGLPPIGKTEKTGKRSTSAAVLEALREVHPIVDKILQYRELAKLKGTYIDRLPALVHPKTGRLHTRFNQTATATGRLSSSDPNLQNIPVRTPLGQKIRRAFVAEEGWRLVALDYSQIELRVLAHLSGDENLIRVFQEGKDIHTQTASWMFGLSAEAIDPLMRRAAKTINFGVLYGMSAFRLSQELGIPYEEAQAFIQKYFQSYPKVKAWIEKTLEEGRTRGYVETLFGRRRYVPDLNARVKGKREAAERMAFNMPVQGTAADLMKLAMVRLFPQLREVGARMLLQVHDELLLEAPKERAEEVAALAKEVMEGVWPLAVPLEVEVGIGEDWLAAKG

SEQ ID NO: 3349 - DNA, 2523 bp, synthetic construct
  misc_feature 1..2523: note = Variant of DNA polymerase I from Thermus sp. strain 2.9
  source 1..2523: mol_type = other DNA
atgcaccatcatcatcatcatggcggtagcggcgtgttaccggtgttcgagcctaaaggtcgcgtgcttctggttgatggccatcatctcgcgtatcgtaacttctttgccctgaaaggattaaccaccagcagcggcgagccggtacagggtgtctacggctttgcaaagtcgctcctgaaagctctgaaagaagacggtgatgtggtgattgttgtctttgatgcgaaagcgccaagttttcgccacgaagcgtacgaagcttacaaagccgggcgtgctccaacgccggaagactttcctcgccaattggcgcttatgaaggaattagtggatttgcttggcctcgaacgcttggaagttcccggtttcgaggcagacgacgtattagcgactctcgcaaagaaagccgaacgtgagggctatgaagtccagatcttgacagcagatcgcgatcttttccagcttttatctccgcgcatctcggtgttacacccggaagggcatcgtatcaccccggaatggctctgggagaaatatggtttgcgtcccgaacaatgggtggattttcgcgccttagcaggcgatccgagcgacaatattccgggagttaaaggtatcggcgagaagacggcgctcaagctccttaaagaatgggggtcgttggagaacttgcttaagaatttagatcaggtcaaaccagagtcagtgcgtattaagattcttgctcacctcgaagacctcaaattaagccgcgaattgtcccgtgtacgcaccgatttgccgctcgaagttgatttccaacgccgccgcgaacctgactgggagggtcttaaagcgtttttagagcgtcttgaatttggttcgctcttgcatgaattcggccttttagaaagcccgttaccagccgaagaagcaccttggccaccgcccgagggcgcgtttttaggttaccgtttgagtcgcccggaaccgatgtgggccgaattactggctcttgcagcgtctgcccagggacgtgtgtatcgcgcggaagaccctcatggtgcgctccgcggcctcttcgaagtccgtggactccttgccaaagacttagctgttgttgcattgcgcgaaggtcttgatttacctccgactgatgatccaatgcttcttgcgtacctcttggacccgtcaaacacgacgcccgaaggcgtagcccgtcgttacggcggcgagtggaccgaagatgcagcgaaacgcgcgttattggccgaacgtttgcacgccaatttattaggacgtttgcaaggcgaggaacgtctcctctggctttacgaagaagtggagaaaccattgagtcgcgtgctcgcgcatatggaagctaccggtgtcaaattagacgtggcgtatttggagaatctcagccttgaagttgctgcccacatgcgccgcttggaggaagaagtattccgtttagcaggccgttcctttcgccttaattctcgcgatcagttagaacgtgtgttgttcgatgaacttggtctccctcctatcggcaagacagagaagaccggtaaacgtagcacttcagcggcggttttagaagctcttcgcgaagtccatcccattgtggacaagatcttgcaataccgcgaactcgcgaaattgaaaggcacctatattgaccgtcttccggcattagtccacccgaaaacgggacgcctccatacccgcttcaaccaaacagccacggcgaccggtcgtttgtcctcctctgatccaaaccttcagaatattccagtacgtaccccattgggccagaagatccgccgtgcgtttgtagctgaggagggttggcgtttagtggccctcgattatagccaaattgaattacgtgtccttgcccatctttctggcgatgagaacctcatccgcgtgtttcaggaaggcaaagacattcacactcaaacggcaagctggatgtttggattatcagctgaagcgatcgatcctttgatgcgtcgtgcagcgaagaccatcaatttcggtgttctctacggtatgagtgcctttcgtttgtcgcaggaattaggcattccctatgaagaagctcaggcgttcattcagaaatactttcaaagctatcccaaagttaaagcatggatcgagaagactctcgaagaaggccgcacacgtggttacgtagagaccttatttggacgtcgccgctatgttcccgatttaaacgctcgcgtgaaaggcaagcgtgaagccgccgaacgcatggcgttcaacatgcctgtacagggcacggcagctgacctcatgaaacttgcaatggtgcgcctttttccacaattgcgtgaagttggtgcccgcatgctcttgcaggtccacgatgaactcttgttagaagcgccaaaagagcgtgcggaagaggtggcagccctcgcgaaagaagttatggaaggcgtgtggcccttagcggtgcctcttgaagtcgaagttggtattggcgaggattggctggctgccaaagga

SEQ ID NO: 3350 - protein, 841 aa, synthetic construct
  REGION 1..841: note = Variant of DNA polymerase I from Thermus sp. strain 2.9
MHHHHHHGGSGVLPVFEPKGRVLLVDGHHLAYRNFFALKGLTTSSGEPVQGVYGFAKSLLKALKEDGDVVIVVFDAKAPSFRHEAYEAYKAGRAPTPEDFPRQLALMKELVDLLGLERLEVPGFEADDVLATLAKKAEREGYEVQILTADRDLFQLLSPRISVLHPEGHRITPEWLWEKYGLRPEQWVDFRALAGDPSDNIPGVKGIGEKTALKLLKEWGSLENLLKNLDQVKPESVRIKILAHLEDLKLSRELSRVRTDLPLEVDFQRRREPDWEGLKAFLERLEFGSLLHEFGLLESPLPAEEAPWPPPEGAFLGYRLSRPEPMWAELLALAASAQGRVYRAEDPHGALRGLFEVRGLLAKDLAVVALREGLDLPPTDDPMLLAYLLDPSNTTPEGVARRYGGEWTEDAAKRALLAERLHANLLGRLQGEERLLWLYEEVEKPLSRVLAHMEATGVKLDVAYLENLSLEVAAHMRRLEEEVFRLAGRSFRLNSRDQLERVLFDELGLPPIGKTEKTGKRSTSAAVLEALREVHPIVDKILQYRELAKLKGTYIDRLPALVHPKTGRLHTRFNQTATATGRLSSSDPNLQNIPVRTPLGQKIRRAFVAEEGWRLVALDYSQIELRVLAHLSGDENLIRVFQEGKDIHTQTASWMFGLSAEAIDPLMRRAAKTINFGVLYGMSAFRLSQELGIPYEEAQAFIQKYFQSYPKVKAWIEKTLEEGRTRGYVETLFGRRRYVPDLNARVKGKREAAERMAFNMPVQGTAADLMKLAMVRLFPQLREVGARMLLQVHDELLLEAPKERAEEVAALAKEVMEGVWPLAVPLEVEVGIGEDWLAAKG

SEQ ID NO: 3351 - DNA, 2523 bp, synthetic construct
  misc_feature 1..2523: note = Variant of DNA polymerase I from Thermus sp. strain 2.9
  source 1..2523: mol_type = other DNA
atgcaccatcatcatcatcatggcggtagcggcgtgttaccggtgttcgagcctaaaggtcgcgtgcttctggttgatggccatcatctcgcgtatcgtaacttctttgccctgaaaggattaaccaccagcagcggcgagccggtacagggtgtctacggctttgcaaagtcgctcctgaaagctctgaaagaagacggtgatgtggtgattgttgtctttgatgcgaaagcgccaagttttcgccacgaagcgtacgaagcttacaaagccgggcgtgctccaacgccggaagactttcctcgccaattggcgcttatgaaggaattagtggatttgcttggcctcgaacgcttggaagttcccggtttcgaggcagacgacgtattagcgactctcgcaaagaaagccgaacgtgagggctatgaagtccagatcttgacagcagatcgcgatcttttccagcttttatctccgcgcatctcggtgttacacccggaagggcatcgtatcaccccggaatggctctgggagaaatatggtttgcgtcccgaacaatgggtggattttcgcgccttagcaggcgatccgagcgacaatattccgggagttaaaggtatcggcgtgaagacggcgctcaagctccttaaagaatgggggtcgttggagaacttgcttaagaatttagatcaggtcaaaccagagtcagtgcgtgagaagattcttgctcacctcgaagacctcaaattaagccgcgaattgtcccgtgtacgcaccgatttgccgctcgaagttgatttccaacgccgccgcgaacctgactgggagggtcttaaagcgtttttagagcgtcttgaatttggttcgctcttgcatgaattcggccttttagaaagcccgttaccagccgaagaagcaccttggccaccgcccgagggcgcgtttttaggttaccgtttgagtcgcccggaaccgatgtgggccgaattactggctcttgcagcgtctgcccagggacgtgtgtatcgcgcggaagaccctcatggtgcgctccgcggcctcttcgaagtccgtggactccttgccaaagacttagctgttgttgcattgcgcgaaggtcttgatttacctccgactgatgatccaatgcttcttgcgtacctcttggacccgtcaaacacgacgcccgaaggcgtagcccgtcgttacggcggcgagtggaccgaagatgcagcgaaacgcgcgttattggccgaacgtttgcacgccaatttattaggacgtttgcaaggcgaggaacgtctcctctggctttacgaagaagtggagaaaccattgagtcgcgtgctcgcgcatatggaagctaccggtgtcaaattagacgtggcgtatttggagaatctcagccttgaagttgctgcccacatgcgccgcttggaggaagaagtattccgtttagcaggccgttcctttcgccttaattctcgcgatcagttagaacgtgtgttgttcgatgaacttggtctccctcctatcggcaagacagagaagaccggtaaacgtagcacttcagcggcggttttagaagctcttcgcgaagtccatcccattgtggacaagatcttgcaataccgcgaactcgcgaaattgaaaggcacctatattgaccgtcttccggcattagtccacccgaaaacgggacgcctccatacccgcttcaaccaaacagccacggcgaccggtcgtttgtcctcctctgatccaaaccttcagaatattccagtacgtaccccattgggccagaagatccgccgtgcgtttgtagctgaggagggttggcgtttagtggccctcgattatagccaaattgaattacgtgtccttgcccatctttctggcgatgagaacctcatccgcgtgtttcaggaaggcaaagacattcacactcaaacggcaagctggatgtttggattatcagctgaagcgatcgatcctttgatgcgtcgtgcagcgaagaccatcaatttcggtgttctctacggtatgagtgcctttcgtttgtcgcaggaattaggcattccctatgaagaagctcaggcgttcattcagaaatactttcaaagctatcccaaagttaaagcatggatcgagaagactctcgaagaaggccgcacacgtggttacgtagagaccttatttggacgtcgccgctatgttcccgatttaaacgctcgcgtgaaaggcaagcgtgaagccgccgaacgcatggcgttcaacatgcctgtacagggcacggcagctgacctcatgaaacttgcaatggtgcgcctttttccacaattgcgtgaagttggtgcccgcatgctcttgcaggtccacgatgaactcttgttagaagcgccaaaagagcgtgcggaagaggtggcagccctcgcgaaagaagttatggaaggcgtgtggcccttagcggtgcctcttgaagtcgaagttggtattggcgaggattggctggctgccaaagga

SEQ ID NO: 3352 - protein, 841 aa, synthetic construct
  REGION 1..841: note = Variant of DNA polymerase I from Thermus sp. strain 2.9
MHHHHHHGGSGVLPVFEPKGRVLLVDGHHLAYRNFFALKGLTTSSGEPVQGVYGFAKSLLKALKEDGDVVIVVFDAKAPSFRHEAYEAYKAGRAPTPEDFPRQLALMKELVDLLGLERLEVPGFEADDVLATLAKKAEREGYEVQILTADRDLFQLLSPRISVLHPEGHRITPEWLWEKYGLRPEQWVDFRALAGDPSDNIPGVKGIGVKTALKLLKEWGSLENLLKNLDQVKPESVREKILAHLEDLKLSRELSRVRTDLPLEVDFQRRREPDWEGLKAFLERLEFGSLLHEFGLLESPLPAEEAPWPPPEGAFLGYRLSRPEPMWAELLALAASAQGRVYRAEDPHGALRGLFEVRGLLAKDLAVVALREGLDLPPTDDPMLLAYLLDPSNTTPEGVARRYGGEWTEDAAKRALLAERLHANLLGRLQGEERLLWLYEEVEKPLSRVLAHMEATGVKLDVAYLENLSLEVAAHMRRLEEEVFRLAGRSFRLNSRDQLERVLFDELGLPPIGKTEKTGKRSTSAAVLEALREVHPIVDKILQYRELAKLKGTYIDRLPALVHPKTGRLHTRFNQTATATGRLSSSDPNLQNIPVRTPLGQKIRRAFVAEEGWRLVALDYSQIELRVLAHLSGDENLIRVFQEGKDIHTQTASWMFGLSAEAIDPLMRRAAKTINFGVLYGMSAFRLSQELGIPYEEAQAFIQKYFQSYPKVKAWIEKTLEEGRTRGYVETLFGRRRYVPDLNARVKGKREAAERMAFNMPVQGTAADLMKLAMVRLFPQLREVGARMLLQVHDELLLEAPKERAEEVAALAKEVMEGVWPLAVPLEVEVGIGEDWLAAKG

SEQ ID NO: 3353 - DNA, 2523 bp, synthetic construct
  misc_feature 1..2523: note = Variant of DNA polymerase I from Thermus sp. strain 2.9
  source 1..2523: mol_type = other DNA
atgcaccatgcgcatcatcatggcggtagcggcgtgttaccggtgttcgagcctaaaggtcgcgtgcttctggttgatggccatcatctcgcgtatcgtaacttctttgccctgaaaggattaaccaccagcagcggcgagccggtacagggtgtctacggctttgcaaagtcgctcctgaaagctctgaaagaagacggtgatgtggtgattgttgtctttgatgcgaaagcgccaagttttcgccacgaagcgtacgaagcttacaaagccgggcgtgctccaacgccggaagactttcctcgccaattggcgcttatgaaggaattagtggatttgcttggcctcgaacgcttggaagttcccggtttcgaggcagacgacgtattagcgactctcgcaaagaaagccgaacgtgagggctatgaagtccagatcttgacagcagatcgcgatcttttccagcttttatctccgcgcatctcggtgttacacccggaagggcatcgtatcaccccggaatggctctgggagaaatatggtttgcgtcccgaacaatgggtggattttcgcgccttagcaggcgatccgagcgacaatattccgggagttaaaggtatcggcgagaagacggcgctcaagctccttaaagaatgggggtcgttggagaacttgcttaagaatttagatcaggtcaaaccagagtcagtgcgtgagaagattcttgctcacctcgaagacctcaaattaagccgcgaattgtcccgtgtacgcaccgatttgccgctcgaagttgatttccaacgccgccgcgaacctgactgggagggtcttaaagcgtttttagagcgtcttgaatttggttcgctcttgcatgaattcggccttttagaaagcccgttaccagccgaagaagcaccttggccaccgcccgagggcgcgtttttaggttaccgtttgagtcgcccggaaccgatgtgggccgaattactggctcttgcagcgtctgcccagggacgtgtgtatcgcgcggaagaccctcatggtgcgctccgcggcctcttcgaagtccgtggactccttgccaaagacttagctgttgttgcattgcgcgaaggtcttgatttacctccgactgatgatccaatgcttcttgcgtacctcttggacccgtcaaacacgacgcccgaaggcgtagcccgtcgttacggcggcgagtggaccgaagatgcagcgaaacgcgcgttattggccgaacgtttgcacgccaatttattaggacgtttgcaaggcgaggaacgtctcctctggctttacgaagaagtggagaaaccattgagtcgcgtgctcgcgcatatggaagctaccggtgtcaaattagacgtggcgtatttggagaatctcagccttgaagttgctgcccacatgcgccgcttggaggaagaagtattccgtttagcaggccgttcctttcgccttaattctcgcgatcagttagaacgtgtgttgttcgatgaacttggtctccctcctatcggcaagacagagaagaccggtaaacgtagcacttcagcggcggttttagaagctcttcgcgaagtccatcccattgtggacaagatcttgcaataccgcgaactcgcgaaattgaaaggcacctatattgaccgtcttccggcattagtccacccgaaaacgggacgcctccatacccgcttcaaccaaacagccacggcgaccggtcgtttgtcctcctctgatccaaaccttcagaatattccagtacgtaccccattgggccagaagatccgccgtgcgtttgtagctgaggagggttggcgtttagtggccctcgattatagccaaattgaattacgtgtccttgcccatctttctggcgatgagaacctcatccgcgtgtttcaggaaggcaaagacattcacactcaaacggcaagctggatgtttggattatcagctgaagcgatcgatcctttgatgcgtcgtgcagcgaagaccatcaatttcggtgttctctacggtatgagtgcctttcgtttgtcgcaggaattaggcattccctatgaagaagctcaggcgttcattcagaaatactttcaaagctatcccaaagttaaagcatggatcgagaagactctcgaagaaggccgcacacgtggttacgtagagaccttatttggacgtcgccgctatgttcccgatttaaacgctcgcgtgaaaggcaagcgtgaagccgccgaacgcatggcgttcaacatgcctgtacagggcacggcagctgacctcatgaaacttgcaatggtgcgcctttttccacaattgcgtgaagttggtgcccgcatgctcttgcaggtccacgatgaactcttgttagaagcgccaaaagagcgtgcggaagaggtggcagccctcgcgaaagaagttatggaaggcgtgtggcccttagcggtgcctcttgaagtcgaagttggtattggcgaggattggctggctgccaaagga

SEQ ID NO: 3354 - protein, 841 aa, synthetic construct
  REGION 1..841: note = Variant of DNA polymerase I from Thermus sp. strain 2.9
MHHAHHHGGSGVLPVFEPKGRVLLVDGHHLAYRNFFALKGLTTSSGEPVQGVYGFAKSLLKALKEDGDVVIVVFDAKAPSFRHEAYEAYKAGRAPTPEDFPRQLALMKELVDLLGLERLEVPGFEADDVLATLAKKAEREGYEVQILTADRDLFQLLSPRISVLHPEGHRITPEWLWEKYGLRPEQWVDFRALAGDPSDNIPGVKGIGEKTALKLLKEWGSLENLLKNLDQVKPESVREKILAHLEDLKLSRELSRVRTDLPLEVDFQRRREPDWEGLKAFLERLEFGSLLHEFGLLESPLPAEEAPWPPPEGAFLGYRLSRPEPMWAELLALAASAQGRVYRAEDPHGALRGLFEVRGLLAKDLAVVALREGLDLPPTDDPMLLAYLLDPSNTTPEGVARRYGGEWTEDAAKRALLAERLHANLLGRLQGEERLLWLYEEVEKPLSRVLAHMEATGVKLDVAYLENLSLEVAAHMRRLEEEVFRLAGRSFRLNSRDQLERVLFDELGLPPIGKTEKTGKRSTSAAVLEALREVHPIVDKILQYRELAKLKGTYIDRLPALVHPKTGRLHTRFNQTATATGRLSSSDPNLQNIPVRTPLGQKIRRAFVAEEGWRLVALDYSQIELRVLAHLSGDENLIRVFQEGKDIHTQTASWMFGLSAEAIDPLMRRAAKTINFGVLYGMSAFRLSQELGIPYEEAQAFIQKYFQSYPKVKAWIEKTLEEGRTRGYVETLFGRRRYVPDLNARVKGKREAAERMAFNMPVQGTAADLMKLAMVRLFPQLREVGARMLLQVHDELLLEAPKERAEEVAALAKEVMEGVWPLAVPLEVEVGIGEDWLAAKG

SEQ ID NO: 3355 - DNA, 2523 bp, synthetic construct
  misc_feature 1..2523: note = Variant of DNA polymerase I from Thermus sp. strain 2.9
  source 1..2523: mol_type = other DNA
atgcaccatcatcatcatcatggcggtagcggcgtgttaccggtgttcgagcctaaaggtcgcgtgcttctggttgatggccatcatctcgcgtatcgtaacttctttgccctgaaaggattaaccaccagcagcggcgagccggtacagggtgtctacggctttgcaaagtcgctcctgaaagctctgaaagaagacggtgatgtggtgattgttgtctttgatgcgaaagcgccaagttttcgccacgaagcgtacgaagcttacaaagccgggcgtgctccaacgccggaagactttcctcgccaattggcgcttatgaaggaattagtggatttgcttggcctcgaacgcttggaagttcccggtttcgaggcagacgacgtattagcgactctcgcaaagaaagccgaacgtgagggctatgaagtccagatcttgacagcagatcgcgatcttttccagcttttatctccgcgcatctcggtgttacacccggaagggcatcgtatcaccccggaatggctcttggagaaatatggtttgcgtcccgaacaatgggtggattttcgcgccttagcaggcgatccgagcgacaatattccgggagttaaaggtatcggcgagaagacggcgctcaagctccttaaagaatgggggtcgttggagaacttgcttaagaatttagatcaggtcaaaccagagtcagtgcgtgagaagattcttgctcacctcgaagacctcaaattaagccgcgaattgtcccgtgtacgcaccgatttgccgctcgaagttgatttccaacgccgccgcgaacctgactgggagggtcttaaagcgtttttagagcgtcttgaatttggttcgctcttgcatgaattcggccttttagaaagcccgttaccagccgaagaagcaccttggccaccgcccgagggcgcgtttttaggttaccgtttgagtcgcccggaaccgatgtgggccgaattactggctcttgcagcgtctgcccagggacgtgtgtatcgcgcggaagaccctcatggtgcgctccgcggcctcttcgaagtccgtggactccttgccaaagacttagctgttgttgcattgcgcgaaggtcttgatttacctccgactgatgatccaatgcttcttgcgtacctcttggacccgtcaaacacgacgcccgaaggcgtagcccgtcgttacggcggcgagtggaccgaagatgcagcgaaacgcgcgttattggccgaacgtttgcacgccaatttattaggacgtttgcaaggcgaggaacgtctcctctggctttacgaagaagtggagaaaccattgagtcgcgtgctcgcgcatatggaagctaccggtgtcaaattagacgtggcgtatttggagaatctcagccttgaagttgctgcccacatgcgccgcttggaggaagaagtattccgtttagcaggccgttcctttcgccttaattctcgcgatcagttagaacgtgtgttgttcgatgaacttggtctccctcctatcggcaagacagagaagaccggtaaacgtagcacttcagcggcggttttagaagctcttcgcgaagtccatcccattgtggacaagatcttgcaataccgcgaactcgcgaaattgaaaggcacctatattgaccgtcttccggcattagtccacccgaaaacgggacgcctccatacccgcttcaaccaaacagccacggcgaccggtcgtttgtcctcctctgatccaaaccttcagaatattccagtacgtaccccattgggccagaagatccgccgtgcgtttgtagctgaggagggttggcgtttagtggccctcgattatagccaaattgaattacgtgtccttgcccatctttctggcgatgagaacctcatccgcgtgtttcaggaaggcaaagacattcacactcaaacggcaagctggatgtttggattatcagctgaagcgatcgatcctttgatgcgtcgtgcagcgaagaccatcaatttcggtgttctctacggtatgagtgcctttcgtttgtcgcaggaattaggcattccctatgaagaagctcaggcgttcattcagaaatactttcaaagctatcccaaagttaaagcatggatcgagaagactctcgaagaaggccgcacacgtggttacgtagagaccttatttggacgtcgccgctatgttcccgatttaaacgctcgcgtgaaaggcaagcgtgaagccgccgaacgcatggcgttcaacatgcctgtacagggcacggcagctgacctcatgaaacttgcaatggtgcgcctttttccacaattgcgtgaagttggtgcccgcatgctcttgcaggtccacgatgaactcttgttagaagcgccaaaagagcgtgcggaagaggtggcagccctcgcgaaagaagttatggaaggcgtgtggcccttagcggtgcctcttgaagtcgaagttggtattggcgaggattggctggctgccaaagga

SEQ ID NO: 3356 - protein, 841 aa, synthetic construct
  REGION 1..841: note = Variant of DNA polymerase I from Thermus sp. strain 2.9
MHHHHHHGGSGVLPVFEPKGRVLLVDGHHLAYRNFFALKGLTTSSGEPVQGVYGFAKSLLKALKEDGDVVIVVFDAKAPSFRHEAYEAYKAGRAPTPEDFPRQLALMKELVDLLGLERLEVPGFEADDVLATLAKKAEREGYEVQILTADRDLFQLLSPRISVLHPEGHRITPEWLLEKYGLRPEQWVDFRALAGDPSDNIPGVKGIGEKTALKLLKEWGSLENLLKNLDQVKPESVREKILAHLEDLKLSRELSRVRTDLPLEVDFQRRREPDWEGLKAFLERLEFGSLLHEFGLLESPLPAEEAPWPPPEGAFLGYRLSRPEPMWAELLALAASAQGRVYRAEDPHGALRGLFEVRGLLAKDLAVVALREGLDLPPTDDPMLLAYLLDPSNTTPEGVARRYGGEWTEDAAKRALLAERLHANLLGRLQGEERLLWLYEEVEKPLSRVLAHMEATGVKLDVAYLENLSLEVAAHMRRLEEEVFRLAGRSFRLNSRDQLERVLFDELGLPPIGKTEKTGKRSTSAAVLEALREVHPIVDKILQYRELAKLKGTYIDRLPALVHPKTGRLHTRFNQTATATGRLSSSDPNLQNIPVRTPLGQKIRRAFVAEEGWRLVALDYSQIELRVLAHLSGDENLIRVFQEGKDIHTQTASWMFGLSAEAIDPLMRRAAKTINFGVLYGMSAFRLSQELGIPYEEAQAFIQKYFQSYPKVKAWIEKTLEEGRTRGYVETLFGRRRYVPDLNARVKGKREAAERMAFNMPVQGTAADLMKLAMVRLFPQLREVGARMLLQVHDELLLEAPKERAEEVAALAKEVMEGVWPLAVPLEVEVGIGEDWLAAKG

SEQ ID NO: 3357 - DNA, 2523 bp, synthetic construct
  misc_feature 1..2523: note = Variant of DNA polymerase I from Thermus sp. strain 2.9
  source 1..2523: mol_type = other DNA
atgcaccatcatcatcatcatggcggtagcggcgtgttaccggtgttcgagcctaaaggtcgcgtgcttctggttgatggccatcatctcgcgtatcgtaacttctttgccctgaaaggattaaccaccagcagcggcgagccggtacagggtgtctacggctttgcaaagtcgctcctgaaagctctgaaagaagacggtgatgtggtgattgttgtctttgatgcgaaagcgccaagttttcgccacgaagcgtacgaagcttacaaagccgggcgtgctccaacgccggaagactttcctcgccaattggcgcttatgaaggaattagtggatttgcttggcctcgaacgcttggaagttcccggtttcgaggcagacgacgtattagcgactctcgcaaagaaagccgaacgtgagggctatgaagtccagatcttgacagcagatcgcgatcttttccagcttttatctccgcgcatctcggtgttacacccggaagggcatcgtatcaccccggaatggctctgggagaaatatggtttgcgtcccgaacaatgggtggattttcgcgccttagcaggcgatccgagcgacaatattccgggagttaaaggtatcggcgagaagacggcgctcaagctccttaaagaatgggggtcgttggagaacttgcttaagaatttagatcaggtcaaaccagagtcagtgcgtgagaagattcttgctcacctcgaagacctcaaattaagccgcgaattgtcccgtgtacgcaccgatttgccgctcgaagttgatttccaacgccgccgcgaacctgactgggagggtcttaaagcgtttttagagcgtcttgaatttggttcgctcttgcatgaattcggccttttagaaagcccgttaccagccgaagaagcaccttggccaccgcccgagggcgcgtttttaggttaccgtttgagtcgcccggaaccgatgtgggccgaattactggctcttgcagcgtctgcccagggacgtgtgtatcgcgcggaagaccctcatggtgcgctccgcggcctcttcgaagtccgtggactccttgccaaagacttagctgttgttgcattgcgcgaaggtcttgatttacctccgactgatgatccaatgcttcttgcgtacctcttggacccgtcaaacacgacgcccgaaggcgtagcccgtcgttacggcggcgagtggaccgaagatgcagcgaaacgcgcgttattggccgaacgtttgcacgccaatttattaggacgtttgcaaggcgaggaacgtctcctctggctttacgaagaagtggagaaaccattgagtcgcgtgctcgcgcatatggaagctaccggtgtcaaattagacgtggcgtatttggagaatctcagccttgaagttgctgcccacatgcgccgcttggaggaagaagtattccgtttagcaggccgttcctttcgccttaattctcgcgatcagttagaacgtgtgttgttcgatgaacttggtctccctcctatcggcaagacagagaagaccggtaaacgtagcacttcagcggcggttttagaagctcttcgcgaagtccatcccattgtggacaagatcttgcaataccgcgaactcgcgaaattgaaaggcacctatattgaccgtcttccggcattagtccacccgaaaacgggacgcctccatacccgcttcaaccaaacagccacggcgaccggtcgtttgtcctcctctgatccaaaccttcagaatattccagtacgtaccccattgggccagaagatccgccgtgcgtttgtagctgaggagggttggcgtttagtggccctcgattatagccaaattgaattacgtgtccttgcccatctttctggcgatgagaacctcatccgcgtgtttcaggaaggcaaagacattcacactcaaacggcaagctggatgtttggattatcagctgaagcgatcgatcctttgatgcgtcgtgcagcgaagaccatcaatttcggtgttctctacggtatgagtgcctttcgtttgtcgcaggaattaggcattccctatgaagaagctcaggcgttcattcagaaatactttcaaagctatcccaaagttaaagcatggatcgagaagactctcgaagaaggccgcacacgtggttacgtagagaccttatttggacgtcgccgctatgttcccgatttaaacggtcgcgtgaaaggcaagcgtgaagccgccgaacgcatggcgttcaacatgcctgtacagggcacggcagctgacctcatgaaacttgcaatggtgcgcctttttccacaattgcgtgaagttggtgcccgcatgctcttgcaggtccccgatgaactcttgttagaagcgccaaaagagcgtgcggaagaggtggcagccctcgcgaaagaagttatggaaggcgtgtggcccttagcggtgcctcttgaagtcgaagttggtattggcgaggattggctggctgccaaagga

SEQ ID NO: 3358 - protein, 841 aa, synthetic construct
  REGION 1..841: note = Variant of DNA polymerase I from Thermus sp. strain 2.9
MHHHHHHGGSGVLPVFEPKGRVLLVDGHHLAYRNFFALKGLTTSSGEPVQGVYGFAKSLLKALKEDGDVVIVVFDAKAPSFRHEAYEAYKAGRAPTPEDFPRQLALMKELVDLLGLERLEVPGFEADDVLATLAKKAEREGYEVQILTADRDLFQLLSPRISVLHPEGHRITPEWLWEKYGLRPEQWVDFRALAGDPSDNIPGVKGIGEKTALKLLKEWGSLENLLKNLDQVKPESVREKILAHLEDLKLSRELSRVRTDLPLEVDFQRRREPDWEGLKAFLERLEFGSLLHEFGLLESPLPAEEAPWPPPEGAFLGYRLSRPEPMWAELLALAASAQGRVYRAEDPHGALRGLFEVRGLLAKDLAVVALREGLDLPPTDDPMLLAYLLDPSNTTPEGVARRYGGEWTEDAAKRALLAERLHANLLGRLQGEERLLWLYEEVEKPLSRVLAHMEATGVKLDVAYLENLSLEVAAHMRRLEEEVFRLAGRSFRLNSRDQLERVLFDELGLPPIGKTEKTGKRSTSAAVLEALREVHPIVDKILQYRELAKLKGTYIDRLPALVHPKTGRLHTRFNQTATATGRLSSSDPNLQNIPVRTPLGQKIRRAFVAEEGWRLVALDYSQIELRVLAHLSGDENLIRVFQEGKDIHTQTASWMFGLSAEAIDPLMRRAAKTINFGVLYGMSAFRLSQELGIPYEEAQAFIQKYFQSYPKVKAWIEKTLEEGRTRGYVETLFGRRRYVPDLNGRVKGKREAAERMAFNMPVQGTAADLMKLAMVRLFPQLREVGARMLLQVPDELLLEAPKERAEEVAALAKEVMEGVWPLAVPLEVEVGIGEDWLAAKG

SEQ ID NO: 3359 - DNA, 2523 bp, synthetic construct
  misc_feature 1..2523: note = Variant of DNA polymerase I from Thermus sp. strain 2.9
  source 1..2523: mol_type = other DNA
atgcaccatcatcatcatcatggcggtagcggcgtgttaccggtgttcgagcctaaaggtcgcgtgcttctggttgatggccatcatctcgcgtatcgtaacttctttgccctgaaaggattaaccaccagcagcggcgagccggtacagggtgtctacggctttgcaaagtcgctcctgaaagctctgaaagaagacggtgatgtggtgattgttgtctttgatgcgaaagcgccaagttttcgccacgaagcgtacgaagcttacaaagccgggcgtgctccaacgccggaagactttcctcgccaattggcgcttatgaaggaattagtggatttgcttggcctcgaacgcttggaagttcccggtttcgaggcagacgacgtattagcgactctcgcaaagaaagccgaacgtgagggctatgaagtccagatcttgacagcagatcgcgatcttttccagcttttatctccgcgcatctcggtgttacacccggaagggcatcgtatcaccccggaatggctctgggagaaatatggtttgcgtcccgaacaatgggtggattttcgcgccttagcaggcgatccgagcgacaatattccgggagttaaaggtatcggcgagaagacggcgctcaagctccttaaagaatgggggtcgttggagaacttgcttaagaatttagatcaggtcaaaccagagtcagtgcgtgagaagattcttgctcacctcgaagacctcaagttaagccgcgaattgtcccgtgtacgcaccgatttgccgctcgaagttgatttccaacgccgccgcgaacctgactgggagggtcttaaagcgtttttagagcgtcttgaatttggttcgctcttgcatgaattcggccttttagaaagcccgttaccagccgaagaagcaccttggccaccgcccgagggcgcgtttttaggttaccgtttgagtcgcccggaaccgatgtgggccgaattactggctcttgcagcgtctgcccagggacgtgtgtatcgcgcggaagaccctcatggtgcgctccgcggcctcttcgaagtccgtggactccttgccaaagacttagctgttgttgcattgcgcgaaggtcttgatttacctccgactgatgatccaatgcttcttgcgtacctcttggacccgtcaaacacgacgcccgaaggcgtagcccgtcgttacggcggcgagtggaccgaagatgcagcgaaacgcgcgttattggccgaacgtttgcacgccaatttattaggacgtttgcaaggcgaggaacgtctcctctggctttacgaagaagtggagaaaccattgagtcgcgtgctcgcgcatatggaagctaccggtgtcaaattagacgtggcgtatttggagaatctcagccttgaagttgctgcccacatgcgccgcttggaggaagaagtattccgtttagcaggccgttcctttcgccttaattctcgcgatcagttagaacgtgtgttgttcgatgaacttggtctccctcctatcggcaagacagagaagaccggtaaacgtagcacttcagcggcggttttagaagctcttcgcgaagtccatcccattgtggacaagatcttgcaataccgcgaactcgcgaaattgaaaggcacctatattgaccgtcttccggcattagtccacccgaaaacgggacgcctccatacccgcttcaaccaaacagccacggcgaccggtcgtttgtcctcctctgatccaaaccttcagaatattccagtacgtaccccgttgggccagaagatccgccgtgcgtttgtagctgaggagggttggcgtttagtggccctcgattatagccaaattgaattacgtgtccttgcccatctttctggcgatgagaacctcatccgcgtgtttgaggaaggcaaagacattcacactcaaacggcaagctggatgtttggattatcagctgaagcgatcgatcctttgatgcgtcgtgcagcgaagaccatcaatttcggtgttctctacggtatgagtgcctttcgtttgtcgcaggaattagacattccctatgaagaagctcaggcgttcattcagaaatactttcaaagctatcccaaagttaaagcatggatcgagaagactctcgaagaaggccgcacccgtggttacgtagagaccttatttggacgtcgccgctatgttcccgatttaaacgctcgcgtgaaaggcaagcgtgaagccgccgaacgcatggcgttcaacatgcctgtacagggcacggcagctgacctcatgaaacttgcaatggtgcgcctttttccacaattgcgtgaagttggtgcccgcatgctcttgcaggtccacgatgaactcttgttagaagcgccaaaagagcgtgcggaagaggtggcagccctcgcgaaagaagttatggaaggcgtgtggcccttagcggtgcctcttgaagtcgaagttggtattggcgaggattggctggctgccaaagga

SEQ ID NO: 3360 - protein, 841 aa, synthetic construct
  REGION 1..841: note = Variant of DNA polymerase I from Thermus sp. strain 2.9
MHHHHHHGGSGVLPVFEPKGRVLLVDGHHLAYRNFFALKGLTTSSGEPVQGVYGFAKSLLKALKEDGDVVIVVFDAKAPSFRHEAYEAYKAGRAPTPEDFPRQLALMKELVDLLGLERLEVPGFEADDVLATLAKKAEREGYEVQILTADRDLFQLLSPRISVLHPEGHRITPEWLWEKYGLRPEQWVDFRALAGDPSDNIPGVKGIGEKTALKLLKEWGSLENLLKNLDQVKPESVREKILAHLEDLKLSRELSRVRTDLPLEVDFQRRREPDWEGLKAFLERLEFGSLLHEFGLLESPLPAEEAPWPPPEGAFLGYRLSRPEPMWAELLALAASAQGRVYRAEDPHGALRGLFEVRGLLAKDLAVVALREGLDLPPTDDPMLLAYLLDPSNTTPEGVARRYGGEWTEDAAKRALLAERLHANLLGRLQGEERLLWLYEEVEKPLSRVLAHMEATGVKLDVAYLENLSLEVAAHMRRLEEEVFRLAGRSFRLNSRDQLERVLFDELGLPPIGKTEKTGKRSTSAAVLEALREVHPIVDKILQYRELAKLKGTYIDRLPALVHPKTGRLHTRFNQTATATGRLSSSDPNLQNIPVRTPLGQKIRRAFVAEEGWRLVALDYSQIELRVLAHLSGDENLIRVFEEGKDIHTQTASWMFGLSAEAIDPLMRRAAKTINFGVLYGMSAFRLSQELDIPYEEAQAFIQKYFQSYPKVKAWIEKTLEEGRTRGYVETLFGRRRYVPDLNARVKGKREAAERMAFNMPVQGTAADLMKLAMVRLFPQLREVGARMLLQVHDELLLEAPKERAEEVAALAKEVMEGVWPLAVPLEVEVGIGEDWLAAKG

SEQ ID NO: 3361 - DNA, 2523 bp, synthetic construct
  misc_feature 1..2523: note = Variant of DNA polymerase I from Thermus sp. strain 2.9
  source 1..2523: mol_type = other DNA
atgcaccatcatcatcatcatggcggtagcggcgtgttaccggtgttcgagcctaaaggtcgcgtgcttctggttgatggccatcatctcgcgtatcgtaacttctttgccctgaaaggattaaccaccagcagcggcgagccggtacagggtgtctacggctttgcaaagtcgctcctgaaagctctgaaagaagacggtgatgtggtgattgttgtctttgatgcgaaagcgccaagttttcgccacgaagcgtacgaagcttacaaagccgggcgtgctccaacgccggaagactttcctcgccaattggcgcttatgaaggaattagtggatttgcttggcctcgaacgcttggaagttcccggtttcgaggcagacgacgtattagcgactctcgcaaagaaagccgaacgtgagggctatgaagtccagatcttgacagcagatcgcgatcttttccagcttttatctccgcgcatctcggtgttacacccggaagggcatcgtatcaccccggaatggctctgggagaaatatggtttgcgtcccgaacaatgggtggattttcgcgccttagcaggcgatccgagcgacaatattccgggagttaaaggtatcggcgagaagacggcgctcaagctccttaaagaatgggggtcgttggagaacttgcttaagaatttagatcaggtcaaaccagagtcagtgcgtgagaagattcttgctcacctcgaagacctcaaattaagccgcgaattgtcccgtgtacgcaccgatttgccgctcgaagttgatttccaacgccgccgcgaacctgactgggagggtcttaaagcgtttttagagcgtcttgaatttggttcgctcttgcatgaattcggccttttagaaagcccgttaccagccgaagaagcaccttggccaccgcccgagggcgcgtttttaggttaccgtttgagtcgcccggaaccgatgtgggccgaattactggctcttgcagcgtctgcccagggacgtgtgtatcgcgcggaagaccctcatggtgcgctccgcggcctcttcgaagtccgtggactccttgccaaagacttagctgttgttgcattgcgcgaaggtcttgatttacctccgactgatgatccaatgcttcttgcgtacctcttggacccgtcaaacacgacgcccgaaggcgtagcccgtcgttacggcggcgagtggaccgaagatgcagcgaaacgcgcgttattggccgaacgtttgcactcgaatttattaggacgtttgcaaggcgaggaacgtctcctctggctttacgaagaagtggagaaaccattgagtcgcgtgctcgcgcatatggaagctaccggtgtcaaattagacgtggcgtatttggagaatctcagccttgaagttgctgcccacatgcgccgcttggaggaagaagtattccgtttagcaggccgttcctttcgccttaattctcgcgatcagttagaacgtgtgttgttcgatgaacttggtctccctcctatcggcaagacagagaagaccggtaaacgtagcacttcagcggcggttttagaagctcttcgcgaagtccatcccattgtggacaagatcttgcaataccgcgaactcgcgaaattgaaaggcacctatattgaccgtcttccggcattagtccacccgaaaacgggacgcctccatacccgcttcaaccaaacagccacggcgaccggtcgtttgtcctcctctgatccaaaccttcagaatattccagtacgtaccccattgggccagaagatccgccgtgcgtttgtagctgaggagggttggcgtttagtggccctcgattatagccaaattgaattacgtgtccttgcccatctttctggcgatgagaacctcatccgcgtgtttcaggaaggcaaagacattcacactcaaacggcaagctggatgtttggattatcagctgaagcgatcgatcctttgatgcgtcgtgcagcgaagaccatcaatttcggtgttctctacggtatgagtgcctttcgtttgtcgcaggaattaggcattccctatgaagaagctcaggcgttcattcagaaatactttcaaagctatcccaaagttaaagcatggatcgagaagactctcgaagaaggccgcacacgtggttacgtagagaccttatttggacgtcgccgctatgttcccgatttaaacgctcgcgtgaaaggcaagcgtgaagccgccgaacgcatggcgttcaacatgcctgtacagggcacggcagctgacctcatgaaacttgcaatggtgcgcctttttccacaattgcgtgaagttggtgcccgcatgctcttgcaggtccacgatgaactcttgttagaagcgccaaaagagcgtgcggaagaggtggcagccctcgcgaaagaagttatggaaggcgtgtggcccttagcggtgcctcttgaagtcgaagttggtattggcgaggattggctggctgccaaagga

SEQ ID NO: 3362 - protein, 841 aa, synthetic construct
  REGION 1..841: note = Variant of DNA polymerase I from Thermus sp. strain 2.9
MHHHHHHGGSGVLPVFEPKGRVLLVDGHHLAYRNFFALKGLTTSSGEPVQGVYGFAKSLLKALKEDGDVVIVVFDAKAPSFRHEAYEAYKAGRAPTPEDFPRQLALMKELVDLLGLERLEVPGFEADDVLATLAKKAEREGYEVQILTADRDLFQLLSPRISVLHPEGHRITPEWLWEKYGLRPEQWVDFRALAGDPSDNIPGVKGIGEKTALKLLKEWGSLENLLKNLDQVKPESVREKILAHLEDLKLSRELSRVRTDLPLEVDFQRRREPDWEGLKAFLERLEFGSLLHEFGLLESPLPAEEAPWPPPEGAFLGYRLSRPEPMWAELLALAASAQGRVYRAEDPHGALRGLFEVRGLLAKDLAVVALREGLDLPPTDDPMLLAYLLDPSNTTPEGVARRYGGEWTEDAAKRALLAERLHSNLLGRLQGEERLLWLYEEVEKPLSRVLAHMEATGVKLDVAYLENLSLEVAAHMRRLEEEVFRLAGRSFRLNSRDQLERVLFDELGLPPIGKTEKTGKRSTSAAVLEALREVHPIVDKILQYRELAKLKGTYIDRLPALVHPKTGRLHTRFNQTATATGRLSSSDPNLQNIPVRTPLGQKIRRAFVAEEGWRLVALDYSQIELRVLAHLSGDENLIRVFQEGKDIHTQTASWMFGLSAEAIDPLMRRAAKTINFGVLYGMSAFRLSQELGIPYEEAQAFIQKYFQSYPKVKAWIEKTLEEGRTRGYVETLFGRRRYVPDLNARVKGKREAAERMAFNMPVQGTAADLMKLAMVRLFPQLREVGARMLLQVHDELLLEAPKERAEEVAALAKEVMEGVWPLAVPLEVEVGIGEDWLAAKG

SEQ ID NO: 3363 - DNA, 2523 bp, synthetic construct
  misc_feature 1..2523: note = Variant of DNA polymerase I from Thermus sp. strain 2.9
  source 1..2523: mol_type = other DNA
atgcaccatcatcatcatcatggcggtagcggcgtgttaccggtgttcgagcctaaaggtcgcgtgcttctggttgatggccatcatctcgcgtatcgtaacttctttgccctgaaaggattaaccaccagcagcggcgaggtggtacagggtgtctacggctttgcaaagtcgctcctgaaagctctgaaagaagacggtgatgtggtgattgttgtctttgatgcgaaagcgccaagttttcgccacgaagcgtacgaagcttacaaagccgggcgtgctccaacgccggaagactttcctcgccaattggcgcttatgaaggaattagtggatttgcttggcctcgaacgcttggaagttcccggtttcgaggcagacgacgtattagcgactctcgcaaagaaagccgaacgtgagggctatgaagtccagatcttgacagcagatcgcgatcttttccagcttttatctccgcgcatctcggtgttacacccggaagggcatcgtatcaccccggaatggctctgggagaaatatggtttgcgtcccgaacaatgggtggattttcgcgccttagcaggcgatccgagcgacaatattccgggagttaaaggtatcggcgagaagacggcgctcaagctccttaaagaatgggggtcgttggagaacttgcttaagaatttagatcaggtcaaaccagagtcagtgcgtgagaagattcttgctcacctcgaagacctcaaattaagccgcgaattgtcccgtgtacgcaccgatttgccgctcgaagttgatttccaacgccgccgcgaacctgactgggagggtcttaaagcgtttttagagcgtcttgaatttggttcgctcttgcatgaattcggccttttagaaagcccgttaccagccgaagaagcaccttggccaccgcccgagggcgcgtttttaggttaccgtttgagtcgcccggaaccgatgtgggccgaattactggctcttgcagcgtctgcccagggacgtgtgtatcgcgcggaagaccctcatggtgcgctccgcggcctcttcgaagtccgtggactccttgccaaagacttagctgttgttgcattgcgcgaaggtcttgatttacctccgactgatgatccaatgcttcttgcgtacctcttggacccgtcaaacacgacgcccgaaggcgtagcccgtcgttacggcggcgagtggaccgaagatgcagcgaaacgcgcgttattggccgaacgtttgcacgccaatttattaggacgtttgcaaggcgaggaacgtctcctctggctttacgaagaagtggagaaaccattgagtcgcgtgctcgcgcatatggaagctaccggtgtcaaattagacgtggcgtatttggagaatctcagccttgaagttgctgcccacatgcgccgcttggaggaagaagtattccgtttagcaggccgttcctttcgccttaattctcgcgatcagttagaacgtgtgttgttcgatgaacttggtctccctcctatcggcaagacagagaagaccggtaaacgtagcacttcagcggcggttttagaagctcttcgcgaagtccatcccattgtggacaagatcttgcaataccgcgaactcgcgaaattgaaaggcacctatattgaccgtcttccggcattagtccacccgaaaacgggacgcctccatacccgcttcaaccaaacagccacggcgaccggtcgtttgtcctcctctgatccaaaccttcagaatattccagtacgtaccccattgggccagaagatccgccgtgcgtttgtagctgaggagggttggcgtttagtggccctcgattatagccaaattgaattacgtgtccttgcccatctttctggcgatgagaacctcatccgcgtgtttcaggaaggcaaagacattcacactcaaacggcaagctggatgtttggattatcagctgaagcgatcgatcctttgatgcgtcgtgcagcgaagaccatcaatttcggtgttctctacggtatgagtgcctttcgtttgtcgcaggaattaggcattccctatgaagaagctcaggcgttcattcagaaatactttcaaagctatcccaaagttaaagcatggatcgagaagactctcgaagaaggccgcacacgtggttacgtagagaccttatttggacgtcgccgctatgttcccgatttaaacgctcgcgtgaaaggcaagcgtgaagccgccgaacgcatggcgttcaacatgcctgtacagggcacggcagctgacctcatgaaacttgcaatggtgcgcctttttccacaattgcgtgaagttggtgcccgcatgctcttgcaggtccacgatgaactcttgttagaagcgccaaaagagcgtgcggaagaggtggcagccctcgcgaaagaagttatggaaggcgtgtggcccttagcggtgcctcttgaagtcgaagttggtattggcgaggattggctggctgccaaagga

SEQ ID NO: 3364 - protein, 841 aa, synthetic construct
  REGION 1..841: note = Variant of DNA polymerase I from Thermus sp. strain 2.9
MHHHHHHGGSGVLPVFEPKGRVLLVDGHHLAYRNFFALKGLTTSSGEVVQGVYGFAKSLLKALKEDGDVVIVVFDAKAPSFRHEAYEAYKAGRAPTPEDFPRQLALMKELVDLLGLERLEVPGFEADDVLATLAKKAEREGYEVQILTADRDLFQLLSPRISVLHPEGHRITPEWLWEKYGLRPEQWVDFRALAGDPSDNIPGVKGIGEKTALKLLKEWGSLENLLKNLDQVKPESVREKILAHLEDLKLSRELSRVRTDLPLEVDFQRRREPDWEGLKAFLERLEFGSLLHEFGLLESPLPAEEAPWPPPEGAFLGYRLSRPEPMWAELLALAASAQGRVYRAEDPHGALRGLFEVRGLLAKDLAVVALREGLDLPPTDDPMLLAYLLDPSNTTPEGVARRYGGEWTEDAAKRALLAERLHANLLGRLQGEERLLWLYEEVEKPLSRVLAHMEATGVKLDVAYLENLSLEVAAHMRRLEEEVFRLAGRSFRLNSRDQLERVLFDELGLPPIGKTEKTGKRSTSAAVLEALREVHPIVDKILQYRELAKLKGTYIDRLPALVHPKTGRLHTRFNQTATATGRLSSSDPNLQNIPVRTPLGQKIRRAFVAEEGWRLVALDYSQIELRVLAHLSGDENLIRVFQEGKDIHTQTASWMFGLSAEAIDPLMRRAAKTINFGVLYGMSAFRLSQELGIPYEEAQAFIQKYFQSYPKVKAWIEKTLEEGRTRGYVETLFGRRRYVPDLNARVKGKREAAERMAFNMPVQGTAADLMKLAMVRLFPQLREVGARMLLQVHDELLLEAPKERAEEVAALAKEVMEGVWPLAVPLEVEVGIGEDWLAAKG

SEQ ID NO: 3365 - DNA, 2523 bp, synthetic construct
  misc_feature 1..2523: note = Variant of DNA polymerase I from Thermus sp. strain 2.9
  source 1..2523: mol_type = other DNA
atgcaccatcatcatcatcatggcggtagcggcgtgttaccggtgttcgagcctaaaggtcgcgtgcttctggttgatggccatcatctcgcgtatcgtaacttctttgccctgaaaggattaaccaccagcagcggcgagccggtacagggtgtctacggctttgcaaagtcgctcctgaaagctctgaaagaagacggtgatgtggtgattgttgtctttgatgcgaaagcgccaagttttcgccacgaagcgtacgaagcttacaaagccgggcgtgctccaacgccggaagactttcctcgccaattggcgcttatgaaggaattagtggatttgcttggcctcgaacgcttggaagttcccggtttcgaggcagacgacgtattagcgactctcgcaaagaaagccgaacgtgagggctatgaagtccagatcttgacagcagatcgcgatcttttccagcttttatctccgcgcatctcggtgttacacccggaagggcatcgtatcaccccggaatggctctgggagaaatatggtttgcgtcccgaacaatgggtggattttcgcgccttagcaggcgatccgagcgacaatattccgggagttaaaggtatcggcgagaagacggcgctcaagctccttaaagaatgggggtcgttggagaacttgcttaagaatttagatcaggtcaaaccagagtcagtgcgtgagaagattcttgctcacctcgaagacctcaaattaagccgcgaattgtcccgtgtacgcaccgatttgccgctcgaagttgatttccaacgccgccgcgaacctgactgggagggtcttaaagcgtttttagagcgtcttgaatttggttcgctcttgcatgaattcggccttttagaaagcccgttaccagccgaagaagcaccttggccaccgcccgagggcgcgtttttaggttaccgtttgagtcgcccggaaccgatgtgggccgaattactggctcttgcagcgtctgcccagggacgtgtgtatcgcgcggaagaccctcatggtgcgctccgcggcctcttcgaagtccgtggactccttgccaaagacttagctgttgttgcattgcgcgaaggtcttgatttacctccgactgatgatccaatgcttcttgcgtacctcttggacccgtcaaacacgacgcccgaaggcgtagcccgtcgttacggcggcgagtggaccgaagatgcagcgaaacgcgcgttattggccgaacgtttgcacgccaatttattaggacgtttgcaaggcgaggaacgtctcctctggctttacgaagaagtggagaaacatttgagtcgcgtgctcgcgcatatggaagctaccggtgtcaaattagacgtggcgtatttggagaatctcagccttgaagttgctgcccacatgcgccgcttggaggaagaagtattccgtttagcaggccgttcctttcgccttaattctcgcgatcagttagaacgtgtgttgttcgatgaacttggtctccctcctatcggcaagacagagaagaccggtaaacgtagcacttcagcggcggttttagaagctcttcgcgaagtccatcccattgtggacaagatcttgcaataccgcgaactcgcgaaattgaaaggcacctatattgaccgtcttccggcattagtccacccgaaaacgggacgcctccatacccgcttcaaccaaacagccacggcgaccggtcgtttgtcctcctctgatccaaaccttcagaatattccagtacgtaccccattgggccagaagatccgccgtgcgtttgtagctgaggagggttggcgtttagtggccctcgattatagccaaattgaattacgtgtccttgcccatctttctggcgatgagaacctcatccgcgtgtttcaggaaggcaaagacattcacactcaaacggcaagctggatgtttggattatcagctgaagcgatcgatcctttgatgcgtcgtgcagcgaagaccatcaatttcggtgttctctacggtatgagtgcctttcgtttgtcgcaggaattaggcattccctatgaagaagctcaggcgttcattcagaaatactttcaaagctatcccaaagttaaagcatggatcgagaagactctcgaagaaggccgcacacgtggttacgtagagaccttatttggacgtcgccgctatgttcccgatttaaacgctcgcgtgaaaggcaagcgtgaagccgccgaacgcatggcgttcaacatgcctgtacagggcacggcagctgacctcatgaaacttgcaatggtgcgcctttttccacaattgcgtgaagttggtgcccgcatgctcttgcaggtccacgatgaactcttgttagaagcgccaaaagagcgtgcggaagaggtggcagccctcgcgaaagaagttatggaaggcgtgtggcccttagcggtgcctcttgaagtcgaagttggtattggcgaggattggctggctgccaaagga

SEQ ID NO: 3366 - protein, 841 aa, synthetic construct
  REGION 1..841: note = Variant of DNA polymerase I from Thermus sp. strain 2.9
MHHHHHHGGSGVLPVFEPKGRVLLVDGHHLAYRNFFALKGLTTSSGEPVQGVYGFAKSLLKALKEDGDVVIVVFDAKAPSFRHEAYEAYKAGRAPTPEDFPRQLALMKELVDLLGLERLEVPGFEADDVLATLAKKAEREGYEVQILTADRDLFQLLSPRISVLHPEGHRITPEWLWEKYGLRPEQWVDFRALAGDPSDNIPGVKGIGEKTALKLLKEWGSLENLLKNLDQVKPESVREKILAHLEDLKLSRELSRVRTDLPLEVDFQRRREPDWEGLKAFLERLEFGSLLHEFGLLESPLPAEEAPWPPPEGAFLGYRLSRPEPMWAELLALAASAQGRVYRAEDPHGALRGLFEVRGLLAKDLAVVALREGLDLPPTDDPMLLAYLLDPSNTTPEGVARRYGGEWTEDAAKRALLAERLHANLLGRLQGEERLLWLYEEVEKHLSRVLAHMEATGVKLDVAYLENLSLEVAAHMRRLEEEVFRLAGRSFRLNSRDQLERVLFDELGLPPIGKTEKTGKRSTSAAVLEALREVHPIVDKILQYRELAKLKGTYIDRLPALVHPKTGRLHTRFNQTATATGRLSSSDPNLQNIPVRTPLGQKIRRAFVAEEGWRLVALDYSQIELRVLAHLSGDENLIRVFQEGKDIHTQTASWMFGLSAEAIDPLMRRAAKTINFGVLYGMSAFRLSQELGIPYEEAQAFIQKYFQSYPKVKAWIEKTLEEGRTRGYVETLFGRRRYVPDLNARVKGKREAAERMAFNMPVQGTAADLMKLAMVRLFPQLREVGARMLLQVHDELLLEAPKERAEEVAALAKEVMEGVWPLAVPLEVEVGIGEDWLAAKG

SEQ ID NO: 3367 - DNA, 2523 bp, synthetic construct; identical to SEQ ID NO: 3293
  misc_feature 1..2523: note = Variant of DNA polymerase I from Thermus sp. strain 2.9
  source 1..2523: mol_type = other DNA

SEQ ID NO: 3368 - protein, 841 aa, synthetic construct; identical to SEQ ID NO: 3294
  REGION 1..841: note = Variant of DNA polymerase I from Thermus sp. strain 2.9

SEQ ID NO: 3369 - DNA, 2523 bp, synthetic construct
  misc_feature 1..2523: note = Variant of DNA polymerase I from Thermus sp. strain 2.9
  source 1..2523: mol_type = other DNA
atgcaccatcatcatcatcatggcggtagcggcgtgttaccggtgttcgagcctaaaggtcgcgtgcttctggttgatggccatcatctcgcgtatcgtaacttctttgccctgaaaggattaaccaccagcagcggcgagccggtacagggtgtctacggctttgcaaagtcgctcctgaaagctctgaaagaagacggtgatgtggtgattgttgtctttgatgcgaaagcgccaagttttcgccacgaagcgtacgaagcttacaaagccgggcgtgctccaacgccggaagactttcctcgccaattggcgcttatgaaggaattagtggatttgcttggcctcgaacgcttggaagttcccggtttcgaggcagacgacgtattagcgactctcgcaaagaaagccgaacgtgagggctatgaagtccagatcttgacagcagatcgcgatcttttccagcttttatctccgcgcatctcggtgttacacccggatgggcatcgtatcaccccggaatggctctgggagaaatatggtttgcgtcccgaacaatgggtggattttcgcgccttagcaggcgatccgagcgacaatattccgggagttaaaggtatcggcgagaagacggcgctcaagctccttaaagaatgggggtcgttggagaacttgcttaagaatttagatcaggtcaaaccagagtcagtgcgtgagaagattcttgctcacctcgaagacctcaaattaagccgcgaattgtcccgtgtacgcaccgatttgccgctcgaagttgatttccaacgccgccgcgaacctgactgggagggtcttaaagcgtttttagagcgtcttgaatttggttcgctcttgcatgaattcggccttttagaaagcccgttaccagccgaagaagcaccttggccaccgcccgagggcgcgtttttaggttaccgtttgagtcgcccggaaccgatgtgggccgaattactggctcttgcagcgtctgcccagggacgtgtgtatcgcgcggaagaccctcatggtgcgctccgcggcctcttcgaagtccgtggactccttgccaaagacttagctgttgttgcattgcgcgaaggtcttgatttacctccgactgatgatccaatgcttcttgcgtacctcttggacccgtcaaacacgacgcccgaaggcgtagcccgtcgttacggcggcgagtggaccgaagatgcagcgaaacgcgcgttattggccgaacgtttgcacgccaatttattaggacgtttgcaaggcgaggaacgtctcctctggctttacgaagaagtggagaaaccattgagtcgcgtgctcgcgcatatggaagctaccggtgtcaaattagacgtggcgtatttggagaatctcagccttgaagttgctgcccacatgcgccgcttggaggaagaagtattccgtttagcaggccgttcctttcgccttaattctcgcgatcagttagaacgtgtgttgttcgatgaacttggtctccctcctatcggcaagacagagaagaccggtaaacgtagcacttcagcggcggttttagaagctcttcgcgaagtccatcccattgtggacaagatcttgcaataccgcgaactcgcgaaattgaaaggcacctatattgaccgtcttccggcattagtccacccgaaaacgggacgcctccatacccgcttcaaccaaacagccacggcgaccggtcgtttgtcctcctctgatccaaaccttcagaatattccagtacgtaccccgttgggccagaagatccgccgtgcgtttgtagctgaggagggttggcgtttagtggccctcgattatagccaaattgaattacgtgtccttgcccatctttctggcgatgagaacctcatccgcgtgtttcaggaaggcaaagacattcacactcaaacggcaagctggatgtttggattatcagctgaagcgatcgatcctttgatgcgtcgtgcagcgaagaccatcaatttcggtgttctctacggtatgagtgcctttcgtttgtcgcaggaattaggcattccctatgaagaagctcaggcgttcattcagaaatactttcaaagctatcccaaagttaaagcatggatcgagaagactctcgaagaaggccgcacacgtggttacgtagagaccttatttggacgtcgccgctatgttcccgatttaaacgctcgcgtgaaaggcaagcgtgaagccgccgaacgcatggcgttcaacatgcctgtacagggcacggcagctgacctcatgaaacttgcaatggtgcgcctttttccacaattgcgtgaagttggtgcccgcatgctcttgcaggtccacgatgaactcttgttagaagcgccaaaagagcgtgcggaagaggtggcagccctcgcgaaagaagttatggaaggcgtgtggcccttagcggtgcctcttgaagtcgaagttggtattggcgaggattggctggctgccaaagga

SEQ ID NO: 3370 - protein, 841 aa, synthetic construct
  REGION 1..841: note = Variant of DNA polymerase I from Thermus sp. strain 2.9
MHHHHHHGGSGVLPVFEPKGRVLLVDGHHLAYRNFFALKGLTTSSGEPVQGVYGFAKSLLKALKEDGDVVIVVFDAKAPSFRHEAYEAYKAGRAPTPEDFPRQLALMKELVDLLGLERLEVPGFEADDVLATLAKKAEREGYEVQILTADRDLFQLLSPRISVLHPDGHRITPEWLWEKYGLRPEQWVDFRALAGDPSDNIPGVKGIGEKTALKLLKEWGSLENLLKNLDQVKPESVREKILAHLEDLKLSRELSRVRTDLPLEVDFQRRREPDWEGLKAFLERLEFGSLLHEFGLLESPLPAEEAPWPPPEGAFLGYRLSRPEPMWAELLALAASAQGRVYRAEDPHGALRGLFEVRGLLAKDLAVVALREGLDLPPTDDPMLLAYLLDPSNTTPEGVARRYGGEWTEDAAKRALLAERLHANLLGRLQGEERLLWLYEEVEKPLSRVLAHMEATGVKLDVAYLENLSLEVAAHMRRLEEEVFRLAGRSFRLNSRDQLERVLFDELGLPPIGKTEKTGKRSTSAAVLEALREVHPIVDKILQYRELAKLKGTYIDRLPALVHPKTGRLHTRFNQTATATGRLSSSDPNLQNIPVRTPLGQKIRRAFVAEEGWRLVALDYSQIELRVLAHLSGDENLIRVFQEGKDIHTQTASWMFGLSAEAIDPLMRRAAKTINFGVLYGMSAFRLSQELGIPYEEAQAFIQKYFQSYPKVKAWIEKTLEEGRTRGYVETLFGRRRYVPDLNARVKGKREAAERMAFNMPVQGTAADLMKLAMVRLFPQLREVGARMLLQVHDELLLEAPKERAEEVAALAKEVMEGVWPLAVPLEVEVGIGEDWLAAKG

SEQ ID NO: 3371 - DNA, 2523 bp, synthetic construct
  misc_feature 1..2523: note = Variant of DNA polymerase I from Thermus sp. strain 2.9
  source 1..2523: mol_type = other DNA
atgcaccatcatcatcatcatggcggtagcggcgtgttaccggtgttcgagcctaaaggtcgcgtgcttctggttgatggccatcatctcgcgtatcgtaacttctttgccctgaaaggattaaccaccagcagcggcgagccggtacagggtgtctacggctttgcaaagtcgctcctgaaagctctgaaagaagacggtgatgtggtgattgttgtctttgatgcgaaagcgccaagttttcgccacgaagcgtacgaagcttacaaagccgggcgtgctccaacgccggaagactttcctcgccaattggcgcttatgaaggaattagtggatttgcttggcctcgaacgcttggaagttcccggtttcgaggcagacgacgtattagcgactctcgcaaagaaagccgaacgtgagggctatgaagtccagatcttgacagcagatcgcgatcttttccagcttttatctccgcgcatctcggtgttacacccggaagggcatcgtatcaccccggaatggctctgggagaaatatggtttgcgtcccgaacaatgggtggattttcgcgccttagcaggcgatccgagcgacaatattccgggagttaaaggtatcggcgagaagacggcgctcaagctccttaaagaatgggggtcgttggagaacttgcttaagaatttagatcaggtcaaaccagagtcagtgcgtgagaagattcttgctcacctcgaagacctcaaattaagccgcgaattgtcccgtgtacgcaccgatttgccgctcgaagttgatttctctcgccgccgcgaacctgactgggagggtcttaaagcgtttttagagcgtcttgaatttggttcgctcttgcatgaattcggccttttagaaagcccgttaccagccgaagaagcaccttggccaccgcccgagggcgcgtttttaggttaccgtttgagtcgcccggaaccgatgtgggccgaattactggctcttgcagcgtctgcccagggacgtgtgtatcgcgcggaagaccctcatggtgcgctccgcggcctcttcgaagtccgtggactccttgccaaagacttagctgttgttgcattgcgcgaaggtcttgatttacctccgactgatgatccaatgcttcttgcgtacctcttggacccgtcaaacacgacgcccgaaggcgtagcccgtcgttacggcggcgagtggaccgaagatgcagcgaaacgcgcgttattggccgaacgtttgcacgccaatttattaggacgtttgcaaggcgaggaacgtctcctctggctttacgaagaagtggagaaaccattgagtcgcgtgctcgcgcatatggaagctaccggtgtcaaattagacgtggcgtatttggagaatctcagccttgaagttgctgcccacatgcgccgcttggaggaagaagtattccgtttagcaggccgttcctttcgccttaattctcgcgatcagttagaacgtgtgttgttcgatgaacttggtctccctcctatcggcaagacagagaagaccggtaaacgtagcacttcagcggcggttttagaagctcttcgcgaagtccatcccattgtggacaagatcttgcaataccgcgaactcgcgaaattgaaaggcacctatattgaccgtcttccggcattagtccacccgaaaacgggacgcctccatacccgcttcaaccaaacagccacggcgaccggtcgtttgtcctcctctgatccaaaccttcagaatattccagtacgtaccccattgggccagaagatccgccgtgcgtttgtagctgaggagggttggcgtttagtggccctcgattatagccaaattgaattacgtgtccttgcccatctttctggcgatgagaacctcatccgcgtgtttcaggaaggcaaagacattcacactcaaacggcaagctggatgtttggattatcagctgaagcgatcgatcctttgatgcgtcgtgcagcgaagaccatcaatttcggtgttctctacggtatgagtgcctttcgtttgtcgcaggaattaggcattccctatgaagaagctcaggcgttcattcagaaatactttcaaagctatcccaaagttaaagcatggatcgagaagactctcgaagaaggccgcacacgtggttacgtagagaccttatttggacgtcgccgctatgttcccgatttaaacgctcgcgtgaaaggcaagcgtgaagccgccgaacgcatggcgttcaacatgcctgtacagggcacggcagctgacctcatgaaacttgcaatggtgcgcctttttccacaattgcgtgaagttggtgcccgcatgctcttgcaggtccacgatgaactcttgttagaagcgccaaaagagcgtgcggaagaggtggcagccctcgcgaaagaagttatggaaggcgtgtggcccttagcggtgcctcttgaagtcgaagttggtattggcgaggattggctggctgccaaagga

SEQ ID NO: 3372 - protein, 841 aa, synthetic construct
  REGION 1..841: note = Variant of DNA polymerase I from Thermus sp. strain 2.9
MHHHHHHGGSGVLPVFEPKGRVLLVDGHHLAYRNFFALKGLTTSSGEPVQGVYGFAKSLLKALKEDGDVVIVVFDAKAPSFRHEAYEAYKAGRAPTPEDFPRQLALMKELVDLLGLERLEVPGFEADDVLATLAKKAEREGYEVQILTADRDLFQLLSPRISVLHPEGHRITPEWLWEKYGLRPEQWVDFRALAGDPSDNIPGVKGIGEKTALKLLKEWGSLENLLKNLDQVKPESVREKILAHLEDLKLSRELSRVRTDLPLEVDFSRRREPDWEGLKAFLERLEFGSLLHEFGLLESPLPAEEAPWPPPEGAFLGYRLSRPEPMWAELLALAASAQGRVYRAEDPHGALRGLFEVRGLLAKDLAVVALREGLDLPPTDDPMLLAYLLDPSNTTPEGVARRYGGEWTEDAAKRALLAERLHANLLGRLQGEERLLWLYEEVEKPLSRVLAHMEATGVKLDVAYLENLSLEVAAHMRRLEEEVFRLAGRSFRLNSRDQLERVLFDELGLPPIGKTEKTGKRSTSAAVLEALREVHPIVDKILQYRELAKLKGTYIDRLPALVHPKTGRLHTRFNQTATATGRLSSSDPNLQNIPVRTPLGQKIRRAFVAEEGWRLVALDYSQIELRVLAHLSGDENLIRVFQEGKDIHTQTASWMFGLSAEAIDPLMRRAAKTINFGVLYGMSAFRLSQELGIPYEEAQAFIQKYFQSYPKVKAWIEKTLEEGRTRGYVETLFGRRRYVPDLNARVKGKREAAERMAFNMPVQGTAADLMKLAMVRLFPQLREVGARMLLQVHDELLLEAPKERAEEVAALAKEVMEGVWPLAVPLEVEVGIGEDWLAAKG

SEQ ID NO: 3373 - DNA, 2523 bp, synthetic construct
  misc_feature 1..2523: note = Variant of DNA polymerase I from Thermus sp. strain 2.9
  source 1..2523: mol_type = other DNA
atgcaccatcatcatcatcatggcggtagcggcgtgttaccggtgttcgagcctaaaggtcgcgtgcttctggttgatggccatcatctcgcgtatcgtaacttctttgccctgaaaggattaaccaccagcagcggcgagccggtacagggtgtctacggctttgcaaagtcgctcctgaaagctctgaaagaagacggtgatgtggtgattgttgtctttgatgcgaaagcgccaagttttcgccacgaagcgtacgaagcttacaaagccgggcgtgctccaacgccggaagactttcctcgccaattggcgcttatgaaggaattagtggatttgcttggcctcgaacgcttggaagttcccggtttcgaggcagacgacgtattagcgactctcgcaaagaaagccgaacgtgagggctatgaagtccagatcttgacagcagatcgcgatcttttccagcttttatctccgcgcatctcggtgttacacccggaagggcatcgtatcaccccggaatggctctgggagaaatatggtttgcgtcccgaacaatgggtggattttcgcgccttagcaggcgatccgagcgacaatattccgggagttaaaggtatcggcgagaagacggcgctcaagctccttaaagaatgggggtcgttggagaacttgcttaagaatttagatcaggtcaaaccagagtcagtgcgtgagaagattcttgctcacctcgaagacctcaaattaagccgcgaattgtcccgtgtacgcaccgatttgccgctcgaagttgatttccaacgccgccgcgaacctgactgggagggtcttaaagcgtttttagagcgtcttgaatttggttcgctcttgcatgaattcggccttttagaaagcccgttaccagccgaagaagcaccttggccaccgcccgagggcgcgtttttaggttaccgtttgagtcgcccggaaccgatgtgggccgaattactggctcttgcagcgtctgcccagggacgtgtgtatcgcgcggaagaccctcatggtgcgctccgcggcctcttcgaagtccgtggactccttgccaaagacttagctgttgttgcattgcgcgaaggtcttgatttacctccgactgatgatccaatgcttcttgcgtacctcttggacccgtcaaacacgacgcccgaaggcgtagcccgtcgttacggcggcgagtggaccgaagatgcagcgaaacgcgcgttattggccgaacgtttgcacgccaatttattaggacgtttgcaaggcgaggaacgtctcctctggctttacgaagaagtggagaaaccattgagtcgcgtgctcgcgcatatggaagctaccggtgtcaaattagacgtggcgtatttggagaatctcagccttgaagttgctgcccacatgcgccgcttggaggaagaagtattccgtttagcaggccgttcctttcgccttaattctcgcgatcagttagaacgtgtgttgttcgatgaacttggtctccctcctatcggcaagacagagaagaccggtaaacgtagcacttcagcggcggttttagaagctcttcgcgaagtccatcccattgtggacaagatcttgcaataccgcgaactcgcgaaattgaaaggcacctatattgaccgtcttccggcattagtccacccgaaaacgggacgcctccatacccgcttcaaccaaacagccacggcgaccggtcgtttgtcctcctctgatccaaaccttcagaatattccagtacgtaccccattgggccagaagatccgccgtgcgtttgtagctgaggagggttggcgtttagtggccctcgattatagccaaattgaattacgtgtccttgcccatctttctggcgatgagaacctcatccgcgtgtttcaggaaggcaaagacattcacactcaaacggcaagctggatgtttggattatcagctgaatttatcgatcctttgatgcgtcgtgcagcgaagaccatcaatttcggtgttctctacggtatgagtgcctttcgtttgtcgcaggaattaggcattccctatgaagaagctcaggcgttcattcagaaatactttcaaagctatcccaaagttaaagcatggatcgagaagactctcgaagaaggccgcacacgtggttacgtagagaccttatttggacgtcgccgctatgttcccgatttaaacgctcgcgtgaaaggcaagcgtgaagccgccgaacgcatggcgttcaacatgcctgtacagggcacggcagctgacctcatgaaacttgcaatggtgcgcctttttccacaattgcgtgaagttggtgcccgcatgctcttgcaggtccacgatgaactcttgttagaagcgccaaaagagcgtgcggaagaggtggcagccctcgcgaaagaagttatggaaggcgtgtggcccttagcggtgcctcttgaagtcgaagttggtattggcgaggattggctggctgccaaagga

SEQ ID NO: 3374 - protein, 841 aa, synthetic construct
  REGION 1..841: note = Variant of DNA polymerase I from Thermus sp. strain 2.9
MHHHHHHGGSGVLPVFEPKGRVLLVDGHHLAYRNFFALKGLTTSSGEPVQGVYGFAKSLLKALKEDGDVVIVVFDAKAPSFRHEAYEAYKAGRAPTPEDFPRQLALMKELVDLLGLERLEVPGFEADDVLATLAKKAEREGYEVQILTADRDLFQLLSPRISVLHPEGHRITPEWLWEKYGLRPEQWVDFRALAGDPSDNIPGVKGIGEKTALKLLKEWGSLENLLKNLDQVKPESVREKILAHLEDLKLSRELSRVRTDLPLEVDFQRRREPDWEGLKAFLERLEFGSLLHEFGLLESPLPAEEAPWPPPEGAFLGYRLSRPEPMWAELLALAASAQGRVYRAEDPHGALRGLFEVRGLLAKDLAVVALREGLDLPPTDDPMLLAYLLDPSNTTPEGVARRYGGEWTEDAAKRALLAERLHANLLGRLQGEERLLWLYEEVEKPLSRVLAHMEATGVKLDVAYLENLSLEVAAHMRRLEEEVFRLAGRSFRLNSRDQLERVLFDELGLPPIGKTEKTGKRSTSAAVLEALREVHPIVDKILQYRELAKLKGTYIDRLPALVHPKTGRLHTRFNQTATATGRLSSSDPNLQNIPVRTPLGQKIRRAFVAEEGWRLVALDYSQIELRVLAHLSGDENLIRVFQEGKDIHTQTASWMFGLSAEFIDPLMRRAAKTINFGVLYGMSAFRLSQELGIPYEEAQAFIQKYFQSYPKVKAWIEKTLEEGRTRGYVETLFGRRRYVPDLNARVKGKREAAERMAFNMPVQGTAADLMKLAMVRLFPQLREVGARMLLQVHDELLLEAPKERAEEVAALAKEVMEGVWPLAVPLEVEVGIGEDWLAAKG

SEQ ID NO: 3375 - DNA, 2523 bp, synthetic construct
  misc_feature 1..2523: note = Variant of DNA polymerase I from Thermus sp. strain 2.9
  source 1..2523: mol_type = other DNA
atgcaccatcatcatcatcatggcggtagcggcgtgttaccggtgttcgagcctaaaggtcgcgtgcttctggttgatggccatcatctcgcgtatcgtaacttctttgccctgaaaggattaaccaccagcagcggcgagccggtacagggtgtctacggctttgcaaagtcgctcctgaaagctctgaaagaagacggtgatgtggtgattgttgtctttgatgcgaaagcgccaagttttcgccacgaagcgtacgaagcttacaaagccgggcgtgctccaacgccggaagactttcctcgccaattggcgcttatgaaggaattagtggatttgcttggcctcgaacgcttggaagttcccggtttcgaggcagacgacgtattagcgactctcgcaaagaaagccgaacgtgagggctatgaagtccagatcttgacagcagatcgcgatcttttccagcttttatctccgcgcatctcggtgttacacccggaagggcatcgtatcaccccggaatggctctgggagaaatatggtttgcgtcccgaacaatgggtggattttcgcgccttagcaggcgatccgagcgacaatattccgggagttaaaggtatcggcgagaagacggcgctcaagctccttaaagaatgggggtcgttggagaacttgcttaagaatttagatcaggtcaaaccagagtcagtgcgtgagaagattcttgctcacctcgaagacctcaaattaagccgcgaattgtcccgtgtacgcaccgatttgccgctcgaagttgatttccaacgccgccgcgaacctgactgggagggtcttaaagcgtttttagagcgtcttgaatttggttcgctcttgcatgaattcggccttttagaaagcccgttaccagccgaagaagcaccttggccaccgcccgagggcgcgtttttaggttaccgtttgagtcgcccggaaccgatgtgggccgaattactggctcttgcagcgtctgcccagggacgtgtgtatcgcgcggaaaggcctcatggtgcgctccgcggcctcttcgaagtccgtggactccttgccaaagacttagctgttgttgcattgcgcgaaggtcttgatttacctccgactgatgatccaatgcttcttgcgtacctcttggacccgtcaaacacgacgcccgaaggcgtagcccgtcgttacggcggcgagtggaccgaagatgcagcgaaacgcgcgttattggccgaacgtttgcacgccaatttattaggacgtttgcaaggcgaggaacgtctcctctggctttacgaagaagtggagaaaccattgagtcgcgtgctcgcgcatatggaagctaccggtgtcaaattagacgtggcgtatttggagaatctcagccttgaagttgctgcccacatgcgccgcttggaggaagaagtattccgtttagcaggccgttcctttcgccttaattctcgcgatcagttagaacgtgtgttgttcgatgaacttggtctccctcctatcggcaagacagagaagaccggtaaacgtagcacttcagcggcggttttagaagctcttcgcgaagtccatcccattgtggacaagatcttgcaataccgcgaactcgcgaaattgaaaggcacctatattgaccgtcttccggcattagtccacccgaaaacgggacgcctccatacccgcttcaaccaaacagccacggcgaccggtcgtttgtcctcctctgatccaaaccttcagaatattccagtacgtaccccattgggccagaagatccgccgtgcgtttgtagctgaggagggttggcgtttagtggccctcgattatagccaaattgaattacgtgtccttgcccatctttctggcgatgagaacctcatccgcgtgtttcaggaaggcaaagacattcacactcaaacggcaagctggatgtttggattatcagctgaagcgatcgatcctttgatgcgtcgtgcagcgaagaccatcaatttcggtgttctctacggtatgagtgcctttcgtttgtcgcaggaattaggcattccctatgaagaagctcaggcgttcattcagaaatactttcaaagctatcccaaagttaaagcatggatcgagaagactctcgaagaaggccgcacacgtggttacgtagagaccttatttggacgtcgccgctatgttcccgatttaaacgctcgcgtgaaaggcaagcgtgaagccgccgaacgcatggcgttcaacatgcctgtacagggcacggcagctgacctcatgaaacttgcaatggtgcgcctttttccacaattgcgtgaagttggtgcccgcatgctcttgcaggtccacgatgaactcttgttagaagcgccaaaagagcgtgcggaagaggtggcagccctcgcgaaagaagttatggaaggcgtgtggcccttagcggtgcctcttgaagtcgaagttggtattggcgaggattggctggctgccaaagga

SEQ ID NO: 3376 - protein, 841 aa, synthetic construct
  REGION 1..841: note = Variant of DNA polymerase I from Thermus sp. strain 2.9
MHHHHHHGGSGVLPVFEPKGRVLLVDGHHLAYRNFFALKGLTTSSGEPVQGVYGFAKSLLKALKEDGDVVIVVFDAKAPSFRHEAYEAYKAGRAPTPEDFPRQLALMKELVDLLGLERLEVPGFEADDVLATLAKKAEREGYEVQILTADRDLFQLLSPRISVLHPEGHRITPEWLWEKYGLRPEQWVDFRALAGDPSDNIPGVKGIGEKTALKLLKEWGSLENLLKNLDQVKPESVREKILAHLEDLKLSRELSRVRTDLPLEVDFQRRREPDWEGLKAFLERLEFGSLLHEFGLLESPLPAEEAPWPPPEGAFLGYRLSRPEPMWAELLALAASAQGRVYRAERPHGALRGLFEVRGLLAKDLAVVALREGLDLPPTDDPMLLAYLLDPSNTTPEGVARRYGGEWTEDAAKRALLAERLHANLLGRLQGEERLLWLYEEVEKPLSRVLAHMEATGVKLDVAYLENLSLEVAAHMRRLEEEVFRLAGRSFRLNSRDQLERVLFDELGLPPIGKTEKTGKRSTSAAVLEALREVHPIVDKILQYRELAKLKGTYIDRLPALVHPKTGRLHTRFNQTATATGRLSSSDPNLQNIPVRTPLGQKIRRAFVAEEGWRLVALDYSQIELRVLAHLSGDENLIRVFQEGKDIHTQTASWMFGLSAEAIDPLMRRAAKTINFGVLYGMSAFRLSQELGIPYEEAQAFIQKYFQSYPKVKAWIEKTLEEGRTRGYVETLFGRRRYVPDLNARVKGKREAAERMAFNMPVQGTAADLMKLAMVRLFPQLREVGARMLLQVHDELLLEAPKERAEEVAALAKEVMEGVWPLAVPLEVEVGIGEDWLAAKG

SEQ ID NO: 3377 - DNA, 2523 bp, synthetic construct
  misc_feature 1..2523: note = Variant of DNA polymerase I from Thermus sp. strain 2.9
  source 1..2523: mol_type = other DNA
atgcaccatcatcatcatcatggcggtagcggcgtgttaccggtgttcgagcctaaaggtcgcgtgcttctggttgatggccatcatctcgcgtatcgtaacttctttgccctgaaaggattaaccaccagcagcggcgagccggtacagggtgtctacggctttgcaaagtcgctcctgaaagctctgaaagaagacggtgatgtggtgattgttgtctttgatgcgaaagcgccaagttttcgccacgaagcgtacgaagcttacaaagccgggcgtgctccaacgccggaagactttcctcgccaattggcgcttatgaaggaattagtggatttgcttggcctcgaacgcttggaagttcccggtttcgaggcagacgacgtattagcgactctcgcaaagaaagccgaacgtgagggctatgaagtccagatcttgacagcagatcgcgatcttttccagcttttatctccgcgcatctcggtgttacacccggaagggcatcgtatcaccccggaatggctctgggagaaatatggtttgcgtcccgaacaatgggtggattttcgcgccttagcaggcgatccgagcgacaatattccgggagttaaaggtatcggcgagaagacggcgctcaagctccttaaagaatgggggtcgttggagaacttgcttaagaatttagatcaggtcaaaccagagtcagtgcgtgagaagattcttgctcacctcgaagacctcaaattaagccgcgaattgtcccgtgtacgcaccgatttgccgctcgaagttgatttccaacgccgccgcgaacctgactgggagggtcttaaagcgtttttagagcgtcttgaatttggttcgctcttgcatgaattcggccttttagaaagcccgttaccagccgaagaagcaccttggccaccgcccgagggcgcgtttttaggttaccgtttgagtcgcccggaaccgatgtgggccgaattactggctcttgcagcgtctgcccagggacgtgtgtatcgcgcggaagaccctcatgttgcgctccgcggcctcttcgaagtccgtggactccttgccaaagacttagctgttgttgcattgcgcgaaggtcttgatttacctccgactgatgatccaatgcttcttgcgtacctcttggacccgtcaaacacgacgcccgaaggcgtagcccgtcgttacggcggcgagtggaccgaagatgcagcgaaacgcgcgttattggccgaacgtttgcacgccaatttattaggacgtttgcaaggcgaggaacgtctcctctggctttacgaagaagtggagaaaccattgagtcgcgtgctcgcgcatatggaagctaccggtgtcaaattagacgtggcgtatttggagaatctcagccttgaagttgctgcccacatgcgccgcttggaggaagaagtattccgtttagcaggccgttcctttcgccttaattctcgcgatcagttagaacgtgtgttgttcgatgaacttggtctccctcctatcggcaagacagagaagaccggtaaacgtagcacttcagcggcggttttagaagctcttcgcgaagtccatcccattgtggacaagatcttgcaataccgcgaactcgcgaaattgaaaggcacctatattgaccgtcttccggcattagtccacccgaaaacgggacgcctccatacccgcttcaaccaaacagccacggcgaccggtcgtttgtcctcctctgatccaaaccttcagaatattccagtacgtaccccattgggccagaagatccgccgtgcgtttgtagctgaggagggttggcgtttagtggccctcgattatagccaaattgaattacgtgtccttgcccatctttctggcgatgagaacctcatccgcgtgtttcaggaaggcaaagacattcacactcaaacggcaagctggatgtttggattatcagctgaagcgatcgatcctttgatgcgtcgtgcagcgaagaccatcaatttcggtgttctctacggtatgagtgcctttcgtttgtcgcaggaattaggcattccctatgaagaagctcaggcgttcattcagaaatactttcaaagctatcccaaagttaaagcatggatcgagaagactctcgaagaaggccgcacacgtggttacgtagagaccttatttggacgtcgccgctatgttcccgatttaaacgctcgcgtgaaaggcaagcgtgaagccgccgaacgcatggcgttcaacatgcctgtacagggcacggcagctgacctcatgaaacttgcaatggtgcgcctttttccacaattgcgtgaagttggtgcccgcatgctcttgcaggtccacgatgaactcttgttagaagcgccaaaagagcgtgcggaagaggtggcagccctcgcgaaagaagttatggaaggcgtgtggcccttagcggtgcctcttgaagtcgaagttggtattggcgaggattggctggctgccaaagga

SEQ ID NO: 3378 - protein, 841 aa, synthetic construct
  REGION 1..841: note = Variant of DNA polymerase I from Thermus sp. strain 2.9
MHHHHHHGGSGVLPVFEPKGRVLLVDGHHLAYRNFFALKGLTTSSGEPVQGVYGFAKSLLKALKEDGDVVIVVFDAKAPSFRHEAYEAYKAGRAPTPEDFPRQLALMKELVDLLGLERLEVPGFEADDVLATLAKKAEREGYEVQILTADRDLFQLLSPRISVLHPEGHRITPEWLWEKYGLRPEQWVDFRALAGDPSDNIPGVKGIGEKTALKLLKEWGSLENLLKNLDQVKPESVREKILAHLEDLKLSRELSRVRTDLPLEVDFQRRREPDWEGLKAFLERLEFGSLLHEFGLLESPLPAEEAPWPPPEGAFLGYRLSRPEPMWAELLALAASAQGRVYRAEDPHVALRGLFEVRGLLAKDLAVVALREGLDLPPTDDPMLLAYLLDPSNTTPEGVARRYGGEWTEDAAKRALLAERLHANLLGRLQGEERLLWLYEEVEKPLSRVLAHMEATGVKLDVAYLENLSLEVAAHMRRLEEEVFRLAGRSFRLNSRDQLERVLFDELGLPPIGKTEKTGKRSTSAAVLEALREVHPIVDKILQYRELAKLKGTYIDRLPALVHPKTGRLHTRFNQTATATGRLSSSDPNLQNIPVRTPLGQKIRRAFVAEEGWRLVALDYSQIELRVLAHLSGDENLIRVFQEGKDIHTQTASWMFGLSAEAIDPLMRRAAKTINFGVLYGMSAFRLSQELGIPYEEAQAFIQKYFQSYPKVKAWIEKTLEEGRTRGYVETLFGRRRYVPDLNARVKGKREAAERMAFNMPVQGTAADLMKLAMVRLFPQLREVGARMLLQVHDELLLEAPKERAEEVAALAKEVMEGVWPLAVPLEVEVGIGEDWLAAKG

SEQ ID NO: 3379 - DNA, 2523 bp, synthetic construct
  misc_feature 1..2523: note = Variant of DNA polymerase I from Thermus sp. strain 2.9
  source 1..2523: mol_type = other DNA
atgcaccatcatcatcatcatggcggtagcggcgtgttaccggtgttcgagcctaaaggtcgcgtgcttctggttgatggccatcatctcgcgtatcgtaacttctttgccctgaaaggattaaccaccagcagcggcgagccggtacagggtgtctacggctttgcaaagtcgctcctgaaagctctgaaagaagacggtgatgtggtgattgttgtctttgatgcgaaagcgccaagttttcgccacgaagcgtacgaagcttacaaagccgggcgtgctccaacgccggaagactttcctcgccaattggcgcttatgaaggaattagtggatttgcttggcctcgaacgcttggaagttcccggtttcgaggcagacgacgtattagcgactctcgcaaagaaagccgaacgtgagggctatgaagtccagatcttgacagcagatcgcgatcttttccagcttttatctccgcgcatctcggtgttacacccggaagggcatcgtatcaccccggaatggctctgggagaaatatggtttgcgtcccgaacaatgggtggattttcgcgccttagcaggcgatccgagcgacaatattccgggagttaaaggtatcggcgagaagacggcgctcaagctccttaaagaatgggggtcgttggagaacttgcttaagaatttagatcaggtcaaaccagagtcagtgcgtgagaagattcttgctcacctcgaagacctcaaattaagccgcgaattgtcccgtgtacgcaccgatttgccgctcgaagttgatttccaacgccgccgcgaacctgactgggagggtcttaaagcgtttttagagcgtcttgaatttggttcgctcttgcatgaattcggccttttagaaagcccgttaccagccgaagaagcaccttggccaccgcccgagggcgcgtttttaggttaccgtttgagtcgcccggaaccgatgtgggccgaattactggctcttgcagcgtctgcccagggacgtgtgtatcgcgcggaagaccctcatggtgcgctccgcggcctcttcgaagtccgtggactccttgccaaagacttagctgttgttgcattgcgcgaaggtcttgatttacctccgactgatgatccaatgcttcttgcgtacctcttggacccgtcaaacacgacgcccgaaggcgtagcccgtcgttacggcggcgagtggaccgaagatgcagcgaaacgcgcgttattggccgaacgtttgcacgccaatttattaggacgtttgcaaggcgaggaacgtctcctctggctttacgaagaagtggagaaaccattgagtcgcgtgctcgcgcatatggaagctaccggtgtcaaattagacgtggcgtatttggagaatctcagccttgaagttgctgcccacatgcgccgcttggaggaagaagtattccgtttagcaggccgttcctttcgccttaattctcgcgatcagttagaacgtgtgttgttcgatgaacttggtctccctcctatcggcaagacagagaagaccggtaaacgtagcacttcagcggcggttttagaagctcttcgcgaagtccatcccattgtggacaagatcttgcaataccgcgaactcgcgaaattgaaaggcacctatattgaccgtcttccggcattagtccacccgaaaacgggacgcctccatacccgcttccagcaaacagccacggcgaccggtcgtttgtcctcctctgatccaaaccttcagaatattccagtacgtaccccattgggccagaagatccgccgtgcgtttgtagctgaggagggttggcgtttagtggccctcgattatagccaaattgaattacgtgtccttgcccatctttctggcgatgagaacctcatccgcgtgtttcaggaaggcaaagacattcacactcaaacggcaagctggatgtttggattatcagctgaagcgatcgatcctttgatgcgtcgtgcagcgaagaccatcaatttcggtgttctctacggtatgagtgcctttcgtttgtcgcaggaattaggcattccctatgaagaagctcaggcgttcattcagaaatactttcaaagctatcccaaagttaaagcatggatcgagaagactctcgaagaaggccgcacacgtggttacgtagagaccttatttggacgtcgccgctatgttcccgatttaaacgctcgcgtgaaaggcaagcgtgaagccgccgaacgcatggcgttcaacatgcctgtacagggcacggcagctgacctcatgaaacttgcaatggtgcgcctttttccacaattgcgtgaagttggtgcccgcatgctcttgcaggtccacgatgaactcttgttagaagcgccaaaagagcgtgcggaagaggtggcagccctcgcgaaagaagttatggaaggcgtgtggcccttagcggtgcctcttgaagtcgaagttggtattggcgaggattggctggctgccaaagga

SEQ ID NO: 3380 - protein, 841 aa, synthetic construct
  REGION 1..841: note = Variant of DNA polymerase I from Thermus sp. strain 2.9
MHHHHHHGGSGVLPVFEPKGRVLLVDGHHLAYRNFFALKGLTTSSGEPVQGVYGFAKSLLKALKEDGDVVIVVFDAKAPSFRHEAYEAYKAGRAPTPEDFPRQLALMKELVDLLGLERLEVPGFEADDVLATLAKKAEREGYEVQILTADRDLFQLLSPRISVLHPEGHRITPEWLWEKYGLRPEQWVDFRALAGDPSDNIPGVKGIGEKTALKLLKEWGSLENLLKNLDQVKPESVREKILAHLEDLKLSRELSRVRTDLPLEVDFQRRREPDWEGLKAFLERLEFGSLLHEFGLLESPLPAEEAPWPPPEGAFLGYRLSRPEPMWAELLALAASAQGRVYRAEDPHGALRGLFEVRGLLAKDLAVVALREGLDLPPTDDPMLLAYLLDPSNTTPEGVARRYGGEWTEDAAKRALLAERLHANLLGRLQGEERLLWLYEEVEKPLSRVLAHMEATGVKLDVAYLENLSLEVAAHMRRLEEEVFRLAGRSFRLNSRDQLERVLFDELGLPPIGKTEKTGKRSTSAAVLEALREVHPIVDKILQYRELAKLKGTYIDRLPALVHPKTGRLHTRFQQTATATGRLSSSDPNLQNIPVRTPLGQKIRRAFVAEEGWRLVALDYSQIELRVLAHLSGDENLIRVFQEGKDIHTQTASWMFGLSAEAIDPLMRRAAKTINFGVLYGMSAFRLSQELGIPYEEAQAFIQKYFQSYPKVKAWIEKTLEEGRTRGYVETLFGRRRYVPDLNARVKGKREAAERMAFNMPVQGTAADLMKLAMVRLFPQLREVGARMLLQVHDELLLEAPKERAEEVAALAKEVMEGVWPLAVPLEVEVGIGEDWLAAKG

SEQ ID NO: 3381 - DNA, 2523 bp, synthetic construct
  misc_feature 1..2523: note = Variant of DNA polymerase I from Thermus sp. strain 2.9
  source 1..2523: mol_type = other DNA
atgcaccatcatcatgggcatggcggtagcggcgtgttaccggtgttcgagcctaaaggtcgcgtgcttctggttgatggccatcatctcgcgtatcgtaacttctttgccctgaaaggattaaccaccagcagcggcgagccggtacagggtgtctacggctttgcaaagtcgctcctgaaagctctgaaagaagacggtgatgtggtgattgttgtctttgatgcgaaagcgccaagttttcgccacgaagcgtacgaagcttacaaagccgggcgtgctccaacgccggaagactttcctcgccaattggcgcttatgaaggaattagtggatttgcttggcctcgaacgcttggaagttcccggtttcgaggcagacgacgtattagcgactctcgcaaagaaagccgaacgtgagggctatgaagtccagatcttgacagcagatcgcgatcttttccagcttttatctccgcgcatctcggtgttacacccggaagggcatcgtatcaccccggaatggctctgggagaaatatggtttgcgtcccgaacaatgggtggattttcgcgccttagcaggcgatccgagcgacaatattccgggagttaaaggtatcggcgagaagacggcgctcaagctccttaaagaatgggggtcgttggagaacttgcttaagaatttagatcaggtcaaaccagagtcagtgcgtgagaagattcttgctcacctcgaagacctcaaattaagccgcgaattgtcccgtgtacgcaccgatttgccgctcgaagttgatttccaacgccgccgcgaacctgactgggagggtcttaaagcgtttttagagcgtcttgaatttggttcgctcttgcatgaattcggccttttagaaagcccgttaccagccgaagaagcaccttggccaccgcccgagggcgcgtttttaggttaccgtttgagtcgcccggaaccgatgtgggccgaattactggctcttgcagcgtctgcccagggacgtgtgtatcgcgcggaagaccctcatggtgcgctccgcggcctcttcgaagtccgtggactccttgccaaagacttagctgttgttgcattgcgcgaaggtcttgatttacctccgactgatgatccaatgcttcttgcgtacctcttggacccgtcaaacacgacgcccgaaggcgtagcccgtcgttacggcggcgagtggaccgaagatgcagcgaaacgcgcgttattggccgaacgtttgcacgccaatttattaggacgtttgcaaggcgaggaacgtctcctctggctttacgaagaagtggagaaaccattgagtcgcgtgctcgcgcatatggaagctaccggtgtcaaattagacgtggcgtatttggagaatctcagccttgaagttgctgcccacatgcgccgcttggaggaagaagtattccgtttagcaggccgttcctttcgccttaattctcgcgatcagttagaacgtgtgttgttcgatgaacttggtctccctcctatcggcaagacagagaagaccggtaaacgtagcacttcagcggcggttttagaagctcttcgcgaagtccatcccattgtggacaagatcttgcaataccgcgaactcgcgaaattgaaaggcacctatattgaccgtcttccggcattagtccacccgaaaacgggacgcctccatacccgcttcaaccaaacagccacggcgaccggtcgtttgtcctcctctgatccaaaccttcagaatattccagtacgtaccccattgggccagaagatccgccgtgcgtttgtagctgaggagggttggcgtttagtggccctcgattatagccaaattgaattacgtgtccttgcccatctttctggcgatgagaacctcatccgcgtgtttcaggaaggcaaagacattcacactcaaacggcaagctggatgtttggattatcagctgaagcgatcgatcctttgatgcgtcgtgcagcgaagaccatcaatttcggtgttctctacggtatgagtgcctttcgtttgtcgcaggaattaggcattccctatgaagaagctcaggcgttcattcagaaatactttcaaagctatcccaaagttaaagcatggatcgagaagactctcgaagaaggccgcacacgtggttacgtagagaccttatttggacgtcgccgctatgttcccgatttaaacgctcgcgtgaaaggcaagcgtgaagccgccgaacgcatggcgttcaacatgcctgtacagggcacggcagctgacctcatgaaacttgcaatggtgcgcctttttccacaattgcgtgaagttggtgcccgcatgctcttgcaggtccacgatgaactcttgttagaagcgccaaaagagcgtgcggaagaggtggcagccctcgcgaaagaagttatggaaggcgtgtggcccttagcggtgcctcttgaagtcgaagttggtattggcgaggattggctggctgccaaagga

SEQ ID NO: 3382 - protein, 841 aa, synthetic construct
  REGION 1..841: note = Variant of DNA polymerase I from Thermus sp. strain 2.9
MHHHHGHGGSGVLPVFEPKGRVLLVDGHHLAYRNFFALKGLTTSSGEPVQGVYGFAKSLLKALKEDGDVVIVVFDAKAPSFRHEAYEAYKAGRAPTPEDFPRQLALMKELVDLLGLERLEVPGFEADDVLATLAKKAEREGYEVQILTADRDLFQLLSPRISVLHPEGHRITPEWLWEKYGLRPEQWVDFRALAGDPSDNIPGVKGIGEKTALKLLKEWGSLENLLKNLDQVKPESVREKILAHLEDLKLSRELSRVRTDLPLEVDFQRRREPDWEGLKAFLERLEFGSLLHEFGLLESPLPAEEAPWPPPEGAFLGYRLSRPEPMWAELLALAASAQGRVYRAEDPHGALRGLFEVRGLLAKDLAVVALREGLDLPPTDDPMLLAYLLDPSNTTPEGVARRYGGEWTEDAAKRALLAERLHANLLGRLQGEERLLWLYEEVEKPLSRVLAHMEATGVKLDVAYLENLSLEVAAHMRRLEEEVFRLAGRSFRLNSRDQLERVLFDELGLPPIGKTEKTGKRSTSAAVLEALREVHPIVDKILQYRELAKLKGTYIDRLPALVHPKTGRLHTRFNQTATATGRLSSSDPNLQNIPVRTPLGQKIRRAFVAEEGWRLVALDYSQIELRVLAHLSGDENLIRVFQEGKDIHTQTASWMFGLSAEAIDPLMRRAAKTINFGVLYGMSAFRLSQELGIPYEEAQAFIQKYFQSYPKVKAWIEKTLEEGRTRGYVETLFGRRRYVPDLNARVKGKREAAERMAFNMPVQGTAADLMKLAMVRLFPQLREVGARMLLQVHDELLLEAPKERAEEVAALAKEVMEGVWPLAVPLEVEVGIGEDWLAAKG

SEQ ID NO: 3383 - DNA, 2523 bp, synthetic construct
  misc_feature 1..2523: note = Variant of DNA polymerase I from Thermus sp. strain 2.9
  source 1..2523: mol_type = other DNA
atgcaccatcatcatcatcatggcggtagcggcgtgttaccggtgttcgagcctaaaggtcgcgtgcttctggttgatggccatcatctcgcgtatcgtaacttctttgccctgaaaggattaaccaccagcagcggcgagccggtacagggtgtctacggctttgcaaagtcgctcctgaaagctctgaaagaagacggtgatgtggtgattgttgtctttgatgcgaaagcgccaagttttcgccacgaagcgtacgaagcttacaaagccgggcgtgctccaacgccggaagactttcctcgccaattggcgcttatgaaggaattagtggatttgcttggcctcgaacgcttggaagttcccggtttcgaggcagacgacgtattagcgactctcgcaaagaaagccgaacgtgagggctatgaagtccagatcttgacagcagatcgcgatcttttccagcttttatctccgcgcatctcggtgttacacccggaagggcatcgtatcaccccggaatggctctgggagaaatatggtttgcgtcccgaacaatgggtggattttcgcgccttagcaggcgatccgagcgacaatattccgggagttaaaggtatcggcgagaagacggcgctcaagctccttaaagaatgggggtcgttggagaacttgcttaagaatttagatcaggtcaaaccagagtcagtgcgtgagaagattcttgctcacctcgaagacctcaaattaagccgcgaattgtcccgtgtacgcaccgatttgccgctcgaagttgatttccaacgccgccgcgaacctgactgggagggtcttaaagcgtttttagagcgtcttgaatttggttcgctcttgcatgaattcggccttttagaaagcccgttaccagccgaagaagcaccttggccaccgcccgagggcgcgtttttaggttaccgtttgagtcgcccggaaccgatgtgggccgaattactggctcttgcagcgtctgcccagggacgtgtgtatcgcgcggaagaccctcatggtgcgctccgcggcctcttcgaagtccgtggactccttgccaaagacttagctgttgttgcattgcgcgaaggtcttgatttacctccgactgatgatccaatgcttcttgcgtacctcttggacccgtcaaacacgacgcccgaaggcgtagcccgtcgttacggcggcgagtggaccgaagatgcagcgaaacgcgcgttattggccgaacgtttgcacgccaatttagctggacgtttgcaaggcgaggaacgtctcctctggctttacgaagaagtggagaaaccattgagtcgcgtgctcgcgcatatggaagctaccggtgtcaaattagacgtggcgtatttggagaatctcagccttgaagttgctgcccacatgcgccgcttggaggaagaagtattccgtttagcaggccgttcctttcgccttaattctcgcgatcagttagaacgtgtgttgttcgatgaacttggtctccctcctatcggcaagacagagaagaccggtaaacgtagcacttcagcggcggttttagaagctcttcgcgaagtccatcccattgtggacaagatcttgcaataccgcgaactcgcgaaattgaaaggcacctatattgaccgtcttccggcattagtccacccgaaaacgggacgcctccatacccgcttcaaccaaacagccacggcgaccggtcgtttgtcctcctctgatccaaaccttcagaatattccagtacgtaccccattgggccagaagatccgccgtgcgtttgtagctgaggagggttggcgtttagtggccctcgattatagccaaattgaattacgtgtccttgcccatctttctggcgatgagaacctcatccgcgtgtttcaggaaggcaaagacattcacactcaaacggcaagctggatgtttggattatcagctgaagcgatcgatcctttgatgcgtcgtgcagcgaagaccatcaatttcggtgttctctacggtatgagtgcctttcgtttgtcgcaggaattaggcattccctatgaagaagctcaggcgttcattcagaaatactttcaaagctatcccaaagttaaagcatggatcgagaagactctcgaagaaggccgcacacgtggttacgtagagaccttatttggacgtcgccgctatgttcccgatttaaacgctcgcgtgaaaggcaagcgtgaagccgccgaacgcatggcgttcaacatgcctgtacagggcacggcagctgacctcatgaaacttgcaatggtgcgcctttttccacaattgcgtgaagttggtgcccgcatgctcttgcaggtccacgatgaactcttgttagaagcgccaaaagagcgtgcggaagaggtggcagccctcgcgaaagaagttatggaaggcgtgtggcccttagcggtgcctcttgaagtcgaagttggtattggcgaggattggctggctgccaaagga

SEQ ID NO: 3384 - protein, 841 aa, synthetic construct
  REGION 1..841: note = Variant of DNA polymerase I from Thermus sp. strain 2.9
MHHHHHHGGSGVLPVFEPKGRVLLVDGHHLAYRNFFALKGLTTSSGEPVQGVYGFAKSLLKALKEDGDVVIVVFDAKAPSFRHEAYEAYKAGRAPTPEDFPRQLALMKELVDLLGLERLEVPGFEADDVLATLAKKAEREGYEVQILTADRDLFQLLSPRISVLHPEGHRITPEWLWEKYGLRPEQWVDFRALAGDPSDNIPGVKGIGEKTALKLLKEWGSLENLLKNLDQVKPESVREKILAHLEDLKLSRELSRVRTDLPLEVDFQRRREPDWEGLKAFLERLEFGSLLHEFGLLESPLPAEEAPWPPPEGAFLGYRLSRPEPMWAELLALAASAQGRVYRAEDPHGALRGLFEVRGLLAKDLAVVALREGLDLPPTDDPMLLAYLLDPSNTTPEGVARRYGGEWTEDAAKRALLAERLHANLAGRLQGEERLLWLYEEVEKPLSRVLAHMEATGVKLDVAYLENLSLEVAAHMRRLEEEVFRLAGRSFRLNSRDQLERVLFDELGLPPIGKTEKTGKRSTSAAVLEALREVHPIVDKILQYRELAKLKGTYIDRLPALVHPKTGRLHTRFNQTATATGRLSSSDPNLQNIPVRTPLGQKIRRAFVAEEGWRLVALDYSQIELRVLAHLSGDENLIRVFQEGKDIHTQTASWMFGLSAEAIDPLMRRAAKTINFGVLYGMSAFRLSQELGIPYEEAQAFIQKYFQSYPKVKAWIEKTLEEGRTRGYVETLFGRRRYVPDLNARVKGKREAAERMAFNMPVQGTAADLMKLAMVRLFPQLREVGARMLLQVHDELLLEAPKERAEEVAALAKEVMEGVWPLAVPLEVEVGIGEDWLAAKG

SEQ ID NO: 3385 - DNA, 2523 bp, synthetic construct
  misc_feature 1..2523: note = Variant of DNA polymerase I from Thermus sp. strain 2.9
  source 1..2523: mol_type = other DNA
atgcaccatcatcatcatcatggcggtagcggcgtgttaccggtgttcgagcctaaaggtcgcgtgcttctggttgatggccatcatctcgcgtatcgtaacttctttgccctgaaaggattaaccaccagcagcggcgagccggtacagggtgtctacggctttgcaaagtcgctcctgaaagctctgaaagaagacggtgatgtggtgattgttgtctttgatgcgaaagcgccaagttttcgccacgaagcgtacgaagcttacaaagccgggcgtgctccaacgccggaagactttcctcgccaattggcgcttatgaaggaattagtggatttgcttggcctcgaacgcttggaagttcccggtttcgaggcagacgacgtattagcgactctcgcaaagaaagccgaacgtgagggctatgaagtccagatcttgacagcagatcgcgatcttttccagcttttatctccgcgcatctcggtgttacacccggaagggcatcgtatcaccccggaatggctctgggagaaatatggtttgcgtcccgaacaatgggtggattttcgcgccttagcaggcgatccgagcgacaatattccgggagttaaaggtatcggcgagaagacggcgctcaagctccttaaagaatgggggtcgttggagaacttgcttaagaatttagatcaggtcaaaccagagtcagtgcgtgagaagattcttgctcacctcgaagacctcaaattaagccgcgaattgtcccgtgtacgcaccgatttgccgctcgaagttgatttccaacgccgccgcgaacctgactgggagggtcttaaagcgtttttagagcgtcttgaatttggttcgctcttgcatgaattcggccttttagaaagcccgttaccagccgaagaagcaccttggccaccgcccgagggcgcgtttttaggttaccgtttgagtcgcccggaaccgatgtgggccgaattactggctcttgcagcgtctgcccagggacgtgtgtatcgcgcggaagaccctcatggtgcgctccgcggcctcttcgaagtccgtggactccttgccaaagacttagctgttgttgcattgcgcgaaggtcttgatttacctccgactgatgatccaatgcttcttgcgtacctcttggacccgtcaaacacgacgcccgaaggcgtagcccgtcgttacggcggcgagtggaccgaagatgcagcgaaacgcgcgttattggccgaacgtttgcacgccaatttattaggacgtttgcaaggcgaggaacgtctcctctggctttacgaagaagtggagaaaccattgagtcgcgtgctcgcgcatatggaagctaccggtgtcaaattagacgtggcgtatttggagaatctcagccttgaagttgctgcccacatgcgccgcttggaggaagaagtattccgtttagcaggccgttcctttcgccttaattctcgcgatcagttagaacgtgtgttgttcgatgaacttggtctccctcctatcggcaagacagagaagaccggtaaacgtagcacttcagcggcggttttagaagctcttcgctgtgtccatcccattgtggacaagatcttgcaataccgcgaactcgcgaaattgaaaggcacctatattgaccgtcttccggcattagtccacccgaaaacgggacgcctccatacccgcttcaaccaaacagccacggcgaccggtcgtttgtcctcctctgatccaaaccttcagaatattccagtacgtaccccattgggccagaagatccgccgtgcgtttgtagctgaggagggttggcgtttagtggccctcgattatagccaaattgaattacgtgtccttgcccatctttctggcgatgagaacctcatccgcgtgtttcaggaaggcaaagacattcacactcaaacggcaagctggatgtttggattatcagctgaagcgatcgatcctttgatgcgtcgtgcagcgaagaccatcaatttcggtgttctctacggtatgagtgcctttcgtttgtcgcaggaattaggcattccctatgaagaagctcaggcgttcattcagaaatactttcaaagctatcccaaagttaaagcatggatcgagaagactctcgaagaaggccgcacacgtggttacgtagagaccttatttggacgtcgccgctatgttcccgatttaaacgctcgcgtgaaaggcaagcgtgaagccgccgaacgcatggcgttcaacatgcctgtacagggcacggcagctgacctcatgaaacttgcaatggtgcgcctttttccacaattgcgtgaagttggtgcccgcatgctcttgcaggtccacgatgaactcttgttagaagcgccaaaagagcgtgcggaagaggtggcagccctcgcgaaagaagttatggaaggcgtgtggcccttagcggtgcctcttgaagtcgaagttggtattggcgaggattggctggctgccaaagga

SEQ ID NO: 3386 - protein, 841 aa, synthetic construct
  REGION 1..841: note = Variant of DNA polymerase I from Thermus sp. strain 2.9
MHHHHHHGGSGVLPVFEPKGRVLLVDGHHLAYRNFFALKGLTTSSGEPVQGVYGFAKSLLKALKEDGDVVIVVFDAKAPSFRHEAYEAYKAGRAPTPEDFPRQLALMKELVDLLGLERLEVPGFEADDVLATLAKKAEREGYEVQILTADRDLFQLLSPRISVLHPEGHRITPEWLWEKYGLRPEQWVDFRALAGDPSDNIPGVKGIGEKTALKLLKEWGSLENLLKNLDQVKPESVREKILAHLEDLKLSRELSRVRTDLPLEVDFQRRREPDWEGLKAFLERLEFGSLLHEFGLLESPLPAEEAPWPPPEGAFLGYRLSRPEPMWAELLALAASAQGRVYRAEDPHGALRGLFEVRGLLAKDLAVVALREGLDLPPTDDPMLLAYLLDPSNTTPEGVARRYGGEWTEDAAKRALLAERLHANLLGRLQGEERLLWLYEEVEKPLSRVLAHMEATGVKLDVAYLENLSLEVAAHMRRLEEEVFRLAGRSFRLNSRDQLERVLFDELGLPPIGKTEKTGKRSTSAAVLEALRCVHPIVDKILQYRELAKLKGTYIDRLPALVHPKTGRLHTRFNQTATATGRLSSSDPNLQNIPVRTPLGQKIRRAFVAEEGWRLVALDYSQIELRVLAHLSGDENLIRVFQEGKDIHTQTASWMFGLSAEAIDPLMRRAAKTINFGVLYGMSAFRLSQELGIPYEEAQAFIQKYFQSYPKVKAWIEKTLEEGRTRGYVETLFGRRRYVPDLNARVKGKREAAERMAFNMPVQGTAADLMKLAMVRLFPQLREVGARMLLQVHDELLLEAPKERAEEVAALAKEVMEGVWPLAVPLEVEVGIGEDWLAAKG

SEQ ID NO: 3387 - DNA, 2523 bp, synthetic construct
  misc_feature 1..2523: note = Variant of DNA polymerase I from Thermus sp. strain 2.9
  source 1..2523: mol_type = other DNA
atgcaccatcatcatcatcatggcggtagcggcgtgttaccggtgttcgagcctaaaggtcgcgtgcttctggttgatggccatcatctcgcgtatcgtaacttctttgccctgaaaggattaaccaccagcagcggcgagccggtacagggtgtctacggctttgcaaagtcgctcctgaaagctctgaaagaagacggtgatgtggtgattgttgtctttgatgcgaaagcgccaagttttcgccacgaagcgtacgaagcttacaaagccgggcgtgctccaacgccggaagactttcctcgccaattggcgcttatgaaggaattagtggatttgcttggcctcgaacgcttggaagttcccggtttcgaggcagacgacgtattagcgactctcgcaaagaaagccgaacgtgagggctatgaagtccagatcttgacagcagatcgcgatcttttccagcttttatctccgcgcatctcggtgttacacccggaagggcatcgtatcaccccggaatggctctgggagaaatatggtttgcgtcccgaacaatgggtggattttcgcgccttagcaggcgatccgagcgacaatattccgggagttaaaggtatcggcgagaagacggcgctcaagctccttaaagaatgggggtcgttggagaacttgcttaagaatttagatcaggtcaaaccagagtcagtgcgtgagaagattcttgctcacctcgaagacctcaaattaagccgcgaattgtcccgtgtacgcaccgatttgccgctcgaagttgatttccaacgccgccgcgaacctgactgggagggtcttaaagcgtttttagagcgtcttgaatttggttcgctcttgcatgaattcggccttttagaaagcccgttaccagccgaagaagcaccttggccaccgcccgagggcgcgtttttaggttaccgtttgagtcgcccggaaccgatgtgggccgaattactggctcttgcagcgtctgcccagggacgtgtgtatcgcgcggaagaccctcatggtgcgctccgcggcctcttcgaagtccgtggactccttgccaaagacttagctgttgttgcattgcgcgaaggtcttgatttacctccgactgatgatccaatgcttcttgcgtacctcttggacccgtcaaacacgacgcccgaaggcgtagcccgtcgttacggcggcgagtggaccgaagatgcagcgaaacgcgcgttattggccgaacgtttgcacgccaatttattaggacgtttgcaaggcgaggaacgtctcctctggctttacgaagaagtggagaaaccattgagtcgcgtgctcgcgcatatggaagctaccggtgtcaaattagacgtggcgtatttggagaatctcagccttgaagttgctgcccacatgcgccgcttggaggaagaagtattccgtttagcaggccgttcctttcgccttaattctcgcgatcagttagaacgtgtgttgttcgatgaacttggtctccctcctatcggcaagacagagaagaccggtaaacgtagcacttcagcggcggttttagaagctcttcgcgaagtccatcccattgtggacaagatcttgcaataccgcgaactcgcgaaattgaaaggcacctatattgaccgtcttccggcattagtccacccgaaaacgggacgcctccatacccgcttcaaccaaacagccacggcgaccggtcgtttgtcctcctctgatccaaaccttcagaatattccagtacgtaccccattgggccagaagatccgccgtgcgtttgtagctgaggagggttggcgtttagtggccctcgattatagccaaattgaattacgtgtccttgcccatctttctggcgatgagaacctcatccgcgtgtttcaggaaggcaaagacattcacactcaaacggcaagctggatgtttggattatcagctgaagcgatcgatcctttgatgcgtcgtgcagcgaagaccatcaatttcggtgttctctacggtatgagtgcctttcgtttgtgtcaggaattaggcattccctatgaagaagctcaggcgttcattcagaaatactttcaaagctatcccaaagttaaagcatggatcgagaagactctcgaagaaggccgcacacgtggttacgtagagaccttatttggacgtcgccgctatgttcccgatttaaacgctcgcgtgaaaggcaagcgtgaagccgccgaacgcatggcgttcaacatgcctgtacagggcacggcagctgacctcatgaaacttgcaatggtgcgcctttttccacaattgcgtgaagttggtgcccgcatgctcttgcaggtccacgatgaactcttgttagaagcgccaaaagagcgtgcggaagaggtggcagccctcgcgaaagaagttatggaaggcgtgtggcccttagcggtgcctcttgaagtcgaagttggtattggcgaggattggctggctgccaaagga

SEQ ID NO: 3388 - protein, 841 aa, synthetic construct
  REGION 1..841: note = Variant of DNA polymerase I from Thermus sp. strain 2.9
MHHHHHHGGSGVLPVFEPKGRVLLVDGHHLAYRNFFALKGLTTSSGEPVQGVYGFAKSLLKALKEDGDVVIVVFDAKAPSFRHEAYEAYKAGRAPTPEDFPRQLALMKELVDLLGLERLEVPGFEADDVLATLAKKAEREGYEVQILTADRDLFQLLSPRISVLHPEGHRITPEWLWEKYGLRPEQWVDFRALAGDPSDNIPGVKGIGEKTALKLLKEWGSLENLLKNLDQVKPESVREKILAHLEDLKLSRELSRVRTDLPLEVDFQRRREPDWEGLKAFLERLEFGSLLHEFGLLESPLPAEEAPWPPPEGAFLGYRLSRPEPMWAELLALAASAQGRVYRAEDPHGALRGLFEVRGLLAKDLAVVALREGLDLPPTDDPMLLAYLLDPSNTTPEGVARRYGGEWTEDAAKRALLAERLHANLLGRLQGEERLLWLYEEVEKPLSRVLAHMEATGVKLDVAYLENLSLEVAAHMRRLEEEVFRLAGRSFRLNSRDQLERVLFDELGLPPIGKTEKTGKRSTSAAVLEALREVHPIVDKILQYRELAKLKGTYIDRLPALVHPKTGRLHTRFNQTATATGRLSSSDPNLQNIPVRTPLGQKIRRAFVAEEGWRLVALDYSQIELRVLAHLSGDENLIRVFQEGKDIHTQTASWMFGLSAEAIDPLMRRAAKTINFGVLYGMSAFRLCQELGIPYEEAQAFIQKYFQSYPKVKAWIEKTLEEGRTRGYVETLFGRRRYVPDLNARVKGKREAAERMAFNMPVQGTAADLMKLAMVRLFPQLREVGARMLLQVHDELLLEAPKERAEEVAALAKEVMEGVWPLAVPLEVEVGIGEDWLAAKG

SEQ ID NO: 3389 - DNA, 2523 bp, synthetic construct
  misc_feature 1..2523: note = Variant of DNA polymerase I from Thermus sp. strain 2.9
  source 1..2523: mol_type = other DNA
atgcaccatcatcatcatcatggcggtagcggcgtgttaccggtgttcgagcctaaaggtcgcgtgcttctggttgatggccatcatctcgcgtatcgtaacttctttgccctgaaaggattaaccaccagcagcggcgagccggtacagggtgtctacggctttgcaaagtcgctcctgaaagctctgaaagaagacggtgatgtggtgattgttgtctttgatgcgaaagcgccaagttttcgccacgaagcgtacgaagcttacaaagccgggcgtgctccaacgccggaagactttcctcgccaattggcgcttatgaaggaattagtggatttgcttggcctcgaacgcttggaagttcccggtttcgaggcagacgacgtattagcgactctcgcaaagaaagccgaacgtgagggctatgaagtccagatcttgacagcagatcgcgatcttttccagcttttatctccgcgcatctcggtgttacacccggaagggcatcgtatcaccccggaatggctctgggagaaatatggtttgcgtcccgaacaatgggtggattttcgcgccttagcaggcgatccgagcgacaatattccgggagttaaaggtatcggcgagaagacggcgctcaagctccttaaagaatgggggtcgttggagaacttgcttaagaatttagatcaggtcaaaccagagtcagtgcgtgagaagattcttgctcacctcgaagacctcaaattaagccgcgaattgtcccgtgtacgcaccgatttgccgctcgaagttgatttccaacgccgccgcgaacctgactgggagggtcttaaagcgtttttagagcgtcttgaatttggttcgctcttgcatgaattcggccttttagaaagcccgttaccagccgaagaagcaccttggccaccgcccgagggcgcgtttttaggttaccgtttgagtcgcccggaaccgatgtgggccgaattactggctcttgcagcgtctgcccagggacgtgtgtatcgcgcggaagaccctcatggtgcgctccgcggcctcttcgaagtccgtggactccttgccaaagacttagctgttgttgcattgcgcgaaggtcttgatttacctccgactgatgatccaatgcttcttgcgtacctcttggacccgtcaaacacgacgcccgaaggcgtagcccgtcgttacggcggcgagtggaccgaagatgcagcgaaacgcgcgttattggccgaacgtttgcacgccaatttattaggacgtttgcaaggcgaggaacgtctcctctggctttacgaagaagtggagaaaccattgagtcgcgtgctcgcgcatatggaagctaccggtgtcaaattagacgtggcgtatttggagaatctcagccttgaagttgctgcccacatgcgccgcttggaggaagaagtattccgtttagcaggccgttcctttcgccttaattctcgcgatcagttagaacgtgtgttgttcgatgaacttggtctccctcctatcggctctacagagaagaccggtaaacgtagcacttcagcggcggttttagaagctcttcgcgaagtccatcccattgtggacaagatcttgcaataccgcgaactcgcgaaattgaaaggcacctatattgaccgtcttccggcattagtccacccgaaaacgggacgcctccatacccgcttcaaccaaacagccacggcgaccggtcgtttgtcctcctctgatccaaaccttcagaatattccagtacgtaccccattgggccagaagatccgccgtgcgtttgtagctgaggagggttggcgtttagtggccctcgattatagccaaattgaattacgtgtccttgcccatctttctggcgatgagaacctcatccgcgtgtttcaggaaggcaaagacattcacactcaaacggcaagctggatgtttggattatcagctgaagcgatcgatcctttgatgcgtcgtgcagcgaagaccatcaatttcggtgttctctacggtatgagtgcctttcgtttgtcgcaggaattaggcattccctatgaagaagctcaggcgttcattcagaaatactttcaaagctatcccaaagttaaagcatggatcgagaagactctcgaagaaggccgcacacgtggttacgtagagaccttatttggacgtcgccgctatgttcccgatttaaacgctcgcgtgaaaggcaagcgtgaagccgccgaacgcatggcgttcaacatgcctgtacagggcacggcagctgacctcatgaaacttgcaatggtgcgcctttttccacaattgcgtgaagttggtgcccgcatgctcttgcaggtccacgatgaactcttgttagaagcgccaaaagagcgtgcggaagaggtggcagccctcgcgaaagaagttatggaaggcgtgtggcccttagcggtgcctcttgaagtcgaagttggtattggcgaggattggctggctgccaaagga

SEQ ID NO: 3390 - protein, 841 aa, synthetic construct
  REGION 1..841: note = Variant of DNA polymerase I from Thermus sp. strain 2.9
MHHHHHHGGSGVLPVFEPKGRVLLVDGHHLAYRNFFALKGLTTSSGEPVQGVYGFAKSLLKALKEDGDVVIVVFDAKAPSFRHEAYEAYKAGRAPTPEDFPRQLALMKELVDLLGLERLEVPGFEADDVLATLAKKAEREGYEVQILTADRDLFQLLSPRISVLHPEGHRITPEWLWEKYGLRPEQWVDFRALAGDPSDNIPGVKGIGEKTALKLLKEWGSLENLLKNLDQVKPESVREKILAHLEDLKLSRELSRVRTDLPLEVDFQRRREPDWEGLKAFLERLEFGSLLHEFGLLESPLPAEEAPWPPPEGAFLGYRLSRPEPMWAELLALAASAQGRVYRAEDPHGALRGLFEVRGLLAKDLAVVALREGLDLPPTDDPMLLAYLLDPSNTTPEGVARRYGGEWTEDAAKRALLAERLHANLLGRLQGEERLLWLYEEVEKPLSRVLAHMEATGVKLDVAYLENLSLEVAAHMRRLEEEVFRLAGRSFRLNSRDQLERVLFDELGLPPIGSTEKTGKRSTSAAVLEALREVHPIVDKILQYRELAKLKGTYIDRLPALVHPKTGRLHTRFNQTATATGRLSSSDPNLQNIPVRTPLGQKIRRAFVAEEGWRLVALDYSQIELRVLAHLSGDENLIRVFQEGKDIHTQTASWMFGLSAEAIDPLMRRAAKTINFGVLYGMSAFRLSQELGIPYEEAQAFIQKYFQSYPKVKAWIEKTLEEGRTRGYVETLFGRRRYVPDLNARVKGKREAAERMAFNMPVQGTAADLMKLAMVRLFPQLREVGARMLLQVHDELLLEAPKERAEEVAALAKEVMEGVWPLAVPLEVEVGIGEDWLAAKG

SEQ ID NO: 3391 - DNA, 2523 bp, synthetic construct
  misc_feature 1..2523: note = Variant of DNA polymerase I from Thermus sp. strain 2.9
  source 1..2523: mol_type = other DNA
atgcaccatcatcatcatcatggcggtagcggcgtgttaccggtgttcgagcctaaaggtcgcgtgcttctggttgatggccatcatctcgcgtatcgtaacttctttgccctgaaaggattaaccaccagcagcggcgagccggtacagggtgtctacggctttgcaaagtcgctcctgaaagctctgaaagaagacggtgatgtggtgattgttgtctttgatgcgaaagcgccaagttttcgccacgaagcgtacgaagcttacaaagccgggcgtgctccaacgccggaagactttcctcgccaattggcgcttatgaaggaattagtggatttgcttggcctcgaacgcttggaagttcccggtttcgaggcagacgacgtattagcgactctcgcaaagaaagccgaacgtgagggctatgaagtccagatcttgacagcagatcgcgatcttttccagcttttatctccgcgcatctcggtgttacacccggaagggcatcgtatcaccccggaatggctctgggagaaatatggtttgcgtcccgaacaatgggtggattttcgcgccttagcaggcgatccgagcgacaatattccgggagttaaaggtatcggcgagaagacggcgctcaagctccttaaagaatgggggtcgttggagaacttgcttaagaatttagatcaggtcaaaccagagtcagtgcgtgagaagattcttgctcacctcgaagacctcaaattaagccgcgaattgtcccgtgtacgcaccgatttgccgctcgaagttgatttccaacgccgccgcgaacctgactgggagggtcttaaagcgtttttagagcgtcttgaatttggttcgctcttgcatgaattcggccttttagaaagcccgttaccagccgaagaagcaccttggccaccgcccgagggcgcgtttttaggttaccgtttgagtcgcccggaaccgatgtgggccgaattactggctcttgcagcgtctgcccagggacgtgtgtatcgcgcggaagaccctcatggtgcgctccgcggcctcttcgaagtccgtggactccttgccaaagacttagctgttgttgcattgcgcgaaggtcttgatttacctccgactgatgatccaatgcttcttgcgtacctcttggacccgtcaaacacgacgcccgaaggcgtagcccgtcgttacggcggcgagtggaccgaagatgcagcgaaacgcgcgttattggccgaacgtttgcacgccaatttattagcgcgtttgcaaggcgaggaacgtctcctctggctttacgaagaagtggagaaaccattgagtcgcgtgctcgcgcatatggaagctaccggtgtcaaattagacgtggcgtatttggagaatctcagccttgaagttgctgcccacatgcgccgcttggaggaagaagtattccgtttagcaggccgttcctttcgccttaattctcgcgatcagttagaacgtgtgttgttcgatgaacttggtctccctcctatcggcaagacagagaagaccggtaaacgtagcacttcagcggcggttttagaagctcttcgcgaagtccatcccattgtggacaagatcttgcaataccgcgaactcgcgaaattgaaaggcacctatattgaccgtcttccggcattagtccacccgaaaacgggacgcctccatacccgcttcaaccaaacagccacggcgaccggtcgtttgtcctcctctgatccaaaccttcagaatattccagtacgtaccccattgggccagaagatccgccgtgcgtttgtagctgaggagggttggcgtttagtggccctcgattatagccaaattgaattacgtgtccttgcccatctttctggcgatgagaacctcatccgcgtgtttcaggaaggcaaagacattcacactcaaacggcaagctggatgtttggattatcagctgaagcgatcgatcctttgatgcgtcgtgcagcgaagaccatcaatttcggtgttctctacggtatgagtgcctttcgtttgtcgcaggaattaggcattccctatgaagaagctcaggcgttcattcagaaatactttcaaagctatcccaaagttaaagcatggatcgagaagactctcgaagaaggccgcacacgtggttacgtagagaccttatttggacgtcgccgctatgttcccgatttaaacgctcgcgtgaaaggcaagcgtgaagccgccgaacgcatggcgttcaacatgcctgtacagggcacggcagctgacctcatgaaacttgcaatggtgcgcctttttccacaattgcgtgaagttggtgcccgcatgctcttgcaggtccacgatgaactcttgttagaagcgccaaaagagcgtgcggaagaggtggcagccctcgcgaaagaagttatggaaggcgtgtggcccttagcggtgcctcttgaagtcgaagttggtattggcgaggattggctggctgccaaagga

SEQ ID NO: 3392 - protein, 841 aa, synthetic construct
  REGION 1..841: note = Variant of DNA polymerase I from Thermus sp. strain 2.9
MHHHHHHGGSGVLPVFEPKGRVLLVDGHHLAYRNFFALKGLTTSSGEPVQGVYGFAKSLLKALKEDGDVVIVVFDAKAPSFRHEAYEAYKAGRAPTPEDFPRQLALMKELVDLLGLERLEVPGFEADDVLATLAKKAEREGYEVQILTADRDLFQLLSPRISVLHPEGHRITPEWLWEKYGLRPEQWVDFRALAGDPSDNIPGVKGIGEKTALKLLKEWGSLENLLKNLDQVKPESVREKILAHLEDLKLSRELSRVRTDLPLEVDFQRRREPDWEGLKAFLERLEFGSLLHEFGLLESPLPAEEAPWPPPEGAFLGYRLSRPEPMWAELLALAASAQGRVYRAEDPHGALRGLFEVRGLLAKDLAVVALREGLDLPPTDDPMLLAYLLDPSNTTPEGVARRYGGEWTEDAAKRALLAERLHANLLARLQGEERLLWLYEEVEKPLSRVLAHMEATGVKLDVAYLENLSLEVAAHMRRLEEEVFRLAGRSFRLNSRDQLERVLFDELGLPPIGKTEKTGKRSTSAAVLEALREVHPIVDKILQYRELAKLKGTYIDRLPALVHPKTGRLHTRFNQTATATGRLSSSDPNLQNIPVRTPLGQKIRRAFVAEEGWRLVALDYSQIELRVLAHLSGDENLIRVFQEGKDIHTQTASWMFGLSAEAIDPLMRRAAKTINFGVLYGMSAFRLSQELGIPYEEAQAFIQKYFQSYPKVKAWIEKTLEEGRTRGYVETLFGRRRYVPDLNARVKGKREAAERMAFNMPVQGTAADLMKLAMVRLFPQLREVGARMLLQVHDELLLEAPKERAEEVAALAKEVMEGVWPLAVPLEVEVGIGEDWLAAKG

SEQ ID NO: 3393 - DNA, 2523 bp, synthetic construct
  misc_feature 1..2523: note = Variant of DNA polymerase I from Thermus sp. strain 2.9
  source 1..2523: mol_type = other DNA
atgcaccatcatcataggcatggcggtagcggcgtgttaccggtgttcgagcctaaaggtcgcgtgcttctggttgatggccatcatctcgcgtatcgtaacttctttgccctgaaaggattaaccaccagcagcggcgagccggtacagggtgtctacggctttgcaaagtcgctcctgaaagctctgaaagaagacggtgatgtggtgattgttgtctttgatgcgaaagcgccaagttttcgccacgaagcgtacgaagcttacaaagccgggcgtgctccaacgccggaagactttcctcgccaattggcgcttatgaaggaattagtggatttgcttggcctcgaacgcttggaagttcccggtttcgaggcagacgacgtattagcgactctcgcaaagaaagccgaacgtgagggctatgaagtccagatcttgacagcagatcgcgatcttttccagcttttatctccgcgcatctcggtgttacacccggaagggcatcgtatcaccccggaatggctctgggagaaatatggtttgcgtcccgaacaatgggtggattttcgcgccttagcaggcgatccgagcgacaatattccgggagttaaaggtatcggcgagaagacggcgctcaagctccttaaagaatgggggtcgttggagaacttgcttaagaatttagatcaggtcaaaccagagtcagtgcgtgagaagattcttgctcacctcgaagacctcaaattaagccgcgaattgtcccgtgtacgcaccgatttgccgctcgaagttgatttccaacgccgccgcgaacctgactgggagggtcttaaagcgtttttagagcgtcttgaatttggttcgctcttgcatgaattcggccttttagaaagcccgttaccagccgaagaagcaccttggccaccgcccgagggcgcgtttttaggttaccgtttgagtcgcccggaaccgatgtgggccgaattactggctcttgcagcgtctgcccagggacgtgtgtatcgcgcggaagaccctcatggtgcgctccgcggcctcttcgaagtccgtggactccttgccaaagacttagctgttgttgcattgcgcgaaggtcttgatttacctccgactgatgatccaatgcttcttgcgtacctcttggacccgtcaaacacgacgcccgaaggcgtagcccgtcgttacggcggcgagtggaccgaagatgcagcgaaacgcgcgttattggccgaacgtttgcacgccaatttattaggacgtttgcaaggcgaggaacgtctcctctggctttacgaagaagtggagaaaccattgagtcgcgtgctcgcgcatatggaagctaccggtgtcaaattagacgtggcgtatttggagaatctcagccttgaagttgctgcccacatgcgccgcttggaggaagaagtattccgtttagcaggccgttcctttcgccttaattctcgcgatcagttagaacgtgtgttgttcgatgaacttggtctccctcctatcggcaagacagagaagaccggtaaacgtagcacttcagcggcggttttagaagctcttcgcgaagtccatcccattgtggacaagatcttgcaataccgcgaactcgcgaaattgaaaggcacctatattgaccgtcttccggcattagtccacccgaaaacgggacgcctccatacccgcttcaaccaaacagccacggcgaccggtcgtttgtcctcctctgatccaaaccttcagaatattccagtacgtaccccattgggccagaagatccgccgtgcgtttgtagctgaggagggttggcgtttagtggccctcgattatagccaaattgaattacgtgtccttgcccatctttctggcgatgagaacctcatccgcgtgtttcaggaaggcaaagacattcacactcaaacggcaagctggatgtttggattatcagctgaagcgatcgatcctttgatgcgtcgtgcagcgaagaccatcaatttcggtgttctctacggtatgagtgcctttcgtttgtcgcaggaattaggcattccctatgaagaagctcaggcgttcattcagaaatactttcaaagctatcccaaagttaaagcatggatcgagaagactctcgaagaaggccgcacacgtggttacgtagagaccttatttggacgtcgccgctatgttcccgatttaaacgctcgcgtgaaaggcaagcgtgaagccgccgaacgcatggcgttcaacatgcctgtacagggcacggcagctgacctcatgaaacttgcaatggtgcgcctttttccacaattgcgtgaagttggtgcccgcatgctcttgcaggtccacgatgaactcttgttagaagcgccaaaagagcgtgcggaagaggtggcagccctcgcgaaagaagttatggaaggcgtgtggcccttagcggtgcctcttgaagtcgaagttggtattggcgaggattggctggctgccaaagga

SEQ ID NO: 3394 - protein, 841 aa, synthetic construct
  REGION 1..841: note = Variant of DNA polymerase I from Thermus sp. strain 2.9
MHHHHRHGGSGVLPVFEPKGRVLLVDGHHLAYRNFFALKGLTTSSGEPVQGVYGFAKSLLKALKEDGDVVIVVFDAKAPSFRHEAYEAYKAGRAPTPEDFPRQLALMKELVDLLGLERLEVPGFEADDVLATLAKKAEREGYEVQILTADRDLFQLLSPRISVLHPEGHRITPEWLWEKYGLRPEQWVDFRALAGDPSDNIPGVKGIGEKTALKLLKEWGSLENLLKNLDQVKPESVREKILAHLEDLKLSRELSRVRTDLPLEVDFQRRREPDWEGLKAFLERLEFGSLLHEFGLLESPLPAEEAPWPPPEGAFLGYRLSRPEPMWAELLALAASAQGRVYRAEDPHGALRGLFEVRGLLAKDLAVVALREGLDLPPTDDPMLLAYLLDPSNTTPEGVARRYGGEWTEDAAKRALLAERLHANLLGRLQGEERLLWLYEEVEKPLSRVLAHMEATGVKLDVAYLENLSLEVAAHMRRLEEEVFRLAGRSFRLNSRDQLERVLFDELGLPPIGKTEKTGKRSTSAAVLEALREVHPIVDKILQYRELAKLKGTYIDRLPALVHPKTGRLHTRFNQTATATGRLSSSDPNLQNIPVRTPLGQKIRRAFVAEEGWRLVALDYSQIELRVLAHLSGDENLIRVFQEGKDIHTQTASWMFGLSAEAIDPLMRRAAKTINFGVLYGMSAFRLSQELGIPYEEAQAFIQKYFQSYPKVKAWIEKTLEEGRTRGYVETLFGRRRYVPDLNARVKGKREAAERMAFNMPVQGTAADLMKLAMVRLFPQLREVGARMLLQVHDELLLEAPKERAEEVAALAKEVMEGVWPLAVPLEVEVGIGEDWLAAKG

SEQ ID NO: 3395 - DNA, 2523 bp, synthetic construct
  misc_feature 1..2523: note = Variant of DNA polymerase I from Thermus sp. strain 2.9
  source 1..2523: mol_type = other DNA
atgcaccatcatcatcatcatggcggtagcggcgtgttacctgtgttcgagcctaaaggtcgcgtgcttctggttgatggccatcatctcgcgtatcgtaacttctttgccctgaaaggattaaccaccagcagcggcgagccggtacatggtgtctacggctttgcaaagtcgctcctgaaagctctgaaagaagacggtgatgtggtgattgttgtctttgatgcgaaagcgccaagttttcgccacgaagcgtacgaagcttacaaagccgggcgtgctccaacgccggaagactttcctcgccaattggcgcttatgaaggaattagtggatttgcttggcctcgaacgcttggaagttcccggtttcgaggcagacgacgtattagcgactctcgcaaagaaagccgaacgtgagggctatgaagtccagatcttgacagcagatcgcgatcttttccagcttttatctccgcgcatctcggtgttacacccggaagggcatcgtatcaccccggaatggctctgggagaaatatggtttgcgtcccgaacaatgggtggattttcgcgccttagcaggcgatccgagcgacaatattccgggagttaaaggtatcggcgagaagacggcgctcaagctccttaaagaatgggggtcgttggagaacttgcttaagaatttagatcaggtcaaaccagagtcagtgcgtgagaagattcttgctcacctcgaagacctcaaattaagccgcgaattgtcccgtgtacgcaccgatttgccgctcgaagttgatttccaacgccgccgcgaacctgactgggagggtcttaaagcgtttttagagcgtcttgaatttggttcgctcttgcatgaattcggccttttagaaagcccgttaccagccgaagaagcaccttggccaccgcccgagggcgcgtttttaggttaccgtttgagtcgcccggaaccgatgtgggccgaattactggctcttgcagcgtctgcccagggacgtgtgtatcgcgcggaagaccctcatggtgcgctccgcggcctcttcgaagtccgtggactccttgccaaagacttagctgttgttgcattgcgcgaaggtcttgatttacctccgactgatgatccaatgcttcttgcgtacctcttggacccgtcaaacacgacgcctgaaggcgtagcccgtcgttacggcggcgagtggaccgaagatgcagcgaaacgcgcgttattggccgaacgtttgcacgccaatttattaggacgtttgcaaggcgaggaacgtctcctctggctttacgaagaagtggagaaaccattgagtcgcgtgctcgcgcatatggaagctaccggtgtcaaattagacgtggcgtatttggagaatctcagccttgaagttgctgcccacatgcgccgcttggaggaagaagtattccgtttagcaggccgttcctttcgccttaattctcgcgatcagttagaacgtgtgttgttcgatgaacttggtctccctcctatcggcaagacagagaagaccggtaaacgtagcacttcagcggcggttttagaagctcttcgcgaagtccatcccattgtggacaagatcttgcaataccgcgaactcgcgaaattgaaaggcacctatattgaccgtcttccggcattagtccacccgaaaacgggacgcctccatacccgcttcaaccaaacagccacggcgaccggtcgtttgtcctcctctgatccaaaccttcagaatattccagtacgtaccccgttgggccagaagatccgccgtgcgtttgtagctgaggagggttggcgtttagtggccctcgattatagccaaattgaattacgtgtccttgcccatctttctggcgatgagaacctcatccgcgtgtttcaggaaggcaaagacattcacactcaaacggcaagctggatgtttggattatcagctgaagcgatcgatcctttgatgcgtcgtgcagcgaagaccatcaatttcggtgttctctacggtatgagtgcctttcgtttgtcgcaggaattaggcattccctatgaagaagctcaggcgttcattcagaaatactttcaaagctatcccaaagttaaagcatggatcgagaagactctcgaagaaggccgcacacgtggttacgtagagaccttatttggacgtcgccgctatgttcccgatttaaacgctcgcgtgaaaggcaagcgtgaagccgccgaacgcatggcgttcaacatgcctgtacagggcacggcagctgacctcatgaaacttgcaatggtgcgcctttttccacaattgcgtgaagttggtgcccgcatgctcttgcaggtccacgatgaactcttgttagaagcgccaaaagagcgtgcggaagaggtggcagccctcgcgaaagaagttatggaaggcgtgtggcccttagcggtgcctcttgaagtcgaagttggtattggcgaggattggctggctgccaaagga

SEQ ID NO: 3396 - protein, 841 aa, synthetic construct
  REGION 1..841: note = Variant of DNA polymerase I from Thermus sp. strain 2.9
MHHHHHHGGSGVLPVFEPKGRVLLVDGHHLAYRNFFALKGLTTSSGEPVHGVYGFAKSLLKALKEDGDVVIVVFDAKAPSFRHEAYEAYKAGRAPTPEDFPRQLALMKELVDLLGLERLEVPGFEADDVLATLAKKAEREGYEVQILTADRDLFQLLSPRISVLHPEGHRITPEWLWEKYGLRPEQWVDFRALAGDPSDNIPGVKGIGEKTALKLLKEWGSLENLLKNLDQVKPESVREKILAHLEDLKLSRELSRVRTDLPLEVDFQRRREPDWEGLKAFLERLEFGSLLHEFGLLESPLPAEEAPWPPPEGAFLGYRLSRPEPMWAELLALAASAQGRVYRAEDPHGALRGLFEVRGLLAKDLAVVALREGLDLPPTDDPMLLAYLLDPSNTTPEGVARRYGGEWTEDAAKRALLAERLHANLLGRLQGEERLLWLYEEVEKPLSRVLAHMEATGVKLDVAYLENLSLEVAAHMRRLEEEVFRLAGRSFRLNSRDQLERVLFDELGLPPIGKTEKTGKRSTSAAVLEALREVHPIVDKILQYRELAKLKGTYIDRLPALVHPKTGRLHTRFNQTATATGRLSSSDPNLQNIPVRTPLGQKIRRAFVAEEGWRLVALDYSQIELRVLAHLSGDENLIRVFQEGKDIHTQTASWMFGLSAEAIDPLMRRAAKTINFGVLYGMSAFRLSQELGIPYEEAQAFIQKYFQSYPKVKAWIEKTLEEGRTRGYVETLFGRRRYVPDLNARVKGKREAAERMAFNMPVQGTAADLMKLAMVRLFPQLREVGARMLLQVHDELLLEAPKERAEEVAALAKEVMEGVWPLAVPLEVEVGIGEDWLAAKG

SEQ ID NO: 3397 - DNA, 2523 bp, synthetic construct
  misc_feature 1..2523: note = Variant of DNA polymerase I from Thermus sp. strain 2.9
  source 1..2523: mol_type = other DNA
atgcaccatcatcatcatcatggcggtagcggcgtgttaccggtgttcgagcctaaaggtcgcgtgcttctggttgatggccatcatctcgcgtatcgtaacttctttgccctgaaaggattaaccaccagcagcggcgagccggtacagggtgtctacggctttgcaaagtcgctcctgaaagctctgaaagaagacggtgatgtggtgattgttgtctttgatgcgaaagcgccaagttttcgccacgaagcgtacgaagcttacaaagccgggcgtgctccaacgccggaagactttcctcgccaattggcgcttatgaaggaattagtggatttgcttggcctcgaacgcttggaagttcccggtttcgaggcagacgacgtattagcgactctcgcaaagaaagccgaacgtgagggctatgaagtccagatcttgacagcagatcgcgatcttttccagcttttatctccgcgcatctcggtgttacacccggaagggcatcgtatcaccccggaatggctctgggagaaatatggtttgcgtcccgaacaatgggtggattttcgcgccttagcaggcgatccgagcgacaatattccgggagttaaaggtatcggcgagaagacggcgctcaagctccttaaagaatgggggtcgttggagaacttgcttaagaatttagatcaggtcaaaccagagtcagtgcgtgagaagattcttgctcacctcgaagacctcaaattaagccgcgaattgtcccgtgtacgcaccgatttgccgctcgaagttgatttccaacgccgccgcgaacctgactgggagggtcttaaagcgtttttagagcgtcttgaatttggttcgctcttgcatgaattcggccttttagaaagcccgttaccagccgaagaagcaccttggccaccgcccgagggcgcgtttttaggttaccgtttgagtcgcccggaaccgatgtgggccgaattactggctcttgcagcgtctgcccagggacgtgtgtatcgcgcggaagaccctcatggtgcgctccgcggcctcttcgaagtccgtggactccttgccaaagacttagctgttgttgcattgcgcgaaggtcttgatttacctccgactgatgatccaatgcttcttgcgtacctcttggacccgtcaaacacgacgcccgaaggcgtagcccgtcgttacggcggcgagtggaccgaagatgcagcgaaacgcgcgttattggccgaacgtttgcacggtaatttattaggacgtttgcaaggcgaggaacgtctcctctggctttacgaagaagtggagaaaccattgagtcgcgtgctcgcgcatatggaagctaccggtgtcaaattagacgtggcgtatttggagaatctcagccttgaagttgctgcccacatgcgccgcttggaggaagaagtattccgtttagcaggccgttcctttcgccttaattctcgcgatcagttagaacgtgtgttgttcgatgaacttggtctccctcctatcggcaagacagagaagaccggtaaacgtagcacttcagcggcggttttagaagctcttcgcgaagtccatcccattgtggacaagatcttgcaataccgcgaactcgcgaaattgaaaggcacctatattgaccgtcttccggcattagtccacccgaaaacgggacgcctccatacccgcttcaaccaaacagccacggcgaccggtcgtttgtcctcctctgatccaaaccttcagaatattccagtacgtaccccattgggccagaagatccgccgtgcgtttgtagctgaggagggttggcgtttagtggccctcgattatagccaaattgaattacgtgtccttgcccatctttctggcgatgagaacctcatccgcgtgtttcaggaaggcaaagacattcacactcaaacggcaagctggatgtttggattatcagctgaagcgatcgatcctttgatgcgtcgtgcagcgaagaccatcaatttcggtgttctctacggtatgagtgcctttcgtttgtcgcaggaattaggcattccctatgaagaagctcaggcgttcattcagaaatactttcaaagctatcccaaagttaaagcatggatcgagaagactctcgaagaaggccgcacacgtggttacgtagagaccttatttggacgtcgccgctatgttcccgatttaaacgctcgcgtgaaaggcaagcgtgaagccgccgaacgcatggcgttcaacatgcctgtacagggcacggcagctgacctcatgaaacttgcaatggtgcgcctttttccacaattgcgtgaagttggtgcccgcatgctcttgcaggtccacgatgaactcttgttagaagcgccaaaagagcgtgcggaagaggtggcagccctcgcgaaagaagttatggaaggcgtgtggcccttagcggtgcctcttgaagtcgaagttggtattggcgaggattggctggctgccaaagga

SEQ ID NO: 3398 - protein, 841 aa, synthetic construct
  REGION 1..841: note = Variant of DNA polymerase I from Thermus sp. strain 2.9
MHHHHHHGGSGVLPVFEPKGRVLLVDGHHLAYRNFFALKGLTTSSGEPVQGVYGFAKSLLKALKEDGDVVIVVFDAKAPSFRHEAYEAYKAGRAPTPEDFPRQLALMKELVDLLGLERLEVPGFEADDVLATLAKKAEREGYEVQILTADRDLFQLLSPRISVLHPEGHRITPEWLWEKYGLRPEQWVDFRALAGDPSDNIPGVKGIGEKTALKLLKEWGSLENLLKNLDQVKPESVREKILAHLEDLKLSRELSRVRTDLPLEVDFQRRREPDWEGLKAFLERLEFGSLLHEFGLLESPLPAEEAPWPPPEGAFLGYRLSRPEPMWAELLALAASAQGRVYRAEDPHGALRGLFEVRGLLAKDLAVVALREGLDLPPTDDPMLLAYLLDPSNTTPEGVARRYGGEWTEDAAKRALLAERLHGNLLGRLQGEERLLWLYEEVEKPLSRVLAHMEATGVKLDVAYLENLSLEVAAHMRRLEEEVFRLAGRSFRLNSRDQLERVLFDELGLPPIGKTEKTGKRSTSAAVLEALREVHPIVDKILQYRELAKLKGTYIDRLPALVHPKTGRLHTRFNQTATATGRLSSSDPNLQNIPVRTPLGQKIRRAFVAEEGWRLVALDYSQIELRVLAHLSGDENLIRVFQEGKDIHTQTASWMFGLSAEAIDPLMRRAAKTINFGVLYGMSAFRLSQELGIPYEEAQAFIQKYFQSYPKVKAWIEKTLEEGRTRGYVETLFGRRRYVPDLNARVKGKREAAERMAFNMPVQGTAADLMKLAMVRLFPQLREVGARMLLQVHDELLLEAPKERAEEVAALAKEVMEGVWPLAVPLEVEVGIGEDWLAAKG

SEQ ID NO: 3399 - DNA, 2523 bp, synthetic construct
  misc_feature 1..2523: note = Variant of DNA polymerase I from Thermus sp. strain 2.9
  source 1..2523: mol_type = other DNA
atgcaccatcatcatcatcatggcggtagcggcgtgttaccggtgttcgagcctaaaggtcgcgtgcttctggttgatggccatcatctcgcgtatcgtaacttctttgccctgaaaggattaaccaccagcagcggcgagccggtacagggtgtctacggctttgcaaagtcgctcctgaaagctctgaaagaagacggtgatgtggtgattgttgtctttgatgcgaaagcgccaagttttcgccacgaagcgtacgaagcttacaaagccgggcgtgctccaacgccggaagactttcctcgccaattggcgcttatgaaggaattagtggatttgcttggcctcgaacgcttggaagttcccggtttcgaggcagacgacgtattagcgactctcgcaaagaaagccgaacgtgagggctatgaagtccagatcttgacagcagatcgcgatcttttccagcttttatctccgcgcatctcggtgttacacccggaagggcatcgtatcaccccggaatggctctgggagaaatatggtttgcgtcccgaacaatgggtggattttcgcgccttagcaggcgatccgagcgacaatattccgggagttaaaggtatcggcgagaagacggcgctcaagctccttaaagaatgggggtcgttggagaacttgcttaagaatttagatcaggtcaaaccagagtcagtgcgtgagaagattcttgctcacctcgaagacctcaaattaagccgcgaattgtcccgtgtacgcaccgatttgccgctcgaagttgatttccaacgccgccgcgaacctgactgggagggtcttaaagcgtttttagagcgtcttgaatttggttcgctcttgcatgaattcggccttttagaaagcccgttaccagccgaagaagcaccttggccaccgcccgagggcgcgtttttaggttaccgtttgagtcgcccggaaccgatgtgggccgaattactggctcttgcagcgtctgcccagggacgtgtgtatcgcgcggaagaccctcatggtgcgctccgcggcctcttcgaagtccgtggactccttgccaaagacttagctgttgttgcattgcgcgaaggtcttgatttacctccgactgatgatccaatgcttcttgcgtacctcttggacccgtcaaacacgacgcccgaaggcgtagcccgtcgttacggcggcgagtggaccgaagatgcagcgaaacgcgcgttattggccgaacgtttgcacgccaatttattaggacgtttgcaaggcgaggaacgtctcctctggctttacgaagaagtggagaaaccattgagtcgcgtgctcgcgcatatggaagctaccggtgtcaaattagacgtggcgtatttggagaatctcagccttgaagttgctgcccacatgcgccgcttggaggaagaagtattccgtttagcaggccgttcctttcgccttaattctcgcgatcagttagaacgtgtgttgttcgatgaacttggtctccctcctatcggcaagacagagaagaccggtaaacgtagcacttcagcggcggttttagaagctcttcgcgaagtccatcccattgtggacaagatcttgcaataccgcgaactcgcgaaattgaaaggcacctatattgaccgtcttccggcattagtccacccgaaaacgggacgcctccatacccgcttcaaccaaacagccacggcgaccggtcgtttgtcctcctctgatccaaaccttcagaatattccagtacgtaccccattgggccagaagatccgccgtgcgtttgtagctgaggagggttggcgtttagtggccctcgattatagccaaattgaattacgtgtccttgcccatctttctggcgatgagaacctcatccgcgtgtttcaggaaggcaaagacattcacactcaaacggcaagctggatgtttggattatcagctgaacagatcgatcctttgatgcgtcgtgcagcgaagaccatcaatttcggtgttctctacggtatgagtgcctttcgtttgtcgcaggaattaggcattccctatgaagaagctcaggcgttcattcagaaatactttcaaagctatcccaaagttaaagcatggatcgagaagactctcgaagaaggccgcacacgtggttacgtagagaccttatttggacgtcgccgctatgttcccgatttaaacgctcgcgtgaaaggcaagcgtgaagccgccgaacgcatggcgttcaacatgcctgtacagggcacggcagctgacctcatgaaacttgcaatggtgcgcctttttccacaattgcgtgaagttggtgcccgcatgctcttgcaggtccacgatgaactcttgttagaagcgccaaaagagcgtgcggaagaggtggcagccctcgcgaaagaagttatggaaggcgtgtggcccttagcggtgcctcttgaagtcgaagttggtattggcgaggattggctggctgccaaagga

SEQ ID NO: 3400 - protein, 841 aa, synthetic construct
  REGION 1..841: note = Variant of DNA polymerase I from Thermus sp. strain 2.9
MHHHHHHGGSGVLPVFEPKGRVLLVDGHHLAYRNFFALKGLTTSSGEPVQGVYGFAKSLLKALKEDGDVVIVVFDAKAPSFRHEAYEAYKAGRAPTPEDFPRQLALMKELVDLLGLERLEVPGFEADDVLATLAKKAEREGYEVQILTADRDLFQLLSPRISVLHPEGHRITPEWLWEKYGLRPEQWVDFRALAGDPSDNIPGVKGIGEKTALKLLKEWGSLENLLKNLDQVKPESVREKILAHLEDLKLSRELSRVRTDLPLEVDFQRRREPDWEGLKAFLERLEFGSLLHEFGLLESPLPAEEAPWPPPEGAFLGYRLSRPEPMWAELLALAASAQGRVYRAEDPHGALRGLFEVRGLLAKDLAVVALREGLDLPPTDDPMLLAYLLDPSNTTPEGVARRYGGEWTEDAAKRALLAERLHANLLGRLQGEERLLWLYEEVEKPLSRVLAHMEATGVKLDVAYLENLSLEVAAHMRRLEEEVFRLAGRSFRLNSRDQLERVLFDELGLPPIGKTEKTGKRSTSAAVLEALREVHPIVDKILQYRELAKLKGTYIDRLPALVHPKTGRLHTRFNQTATATGRLSSSDPNLQNIPVRTPLGQKIRRAFVAEEGWRLVALDYSQIELRVLAHLSGDENLIRVFQEGKDIHTQTASWMFGLSAEQIDPLMRRAAKTINFGVLYGMSAFRLSQELGIPYEEAQAFIQKYFQSYPKVKAWIEKTLEEGRTRGYVETLFGRRRYVPDLNARVKGKREAAERMAFNMPVQGTAADLMKLAMVRLFPQLREVGARMLLQVHDELLLEAPKERAEEVAALAKEVMEGVWPLAVPLEVEVGIGEDWLAAKG

SEQ ID NO: 3401 - DNA, 2523 bp, synthetic construct
  misc_feature 1..2523: note = Variant of DNA polymerase I from Thermus sp. strain 2.9
  source 1..2523: mol_type = other DNA
atgcaccatcatcatcatcatggcggtagcggcgtgttaccggtgttcgagcctaaaggtcgcgtgcttctggttgatggccatcatctcgcgtatcgtaacttctttgccctgaaaggattaaccaccagcagcggcgagccggtacagggtgtctacggctttgcaaagtcgctcctgaaagctctgaaagaagacggtgatgtggtgattgttgtctttgatgcgagtgcgccaagttttcgccacgaagcgtacgaagcttacaaagccgggcgtgctccaacgccggaagactttcctcgccaattggcgcttatgaaggaattagtggatttgcttggcctcgaacgcttggaagttcccggtttcgaggcagacgacgtattagcgactctcgcaaagaaagccgaacgtgagggctatgaagtccagatcttgacagcagatcgcgatcttttccagcttttatctccgcgcatctcggtgttacacccggaagggcatcgtatcaccccggaatggctctgggagaaatatggtttgcgtcccgaacaatgggtggattttcgcgccttagcaggcgatccgagcgacaatattccgggagttaaaggtatcggcgagaagacggcgctcaagctccttaaagaatgggggtcgttggagaacttgcttaagaatttagatcaggtcaaaccagagtcagtgcgtgagaagattcttgctcacctcgaagacctcaaattaagccgcgaattgtcccgtgtacgcaccgatttgccgctcgaagttgatttccaacgccgccgcgaacctgactgggagggtcttaaagcgtttttagagcgtcttgaatttggttcgctcttgcatgaattcggccttttagaaagcccgttaccagccgaagaagcaccttggccaccgcccgagggcgcgtttttaggttaccgtttgagtcgcccggaaccgatgtgggccgaattactggctcttgcagcgtctgcccagggacgtgtgtatcgcgcggaagaccctcatggtgcgctccgcggcctcttcgaagtccgtggactccttgccaaagacttagctgttgttgcattgcgcgaaggtcttgatttacctccgactgatgatccaatgcttcttgcgtacctcttggacccgtcaaacacgacgcccgaaggcgtagcccgtcgttacggcggcgagtggaccgaagatgcagcgaaacgcgcgttattggccgaacgtttgcacgccaatttattaggacgtttgcaaggcgaggaacgtctcctctggctttacgaagaagtggagaaaccattgagtcgcgtgctcgcgcatatggaagctaccggtgtcaaattagacgtggcgtatttggagaatctcagccttgaagttgctgcccacatgcgccgcttggaggaagaagtattccgtttagcaggccgttcctttcgccttaattctcgcgatcagttagaacgtgtgttgttcgatgaacttggtctccctcctatcggcaagacagagaagaccggtaaacgtagcacttcagcggcggttttagaagctcttcgcgaagtccatcccattgtggacaagatcttgcaataccgcgaactcgcgaaattgaaaggcacctatattgaccgtcttccggcattagtccacccgaaaacgggacgcctccatacccgcttcaaccaaacagccacggcgaccggtcgtttgtcctcctctgatccaaaccttcagaatattccagtacgtaccccattgggccagaagatccgccgtgcgtttgtagctgaggagggttggcgtttagtggccctcgattatagccaaattgaattacgtgtccttgcccatctttctggcgatgagaacctcatccgcgtgtttcaggaaggcaaagacattcacactcaaacggcaagctggatgtttggattatcagctgaagcgatcgatcctttgatgcgtcgtgcagcgaagaccatcaatttcggtgttctctacggtatgagtgcctttcgtttgtcgcaggaattaggcattccctatgaagaagctcaggcgttcattcagaaatactttcaaagctatcccaaagttaaagcatggatcgagaagactctcgaagaaggccgcacacgtggttacgtagagaccttatttggacgtcgccgctatgttcccgatttaaacgctcgcgtgaaaggcaagcgtgaagccgccgaacgcatggcgttcaacatgcctgtacagggcacggcagctgacctcatgaaacttgcaatggtgcgcctttttccacaattgcgtgaagttggtgcccgcatgctcttgcaggtccacgatgaactcttgttagaagcgccaaaagagcgtgcggaagaggtggcagccctcgcgaaagaagttatggaaggcgtgtggcccttagcggtgcctcttgaagtcgaagttggtattggcgaggattggctggctgccaaagga

SEQ ID NO: 3402 - protein, 841 aa, synthetic construct
  REGION 1..841: note = Variant of DNA polymerase I from Thermus sp. strain 2.9
MHHHHHHGGSGVLPVFEPKGRVLLVDGHHLAYRNFFALKGLTTSSGEPVQGVYGFAKSLLKALKEDGDVVIVVFDASAPSFRHEAYEAYKAGRAPTPEDFPRQLALMKELVDLLGLERLEVPGFEADDVLATLAKKAEREGYEVQILTADRDLFQLLSPRISVLHPEGHRITPEWLWEKYGLRPEQWVDFRALAGDPSDNIPGVKGIGEKTALKLLKEWGSLENLLKNLDQVKPESVREKILAHLEDLKLSRELSRVRTDLPLEVDFQRRREPDWEGLKAFLERLEFGSLLHEFGLLESPLPAEEAPWPPPEGAFLGYRLSRPEPMWAELLALAASAQGRVYRAEDPHGALRGLFEVRGLLAKDLAVVALREGLDLPPTDDPMLLAYLLDPSNTTPEGVARRYGGEWTEDAAKRALLAERLHANLLGRLQGEERLLWLYEEVEKPLSRVLAHMEATGVKLDVAYLENLSLEVAAHMRRLEEEVFRLAGRSFRLNSRDQLERVLFDELGLPPIGKTEKTGKRSTSAAVLEALREVHPIVDKILQYRELAKLKGTYIDRLPALVHPKTGRLHTRFNQTATATGRLSSSDPNLQNIPVRTPLGQKIRRAFVAEEGWRLVALDYSQIELRVLAHLSGDENLIRVFQEGKDIHTQTASWMFGLSAEAIDPLMRRAAKTINFGVLYGMSAFRLSQELGIPYEEAQAFIQKYFQSYPKVKAWIEKTLEEGRTRGYVETLFGRRRYVPDLNARVKGKREAAERMAFNMPVQGTAADLMKLAMVRLFPQLREVGARMLLQVHDELLLEAPKERAEEVAALAKEVMEGVWPLAVPLEVEVGIGEDWLAAKG

SEQ ID NO: 3403 - DNA, 2523 bp, synthetic construct
  misc_feature 1..2523: note = Variant of DNA polymerase I from Thermus sp. strain 2.9
  source 1..2523: mol_type = other DNA
atgcaccatcatcatcatcatggcggtagcggcgtgttaccggtgttcgagcctaaaggtcgcgtgcttctggttgatggccatcatctcgcgtatcgtaacttctttgccctgaaaggattaaccaccagcagcggcgagccggtacagggtgtctacggctttgcaaagtcgctcctgaaagctctgaaagaagacggtgatgtggtgattgttgtctttgatgcgaaagcgccaagttttcgccacgaagcgtacgaagcttacaaagccgggcgtgctccaacgccggaagactttcctcgccaattggcgcttatgaaggaattagtggatttgcttggcctcgaacgcttggaagttcccggtttcgaggcagacgacgtattagcgactctcgcaaagaaagccgaacgtgagggctatgaagtccagatcttgacagcagatcgcgatcttttccagcttttatctccgcgcatctcggtgttacacccggaagggcatcgtatcaccccggaatggctctgggagaaatatggtttgcgtcccgaacaatgggtggattttcgcgccttagcaggcgatccgagcgacaatattccgggagttaaaggtatcggcgagaagacggcgctcaagctccttaaagaatgggggtcgttggagaacttgcttaagaatttagatcaggtcaaaccagagtcagtgcgtgagaagattcttgctcacctcgaagacctcaaattaagccgcgaattgtcccgtgtacgcaccgatttgccgctcgaagttgatttccaacgccgccgcgaacctgactgggagggtcttaaagcgtttttagagcgtcttgaatttggttcgctcttgcatgaattcggccttttagaaagcccgttaccagccgaagaagcaccttggccaccgcccgagggcgcgtttttaggttaccgtttgagtcgcccggaaccgatgtgggccgaattactggctcttgcagcgtctgcccagggacgtgtgtatcgcgcggaagaccctcatggtgcgctccgcggcctcttcgaagtccgtggactccttgccaaagacttagctgttgttgcattgcgcgaaggtcttgatttacctccgactgatgatccaatgcttcttgcgtacctcttggacccgtcaaacacgacgcccgaaggcgtagcccgtcgttacggcggcgagtggaccgaagatgcagcgaaacgcgcgttattggccgaacgtttgcacgccaatttattaggacgtttgcaaggcgaggaacgtctcctctggctttacgaagaagtggagaaaccattgagtcgcgtgctcgcgcatatggaagctaccggtgtcaaattagacgtggcgtatttggagaatctcagccttgaagttgctgcccacatgcgccgcttggaggaagaagtattccgtttagcaggccgttcctttcgccttaattctcgcgatcagttagaacgtgtgttgttcgatgaacttggtctccctcctatcggcaagacagagaagaccggtaaacgtagcacttcagcggcggttttagaagctcttcgcgaagtccatcccattgtggacaagatcttgcaataccgcgaactcgcgaaattgaaaggcacctatattgaccgtcttccggcattagtccacccgaaaacgggacgcctccatacccgcttcttgcaaacagccacggcgaccggtcgtttgtcctcctctgatccaaaccttcagaatattccagtacgtaccccattgggccagaagatccgccgtgcgtttgtagctgaggagggttggcgtttagtggccctcgattatagccaaattgaattacgtgtccttgcccatctttctggcgatgagaacctcatccgcgtgtttcaggaaggcaaagacattcacactcaaacggcaagctggatgtttggattatcagctgaagcgatcgatcctttgatgcgtcgtgcagcgaagaccatcaatttcggtgttctctacggtatgagtgcctttcgtttgtcgcaggaattaggcattccctatgaagaagctcaggcgttcattcagaaatactttcaaagctatcccaaagttaaagcatggatcgagaagactctcgaagaaggccgcacacgtggttacgtagagaccttatttggacgtcgccgctatgttcccgatttaaacgctcgcgtgaaaggcaagcgtgaagccgccgaacgcatggcgttcaacatgcctgtacagggcacggcagctgacctcatgaaacttgcaatggtgcgcctttttccacaattgcgtgaagttggtgcccgcatgctcttgcaggtccacgatgaactcttgttagaagcgccaaaagagcgtgcggaagaggtggcagccctcgcgaaagaagttatggaaggcgtgtggcccttagcggtgcctcttgaagtcgaagttggtattggcgaggattggctggctgccaaagga

SEQ ID NO: 3404 - protein, 841 aa, synthetic construct
  REGION 1..841: note = Variant of DNA polymerase I from Thermus sp. strain 2.9
MHHHHHHGGSGVLPVFEPKGRVLLVDGHHLAYRNFFALKGLTTSSGEPVQGVYGFAKSLLKALKEDGDVVIVVFDAKAPSFRHEAYEAYKAGRAPTPEDFPRQLALMKELVDLLGLERLEVPGFEADDVLATLAKKAEREGYEVQILTADRDLFQLLSPRISVLHPEGHRITPEWLWEKYGLRPEQWVDFRALAGDPSDNIPGVKGIGEKTALKLLKEWGSLENLLKNLDQVKPESVREKILAHLEDLKLSRELSRVRTDLPLEVDFQRRREPDWEGLKAFLERLEFGSLLHEFGLLESPLPAEEAPWPPPEGAFLGYRLSRPEPMWAELLALAASAQGRVYRAEDPHGALRGLFEVRGLLAKDLAVVALREGLDLPPTDDPMLLAYLLDPSNTTPEGVARRYGGEWTEDAAKRALLAERLHANLLGRLQGEERLLWLYEEVEKPLSRVLAHMEATGVKLDVAYLENLSLEVAAHMRRLEEEVFRLAGRSFRLNSRDQLERVLFDELGLPPIGKTEKTGKRSTSAAVLEALREVHPIVDKILQYRELAKLKGTYIDRLPALVHPKTGRLHTRFLQTATATGRLSSSDPNLQNIPVRTPLGQKIRRAFVAEEGWRLVALDYSQIELRVLAHLSGDENLIRVFQEGKDIHTQTASWMFGLSAEAIDPLMRRAAKTINFGVLYGMSAFRLSQELGIPYEEAQAFIQKYFQSYPKVKAWIEKTLEEGRTRGYVETLFGRRRYVPDLNARVKGKREAAERMAFNMPVQGTAADLMKLAMVRLFPQLREVGARMLLQVHDELLLEAPKERAEEVAALAKEVMEGVWPLAVPLEVEVGIGEDWLAAKG

SEQ ID NO: 3405 - DNA, 2523 bp, synthetic construct; identical to SEQ ID NO: 3353
  misc_feature 1..2523: note = Variant of DNA polymerase I from Thermus sp. strain 2.9
  source 1..2523: mol_type = other DNA

SEQ ID NO: 3406 - protein, 841 aa, synthetic construct; identical to SEQ ID NO: 3354
  REGION 1..841: note = Variant of DNA polymerase I from Thermus sp. strain 2.9

SEQ ID NO: 3407 - DNA, 2523 bp, synthetic construct
  misc_feature 1..2523: note = Variant of DNA polymerase I from Thermus sp. strain 2.9
  source 1..2523: mol_type = other DNA
atgcaccatcatcatcatcatggcggtagcggcgtgttaccggtgttcgagcctaaaggtcgcgtgcttctggttgatggccatcatctcgcgtatcgtaacttctttgccctgaaaggattaaccaccagcagcggcgagccggtacagggtgtctacggctttgcaaagtcgctcctgaaagctctgaaagaagacggtgatgtggtgattgttgtctttgatgcgaaagcgccaagttttcgccacgaagcgtacgaagcttacaaagccgggcgtgctccaacgccggaagactttcctcgccaattggcgcttatgaaggaattagtggatttgcttggcctcgaacgcttggaagttcccggtttcgaggcagacgacgtattagcgactctcgcaaagaaagccgaacgtgagggctatgaagtccagatcttgacagcagatcgcgatcttttccagcttttatctccgcgcatctcggtgttacacccggaagggcatcgtatcaccccggaatggctctgggagaaatatggtttgcgtcccgaacaatgggtggattttcgcgccttagcaggcgatccgagcgacaatattccgggagttaaaggtatcggcgagaagacggcgctcaagctccttaaagaatgggggtcgttggagaacttgcttaagaatttagatcaggtcaaaccagagtcagtgcgtgagaagattcttgctcacctcgaagacctcaaattaagccgcgaattgtcccgtgtacgcaccgatttgccgctcgaagttgatttccaacgccgccgcgaacctgactgggagggtcttaaagcgtttttagagcgtcttgaatttggttcgctcttgcatgaattcggccttttagaaagcccgttaccagccgaagaagcaccttggccaccgcccgagggcgcgtttttaggttaccgtttgagtcgcccggaaccgatgtgggccgaattactggctcttgcagcgtctgcccagggacgtgtgtatcgcgcggaagaccctcatggtgcgctccgcggcctcttcgaagtccgtggactccttgccaaagacttagctgttgttgcattgcgcgaaggtcttgatttacctccgactgatgatccaatgcttcttgcgtacctcttggacccgtcaaacacgacgcccgaaggcgtagcccgtcgttacggcggcgagtggaccgaagatgcagcgaaacgcgcgttattggccgaacgtttgcacgccaatttattaggacgtttgcaaggcgaggaacgtctcctctggctttacgaagaagtggagaaaccattgagtcgcgtgctcgcgcatatggaagctaccggtgtcaaattagacgtggcgtatttggagaatctcagccttgaagttgctgcccacatgcgccgcttggaggaagaagtattccgtttagcaggccgttcctttcgccttaattctcgcgatcagttagaacgtgtgttgttcgatgaacttggtctccctcctatcggcaagacagagaagaccggtaaacgtagcacttcagcggcggttttagaagctcttcgcgaagtccatcccattgtggacaagatcttgcaataccgcgaactcgcgaaattgaaaggcacctatattgaccgtcttccggcattagtccacccgaaaacgggacgcctccatacccgcttcaaccaaacagccacggcgaccggtcgtttgtcctcctctgatccaaaccttcagaatattccagtacgtaccccattgggccagaagatccgccgtgcgtttgtagctgaggagggttggcgtttagtggccctcgattatagccaaattgaattacgtgtccttgcccatctttctggcgatgagaacctcatccgcgtgtttcaggaaggcaaagacattcacactcaaacggcaagctggatgtttggattatcagctgaacatatcgatcctttgatgcgtcgtgcagcgaagaccatcaatttcggtgttctctacggtatgagtgcctttcgtttgtcgcaggaattaggcattccctatgaagaagctcaggcgttcattcagaaatactttcaaagctatcccaaagttaaagcatggatcgagaagactctcgaagaaggccgcacacgtggttacgtagagaccttatttggacgtcgccgctatgttcccgatttaaacgctcgcgtgaaaggcaagcgtgaagccgccgaacgcatggcgttcaacatgcctgtacagggcacggcagctgacctcatgaaacttgcaatggtgcgcctttttccacaattgcgtgaagttggtgcccgcatgctcttgcaggtccacgatgaactcttgttagaagcgccaaaagagcgtgcggaagaggtggcagccctcgcgaaagaagttatggaaggcgtgtggcccttagcggtgcctcttgaagtcgaagttggtattggcgaggattggctggctgccaaagga

SEQ ID NO: 3408 - protein, 841 aa, synthetic construct
  REGION 1..841: note = Variant of DNA polymerase I from Thermus sp. strain 2.9
MHHHHHHGGSGVLPVFEPKGRVLLVDGHHLAYRNFFALKGLTTSSGEPVQGVYGFAKSLLKALKEDGDVVIVVFDAKAPSFRHEAYEAYKAGRAPTPEDFPRQLALMKELVDLLGLERLEVPGFEADDVLATLAKKAEREGYEVQILTADRDLFQLLSPRISVLHPEGHRITPEWLWEKYGLRPEQWVDFRALAGDPSDNIPGVKGIGEKTALKLLKEWGSLENLLKNLDQVKPESVREKILAHLEDLKLSRELSRVRTDLPLEVDFQRRREPDWEGLKAFLERLEFGSLLHEFGLLESPLPAEEAPWPPPEGAFLGYRLSRPEPMWAELLALAASAQGRVYRAEDPHGALRGLFEVRGLLAKDLAVVALREGLDLPPTDDPMLLAYLLDPSNTTPEGVARRYGGEWTEDAAKRALLAERLHANLLGRLQGEERLLWLYEEVEKPLSRVLAHMEATGVKLDVAYLENLSLEVAAHMRRLEEEVFRLAGRSFRLNSRDQLERVLFDELGLPPIGKTEKTGKRSTSAAVLEALREVHPIVDKILQYRELAKLKGTYIDRLPALVHPKTGRLHTRFNQTATATGRLSSSDPNLQNIPVRTPLGQKIRRAFVAEEGWRLVALDYSQIELRVLAHLSGDENLIRVFQEGKDIHTQTASWMFGLSAEHIDPLMRRAAKTINFGVLYGMSAFRLSQELGIPYEEAQAFIQKYFQSYPKVKAWIEKTLEEGRTRGYVETLFGRRRYVPDLNARVKGKREAAERMAFNMPVQGTAADLMKLAMVRLFPQLREVGARMLLQVHDELLLEAPKERAEEVAALAKEVMEGVWPLAVPLEVEVGIGEDWLAAKG

SEQ ID NO: 3409 - DNA, 2523 bp, synthetic construct
  misc_feature 1..2523: note = Variant of DNA polymerase I from Thermus sp. strain 2.9
  source 1..2523: mol_type = other DNA
atgcaccatcatcatcatcatggcggtagcggcgtgttaccggtgttcgagcctaaaggtcgcgtgcttctggttgatggccatcatctcgcgtatcgtaacttctttgccctgaaaggattaaccaccagcagcggcgagccggtacagggtgtctacggctttgcaaagtcgctcctgaaagctctgaaagaagacggtgatgtggtgattgttgtctttgatgcgaaagcgccaagttttcgccacgaagcgtacgaagcttacaaagccgggcgtgctccaacgccggaagactttcctcgccaattggcgcttatgaaggaattagtggatttgcttggcctcgaacgcttggaagttcccggtttcgaggcagacgacgtattagcgactctcgcaaagaaagccgaacgtgagggctatgaagtccagatcttgacagcagatcgcgatcttttccagcttttatctccgcgcatctcggtgttacacccggaagggcatcgtatcaccccggaatggctctgggagaaatatggtttgcgtcccgaacaatgggtggattttcgcgccttagcaggcgatccgagcgacaatattccgggagttaaaggtatcggcgagaagacggcgctcaagctccttaaagaatgggggtcgttggagaacttgcttaagaatttagatcaggtcaaaccagagtcagtgcgtgagaagattcttgctcacctcgaagacctcaaattaagccgcgaattgtcccgtgtacgcaccgatttgccgctcgaagttgatttccaacgccgccgcgaacctgactgggagggtcttaaagcgtttttagagcgtcttgaatttggttcgctcttgcatgaattcggccttttagaaagcccgttaccagccgaagaagcaccttggccaccgcccgagggcgcgtttttaggttaccgtttgagtcgcccggaaccgatgtgggccgaattactggctcttgcagcgtctgcccagggacgtgtgtatcgcgcggaagaccctcatggtgcgctccgcggcctcttcgaagtccgtggactccttgccaaagacttagctgttgttgcattgcgcgaaggtcttgatttacctccgactgatgatccaatgcttcttgcgtacctcttggacccgtcaaacacgacgcccgaaggcgtagcccgtcgttacggcggcgagtggaccgaagatgcagcgaaacgcgcgttattggccgaacgtttgcacgccaatttattaggacgtttgcaaggcgaggaacgtctcctctggctttacgaagaagtggagaaaccattgagtcgcgtgctcgcgcatatggaagctaccggtgtcaaattagacgtggcgtatttggagaatctcagccttgaagttgctgcccacatgcgccgcttggaggaagaagtattctgtttagcaggccgttcctttcgccttaattctcgcgatcagttagaacgtgtgttgttcgatgaacttggtctccctcctatcggcaagacagagaagaccggtaaacgtagcacttcagcggcggttttagaagctcttcgcgaagtccatcccattgtggacaagatcttgcaataccgcgaactcgcgaaattgaaaggcacctatattgaccgtcttccggcattagtccacccgaaaacgggacgcctccatacccgcttcaaccaaacagccacggcgaccggtcgtttgtcctcctctgatccaaaccttcagaatattccagtacgtaccccattgggccagaagatccgccgtgcgtttgtagctgaggagggttggcgtttagtggccctcgattatagccaaattgaattacgtgtccttgcccatctttctggcgatgagaacctcatccgcgtgtttcaggaaggcaaagacattcacactcaaacggcaagctggatgtttggattatcagctgaagcgatcgatcctttgatgcgtcgtgcagcgaagaccatcaatttcggtgttctctacggtatgagtgcctttcgtttgtcgcaggaattaggcattccctatgaagaagctcaggcgttcattcagaaatactttcaaagctatcccaaagttaaagcatggatcgagaagactctcgaagaaggccgcacacgtggttacgtagagaccttatttggacgtcgccgctatgttcccgatttaaacgctcgcgtgaaaggcaagcgtgaagccgccgaacgcatggcgttcaacatgcctgtacagggcacggcagctgacctcatgaaacttgcaatggtgcgcctttttccacaattgcgtgaagttggtgcccgcatgctcttgcaggtccacgatgaactcttgttagaagcgccaaaagagcgtgcggaagaggtggcagccctcgcgaaagaagttatggaaggcgtgtggcccttagcggtgcctcttgaagtcgaagttggtattggcgaggattggctggctgccaaagga

SEQ ID NO: 3410 - protein, 841 aa, synthetic construct
  REGION 1..841: note = Variant of DNA polymerase I from Thermus sp. strain 2.9
MHHHHHHGGSGVLPVFEPKGRVLLVDGHHLAYRNFFALKGLTTSSGEPVQGVYGFAKSLLKALKEDGDVVIVVFDAKAPSFRHEAYEAYKAGRAPTPEDFPRQLALMKELVDLLGLERLEVPGFEADDVLATLAKKAEREGYEVQILTADRDLFQLLSPRISVLHPEGHRITPEWLWEKYGLRPEQWVDFRALAGDPSDNIPGVKGIGEKTALKLLKEWGSLENLLKNLDQVKPESVREKILAHLEDLKLSRELSRVRTDLPLEVDFQRRREPDWEGLKAFLERLEFGSLLHEFGLLESPLPAEEAPWPPPEGAFLGYRLSRPEPMWAELLALAASAQGRVYRAEDPHGALRGLFEVRGLLAKDLAVVALREGLDLPPTDDPMLLAYLLDPSNTTPEGVARRYGGEWTEDAAKRALLAERLHANLLGRLQGEERLLWLYEEVEKPLSRVLAHMEATGVKLDVAYLENLSLEVAAHMRRLEEEVFCLAGRSFRLNSRDQLERVLFDELGLPPIGKTEKTGKRSTSAAVLEALREVHPIVDKILQYRELAKLKGTYIDRLPALVHPKTGRLHTRFNQTATATGRLSSSDPNLQNIPVRTPLGQKIRRAFVAEEGWRLVALDYSQIELRVLAHLSGDENLIRVFQEGKDIHTQTASWMFGLSAEAIDPLMRRAAKTINFGVLYGMSAFRLSQELGIPYEEAQAFIQKYFQSYPKVKAWIEKTLEEGRTRGYVETLFGRRRYVPDLNARVKGKREAAERMAFNMPVQGTAADLMKLAMVRLFPQLREVGARMLLQVHDELLLEAPKERAEEVAALAKEVMEGVWPLAVPLEVEVGIGEDWLAAKG

SEQ ID NO: 3411 - DNA, 2523 bp, synthetic construct
  misc_feature 1..2523: note = Variant of DNA polymerase I from Thermus sp. strain 2.9
  source 1..2523: mol_type = other DNA
atgcaccatcatcatcatcatggcggtagcgaggtgttaccggtgttcgagcctaaaggtcgcgtgcttctggttgatggccatcatctcgcgtatcgtaacttctttgccctgaaaggattaaccaccagcagcggcgagccggtacagggtgtctacggctttgcaaagtcgctcctgaaagctctgaaagaagacggtgatgtggtgattgttgtctttgatgcgaaagcgccaagttttcgccacgaagcgtacgaagcttacaaagccgggcgtgctccaacgccggaagactttcctcgccaattggcgcttatgaaggaattagtggatttgcttggcctcgaacgcttggaagttcccggtttcgaggcagacgacgtattagcgactctcgcaaagaaagccgaacgtgagggctatgaagtccagatcttgacagcagatcgcgatcttttccagcttttatctccgcgcatctcggtgttacacccggaagggcatcgtatcaccccggaatggctctgggagaaatatggtttgcgtcccgaacaatgggtggattttcgcgccttagcaggcgatccgagcgacaatattccgggagttaaaggtatcggcgagaagacggcgctcaagctccttaaagaatgggggtcgttggagaacttgcttaagaatttagatcaggtcaaaccagagtcagtgcgtgagaagattcttgctcacctcgaagacctcaaattaagccgcgaattgtcccgtgtacgcaccgatttgccgctcgaagttgatttccaacgccgccgcgaacctgactgggagggtcttaaagcgtttttagagcgtcttgaatttggttcgctcttgcatgaattcggccttttagaaagcccgttaccagccgaagaagcaccttggccaccgcccgagggcgcgtttttaggttaccgtttgagtcgcccggaaccgatgtgggccgaattactggctcttgcagcgtctgcccagggacgtgtgtatcgcgcggaagaccctcatggtgcgctccgcggcctcttcgaagtccgtggactccttgccaaagacttagctgttgttgcattgcgcgaaggtcttgatttacctccgactgatgatccaatgcttcttgcgtacctcttggacccgtcaaacacgacgcccgaaggcgtagcccgtcgttacggcggcgagtggaccgaagatgcagcgaaacgcgcgttattggccgaacgtttgcacgccaatttattaggacgtttgcaaggcgaggaacgtctcctctggctttacgaagaagtggagaaaccattgagtcgcgtgctcgcgcatatggaagctaccggtgtcaaattagacgtggcgtatttggagaatctcagccttgaagttgctgcccacatgcgccgcttggaggaagaagtattccgtttagcaggccgttcctttcgccttaattctcgcgatcagttagaacgtgtgttgttcgatgaacttggtctccctcctatcggcaagacagagaagaccggtaaacgtagcacttcagcggcggttttagaagctcttcgcgaagtccatcccattgtggacaagatcttgcaataccgcgaactcgcgaaattgaaaggcacctatattgaccgtcttccggcattagtccacccgaaaacgggacgcctccatacccgcttcaaccaaacagccacggcgaccggtcgtttgtcctcctctgatccaaaccttcagaatattccagtacgtaccccattgggccagaagatccgccgtgcgtttgtagctgaggagggttggcgtttagtggccctcgattatagccaaattgaattacgtgtccttgcccatctttctggcgatgagaacctcatccgcgtgtttcaggaaggcaaagacattcacactcaaacggcaagctggatgtttggattatcagctgaagcgatcgatcctttgatgcgtcgtgcagcgaagaccatcaatttcggtgttctctacggtatgagtgcctttcgtttgtcgcaggaattaggcattccctatgaagaagctcaggcgttcattcagaaatactttcaaagctatcccaaagttaaagcatggatcgagaagactctcgaagaaggccgcacacgtggttacgtagagaccttatttggacgtcgccgctatgttcccgatttaaacgctcgcgtgaaaggcaagcgtgaagccgccgaacgcatggcgttcaacatgcctgtacagggcacggcagctgacctcatgaaacttgcaatggtgcgcctttttccacaattgcgtgaagttggtgcccgcatgctcttgcaggtccacgatgaactcttgttagaagcgccaaaagagcgtgcggaagaggtggcagccctcgcgaaagaagttatggaaggcgtgtggcccttagcggtgcctcttgaagtcgaagttggtattggcgaggattggctggctgccaaagga

SEQ ID NO: 3412 - protein, 841 aa, synthetic construct
  REGION 1..841: note = Variant of DNA polymerase I from Thermus sp. strain 2.9
MHHHHHHGGSEVLPVFEPKGRVLLVDGHHLAYRNFFALKGLTTSSGEPVQGVYGFAKSLLKALKEDGDVVIVVFDAKAPSFRHEAYEAYKAGRAPTPEDFPRQLALMKELVDLLGLERLEVPGFEADDVLATLAKKAEREGYEVQILTADRDLFQLLSPRISVLHPEGHRITPEWLWEKYGLRPEQWVDFRALAGDPSDNIPGVKGIGEKTALKLLKEWGSLENLLKNLDQVKPESVREKILAHLEDLKLSRELSRVRTDLPLEVDFQRRREPDWEGLKAFLERLEFGSLLHEFGLLESPLPAEEAPWPPPEGAFLGYRLSRPEPMWAELLALAASAQGRVYRAEDPHGALRGLFEVRGLLAKDLAVVALREGLDLPPTDDPMLLAYLLDPSNTTPEGVARRYGGEWTEDAAKRALLAERLHANLLGRLQGEERLLWLYEEVEKPLSRVLAHMEATGVKLDVAYLENLSLEVAAHMRRLEEEVFRLAGRSFRLNSRDQLERVLFDELGLPPIGKTEKTGKRSTSAAVLEALREVHPIVDKILQYRELAKLKGTYIDRLPALVHPKTGRLHTRFNQTATATGRLSSSDPNLQNIPVRTPLGQKIRRAFVAEEGWRLVALDYSQIELRVLAHLSGDENLIRVFQEGKDIHTQTASWMFGLSAEAIDPLMRRAAKTINFGVLYGMSAFRLSQELGIPYEEAQAFIQKYFQSYPKVKAWIEKTLEEGRTRGYVETLFGRRRYVPDLNARVKGKREAAERMAFNMPVQGTAADLMKLAMVRLFPQLREVGARMLLQVHDELLLEAPKERAEEVAALAKEVMEGVWPLAVPLEVEVGIGEDWLAAKG

SEQ ID NO: 3413 - DNA, 2523 bp, synthetic construct
  misc_feature 1..2523: note = Variant of DNA polymerase I from Thermus sp. strain 2.9
  source 1..2523: mol_type = other DNA
atgcaccatcatcatcatcatggcggtagcggcgtgttagaggtgttcgagcctaaaggtcgcgtgcttctggttgatggccatcatctcgcgtatcgtaacttctttgccctgaaaggattaaccaccagcagcggcgagccggtacagggtgtctacggctttgcaaagtcgctcctgaaagctctgaaagaagacggtgatgtggtgattgttgtctttgatgcgaaagcgccaagttttcgccacgaagcgtacgaagcttacaaagccgggcgtgctccaacgccggaagactttcctcgccaattggcgcttatgaaggaattagtggatttgcttggcctcgaacgcttggaagttcccggtttcgaggcagacgacgtattagcgactctcgcaaagaaagccgaacgtgagggctatgaagtccagatcttgacagcagatcgcgatcttttccagcttttatctccgcgcatctcggtgttacacccggatgggcatcgtatcaccccggaatggctctgggagaaatatggtttgcgtcccgaacaatgggtggattttcgcgccttagcaggcgatccgagcgacaatattccgggagttaaaggtatcggcgagaagacggcgctcaagctccttaaagaatgggggtcgttggagaacttgcttaagaatttagatcaggtcaaaccagagtcagtgcgtgagaagattcttgctcacctcgaagacctcaaattaagccgcgaattgtcccgtgtacgcaccgatttgccgctcgaagttgatttccaacgccgccgcgaacctgactgggagggtcttaaagcgtttttagagcgtcttgaatttggttcgctcttgcatgaattcggccttttagaaagcccgttaccagccgaagaagcaccttggccaccgcccgagggcgcgtttttaggttaccgtttgagtcgcccggaaccgatgtgggccgaattactggctcttgcagcgtctgcccagggacgtgtgtatcgcgcggaagaccctcatggtgcgctccgcggcctcttcgaagtccgtggactccttgccaaagacttagctgttgttgcattgcgcgaaggtcttgatttacctccgactgatgatccaatgcttcttgcgtacctcttggacccgtcaaacacgacgcctgaaggcgtagcccgtcgttacggcggcgagtggaccgaagatgcagcgaaacgcgcgttattggccgaacgtttgcacgccaatttattaggacgtttgcaaggcgaggagcgtctcctctggctttacgaagaagtggagaaaccattgagtcgcgtgctcgcgcatatggaagctaccggtgtcaaattagacgtggcgtatttggagaatctcagccttgaagttgctgcccacatgcgccgcttggaggaagaagtattccgtttagcaggccgttcctttcgccttaattctcgcgatcagttagaacgtgtgttgttcgatgaacttggtctccctcctatcggcaagacagagaagaccggtaaacgtagcacttcagcggcggttttagaagctcttcgcgaagtccatcccattgtggacaagatcttgcaataccgcgaactcgcgaaattgaaaggcacctatattgaccgtcttccggcattagtccacccgaaaacgggacgcctccatacccgcttcaaccaaacagccacggcgaccggtcgtttgtcctcctctgatccaaaccttcagaatattccagtacgtaccccgttgggccagaagatccgccgtgcgtttgtagctgaggagggttggcgtttagtggccctcgattatagccaaattgaattacgtgtccttgcccatctttctggcgatgagaacctcatccgcgtgtttcaggaaggcaaagacattcacactcaaacggcaagctggatgtttggattatcagctgaagcgatcgatcctttgatgcgtcgtgcagcgaagaccatcaatttcggtgttctctacggtatgagtgcctttcgtttgtcgcaggaattaggcattccctatgaagaagctcaggcgttcattcagaaatactttcaaagctatcccaaagttaaagcatggatcgagaagactctcgaagaaggccgcacacgtggttacgtagagaccttatttggacgtcgccgctatgttcccgatttaaacgctcgcgtgaaaggcaagcgtgaagccgccgaacgcatggcgttcaacatgcctgtacagggcacggcagctgacctcatgaaacttgcaatggtgcgcctttttccacaattgcgtgaagttggtgcccgcatgctcttgcaggtccacgatgaactcttgttagaagcgccaaaagagcgtgcggaagaggtggcagccctcgcgaaagaagttatggaaggcgtgtggcccttagcggtgcctcttgaagtcgaagttggtattggcgaggattggctggctgccaaagga

SEQ ID NO: 3414 - protein, 841 aa, synthetic construct
  REGION 1..841: note = Variant of DNA polymerase I from Thermus sp. strain 2.9
MHHHHHHGGSGVLEVFEPKGRVLLVDGHHLAYRNFFALKGLTTSSGEPVQGVYGFAKSLLKALKEDGDVVIVVFDAKAPSFRHEAYEAYKAGRAPTPEDFPRQLALMKELVDLLGLERLEVPGFEADDVLATLAKKAEREGYEVQILTADRDLFQLLSPRISVLHPDGHRITPEWLWEKYGLRPEQWVDFRALAGDPSDNIPGVKGIGEKTALKLLKEWGSLENLLKNLDQVKPESVREKILAHLEDLKLSRELSRVRTDLPLEVDFQRRREPDWEGLKAFLERLEFGSLLHEFGLLESPLPAEEAPWPPPEGAFLGYRLSRPEPMWAELLALAASAQGRVYRAEDPHGALRGLFEVRGLLAKDLAVVALREGLDLPPTDDPMLLAYLLDPSNTTPEGVARRYGGEWTEDAAKRALLAERLHANLLGRLQGEERLLWLYEEVEKPLSRVLAHMEATGVKLDVAYLENLSLEVAAHMRRLEEEVFRLAGRSFRLNSRDQLERVLFDELGLPPIGKTEKTGKRSTSAAVLEALREVHPIVDKILQYRELAKLKGTYIDRLPALVHPKTGRLHTRFNQTATATGRLSSSDPNLQNIPVRTPLGQKIRRAFVAEEGWRLVALDYSQIELRVLAHLSGDENLIRVFQEGKDIHTQTASWMFGLSAEAIDPLMRRAAKTINFGVLYGMSAFRLSQELGIPYEEAQAFIQKYFQSYPKVKAWIEKTLEEGRTRGYVETLFGRRRYVPDLNARVKGKREAAERMAFNMPVQGTAADLMKLAMVRLFPQLREVGARMLLQVHDELLLEAPKERAEEVAALAKEVMEGVWPLAVPLEVEVGIGEDWLAAKG

SEQ ID NO: 3415 - DNA, 2523 bp, synthetic construct
  misc_feature 1..2523: note = Variant of DNA polymerase I from Thermus sp. strain 2.9
  source 1..2523: mol_type = other DNA
atgcaccatcatcatcatcatggcggtagcggcgtgttacctgtgttcgagcctaaaggtcgcgtgcttctggttgatggccatcatctcgcgtatcgtaacttctttgccctgaaaggattaaccaccagcagcggcgagccggtacagggtgtctacggctttgcaaagtcgctcctgaaagctctgaaagaagacggtgatgtggtgattgttgtctttgatgcgaaagcgccaagttttcgccacgaagcgtacgaagcttacaaagccgggcgtgctccaacgccggaagactttcctcgccaattggcgcttatgaaggaattagtggatttgcttggcctcgaacgcttggaagttcccggtttcgaggcagacgacgtattagcgactctcgcaaagaaagccgaacgtgagggctatgaagtccagatcttgacagcagatcgcgatcttttccagcttttatctccgcgcatctcggtgttacacccggatgggcatcgtatcaccccggaatggctctgggagaaatatggtttgcgtcccgaacaatgggtggattttcgcgccttagcaggcgatccgagcgacaatattccgggagttaaaggtatcggcgagaagacggcgctcaagctccttaaagaatgggggtcgttggagaacttgcttaagaatttagatcaggtcaaaccagagtcagtgcgtgagaagattcttgctcacctcgaagacctcaaattaagccgcgaattgtcccgtgtacgcaccgatttgccgctcgaagttgatttccaacgccgccgcgaacctgactgggagggtcttaaagcgtttttagagcgtcttgaatttggttcgctcttgcatgaattcggccttttagaaagcccgttaccagccgaagaagcaccttggccaccgcccgagggcgcgtttttaggttaccgtttgagtcgcccggaaccgatgtgggccgaattactggctcttgcagcgtctgcccagggacgtgtgtatcgcgcggaagaccctcatggtgcgctccgcggcctcttcgaagtccgtggactccttgccaaagacttagctgttgttgcattgcgcgaaggtcttgatttacctccgactgatgatccaatgcttcttgcgtacctcttggacccgtcaaacacgacgcccgaaggcgtagcccgtcgttacggcggcgagtggaccgaagatgcagcgaaacgcgcgttattggccgaacgtttgcacgccaatttattaggacgtttgcaaggcgaggaacgtctcctctggctttacgaagaagtggagaaaccattgagtcgcgtgctcgcgcatatggaagctaccggtgtcaaattagacgtggcgtatttggagaatctcagccttgaagttgctgcccacatgcgccgcttggaggaagaagtattccgtttagcaggccgttcctttcgccttaattctcgcgatcagttagaacgtgtgttgttcgatgaacttggtctccctcctatcggcaagacagagaagaccggtaaacgtagcacttcagcggcggttttagaagctcttcgcgaagtccatcccattgtggacaagatcttgcaataccgcgaactcgcgaaattgaaaggcacctatattgaccgtcttccggcattagtccacccgaaaacgggacgcctccatacccgcttcaaccaaacagccacggcgaccggtcgtttgtcctcctctgatccaaaccttcagaatattccagtacgtaccccattgggccagaagatccgccgtgcgtttgtagctgaggagggttggcgtttagtggccctcgattatagccaaattgaattacgtgtccttgcccatctttctggcgatgagaacctcatccgcgtgtttcaggaaggcaaagacattcacactcaaacggcaagctggatgtttggattatcagctgaagcgatcgatcctttgatgcgtcgtgcagcgaagaccatcaatttcggtgttctctacggtatgagtgcctttcgtttgtcgcaggaattaggcattccctacgaagaagctcaggcgttcattcagaaatactttcaaagctatcccaaagttaaagcatggatcgagaagactctcgaagaaggccgcacacgtggttacgtagagaccttatttggacgtcgccgctatgttcccgatttaaacgctcgcgtgaaaggcaagcgtgaagccgccgaacgcatggcgttcaacatgcctgtacagggcacggcagctgacctcatgaaacttgcaatggtgcgcctttttccacaattgcgtgaagttggtgcccgcatgctcttgcaggtccacgatgaactcttgttagaagcgccaaaagagcgtgcggaagaggtggcagccctcgcgaaagaagttatggaaggcgtgtggcccttagcggtgcctcttgaagtcgaagttggtattggcgaggattggctggctgccaaagga

SEQ ID NO: 3416 - protein, 841 aa, synthetic construct; identical to SEQ ID NO: 3370
  REGION 1..841: note = Variant of DNA polymerase I from Thermus sp. strain 2.9

SEQ ID NO: 3417 - DNA, 2523 bp, synthetic construct
  misc_feature 1..2523: note = Variant of DNA polymerase I from Thermus sp. strain 2.9
  source 1..2523: mol_type = other DNA
atgcaccatcatcatcatcatggcggtagcggcgtgttaccggtgttcgagcctaaaggtcgcgtgcttctggttgatggccatcatctcgcgtatcgtaacttctttgccctgaaaggattaaccaccagcagcggcgagccggtacagggtgtctacggctttgcaaagtcgctcctgaaagctctgaaagaagacggtgatgtggtgattgttgtctttgatgcgaaagcgccaagttttcgccacgaagcgtacgaagcttacaaagccgggcgtgctccaacgccggaagactttcctcgccaattggcgcttatgaaggaattagtggatttgcttggcctcgaacgcttggaagttcccggtttcgaggcagacgacgtattagcgactctcgcaaagaaagccgaacgtgagggctatgaagtccagatcttgacagcagatcgcgatcttttccagcttttatctccgcgcatctcggtgttacacccggaagggcatcgtatcaccccggaatggctctgggagaaatatggtttgcgtcccgaacaatgggtggattttcgcgccttagcaggcgatccgagcgacaatattccgggagttaaaggtatcggcgagaagacggcgctcaagctccttaaagaatgggggtcgttggagaacttgcttaagaatttagatcaggtcaaaccagagtcagtgcgtgagaagattcttgctcacctcgaagacctcaaattaagccgcgaattgtcccgtgtacgcaccgatttgccgctcgaagttgatttccaacgccgccgcgaacctgactgggagggtcttaaagcgtttttagagcgtcttgaatttggttcgctcttgcatgaattcggccttttagaaagcccgttaccagccgaagaagcaccttggccaccgcccgagggcgcgtttttaggttaccgtttgagtcgcccggaaccgatgtgggccgaattactggctcttgcagcgtctgcccagggacgtgtgtatcgcgcggaagaccctcatggtgcgctccgcggcctcttcgaagtccgtggactccttgccaaagacttagctgttgttgcattgcgcgaaggtcttgatttacctccgactgatgatccaatgcttcttgcgtacctcttggacccgtcaaacacgacgcccgaaggcgtagcccgtcgttacggcggcgagtggaccgaagatgcagcgaaacgcgcgttattggccgaacgtttgcacgccaatttattacggcgtttgcaaggcgaggaacgtctcctctggctttacgaagaagtggagaaaccattgagtcgcgtgctcgcgcatatggaagctaccggtgtcaaattagacgtggcgtatttggagaatctcagccttgaagttgctgcccacatgcgccgcttggaggaagaagtattccgtttagcaggccgttcctttcgccttaattctcgcgatcagttagaacgtgtgttgttcgatgaacttggtctccctcctatcggcaagacagagaagaccggtaaacgtagcacttcagcggcggttttagaagctcttcgcgaagtccatcccattgtggacaagatcttgcaataccgcgaactcgcgaaattgaaaggcacctatattgaccgtcttccggcattagtccacccgaaaacgggacgcctccatacccgcttcaaccaaacagccacggcgaccggtcgtttgtcctcctctgatccaaaccttcagaatattccagtacgtaccccattgggccagaagatccgccgtgcgtttgtagctgaggagggttggcgtttagtggccctcgattatagccaaattgaattacgtgtccttgcccatctttctggcgatgagaacctcatccgcgtgtttcaggaaggcaaagacattcacactcaaacggcaagctggatgtttggattatcagctgaagcgatcgatcctttgatgcgtcgtgcagcgaagaccatcaatttcggtgttctctacggtatgagtgcctttcgtttgtcgcaggaattaggcattccctatgaagaagctcaggcgttcattcagaaatactttcaaagctatcccaaagttaaagcatggatcgagaagactctcgaagaaggccgcacacgtggttacgtagagaccttatttggacgtcgccgctatgttcccgatttaaacgctcgcgtgaaaggcaagcgtgaagccgccgaacgcatggcgttcaacatgcctgtacagggcacggcagctgacctcatgaaacttgcaatggtgcgcctttttccacaattgcgtgaagttggtgcccgcatgctcttgcaggtccacgatgaactcttgttagaagcgccaaaagagcgtgcggaagaggtggcagccctcgcgaaagaagttatggaaggcgtgtggcccttagcggtgcctcttgaagtcgaagttggtattggcgaggattggctggctgccaaagga

SEQ ID NO: 3418 - protein, 841 aa, synthetic construct
  REGION 1..841: note = Variant of DNA polymerase I from Thermus sp. strain 2.9
MHHHHHHGGSGVLPVFEPKGRVLLVDGHHLAYRNFFALKGLTTSSGEPVQGVYGFAKSLLKALKEDGDVVIVVFDAKAPSFRHEAYEAYKAGRAPTPEDFPRQLALMKELVDLLGLERLEVPGFEADDVLATLAKKAEREGYEVQILTADRDLFQLLSPRISVLHPEGHRITPEWLWEKYGLRPEQWVDFRALAGDPSDNIPGVKGIGEKTALKLLKEWGSLENLLKNLDQVKPESVREKILAHLEDLKLSRELSRVRTDLPLEVDFQRRREPDWEGLKAFLERLEFGSLLHEFGLLESPLPAEEAPWPPPEGAFLGYRLSRPEPMWAELLALAASAQGRVYRAEDPHGALRGLFEVRGLLAKDLAVVALREGLDLPPTDDPMLLAYLLDPSNTTPEGVARRYGGEWTEDAAKRALLAERLHANLLRRLQGEERLLWLYEEVEKPLSRVLAHMEATGVKLDVAYLENLSLEVAAHMRRLEEEVFRLAGRSFRLNSRDQLERVLFDELGLPPIGKTEKTGKRSTSAAVLEALREVHPIVDKILQYRELAKLKGTYIDRLPALVHPKTGRLHTRFNQTATATGRLSSSDPNLQNIPVRTPLGQKIRRAFVAEEGWRLVALDYSQIELRVLAHLSGDENLIRVFQEGKDIHTQTASWMFGLSAEAIDPLMRRAAKTINFGVLYGMSAFRLSQELGIPYEEAQAFIQKYFQSYPKVKAWIEKTLEEGRTRGYVETLFGRRRYVPDLNARVKGKREAAERMAFNMPVQGTAADLMKLAMVRLFPQLREVGARMLLQVHDELLLEAPKERAEEVAALAKEVMEGVWPLAVPLEVEVGIGEDWLAAKG

SEQ ID NO: 3419 - DNA, 2523 bp, synthetic construct
  misc_feature 1..2523: note = Variant of DNA polymerase I from Thermus sp. strain 2.9
  source 1..2523: mol_type = other DNA
atgcaccatcatcatcatcatggcggtagcggcgtgttaccggtgttcgagcctaaaggtcgcgtgcttctggttgatggccatcatctcgcgtatcgtaacttctttgccctgaaaggattaaccaccagcagcggcgagccggtacagggtgtctacggctttgcaaagtcgctcctgaaagctctgaaagaagacggtgatgtggtgattgttgtctttgatgcgaaagcgccaagttttcgccacgaagcgtacgaagcttacaaagccgggcgtgctccaacgccggaagactttcctcgccaattggcgcttatgaaggaattagtggatttgcttggcctcgaacgcttggaagttcccggtttcgaggcagacgacgtattagcgactctcgcaaagaaagccgaacgtgagggctatgaagtccagatcttgacagcagatcgcgatcttttccagcttttatctccgcgcatctcggtgttacacccggaagggcatcgtatcaccccggaatggctctgggagaaatatggtttgcgtcccgaacaatgggtggattttcgcgccttagcaggcgatccgagcgacaatattccgggagttaaaggtatcggcgagaagacggcgctcaagctccttaaagaatgggggtcgttggagaacttgcttaagaatttagatcaggtcaaaccagagtcagtgcgtgagaagattcttgctcacctcgaagacctcaaattaagccgcgaattgtcccgtgtacgcaccgatttgccgctcgaagttgatttccaacgccgccgcgaacctgactgggagggtcttaaagcgtttttagagcgtcttgaatttggttcgctcttgcatgaattcggccttttagaaagcccgttaccagccgaagaagcaccttggccaccgcccgagggcgcgtttttaggttaccgtttgagtcgcccggaaccgatgtgggccgaattactggctcttgcagcgtctgcccagggacgtgtgtatcgcgcggaacatcctcatggtgcgctccgcggcctcttcgaagtccgtggactccttgccaaagacttagctgttgttgcattgcgcgaaggtcttgatttacctccgactgatgatccaatgcttcttgcgtacctcttggacccgtcaaacacgacgcccgaaggcgtagcccgtcgttacggcggcgagtggaccgaagatgcagcgaaacgcgcgttattggccgaacgtttgcacgccaatttattaggacgtttgcaaggcgaggaacgtctcctctggctttacgaagaagtggagaaaccattgagtcgcgtgctcgcgcatatggaagctaccggtgtcaaattagacgtggcgtatttggagaatctcagccttgaagttgctgcccacatgcgccgcttggaggaagaagtattccgtttagcaggccgttcctttcgccttaattctcgcgatcagttagaacgtgtgttgttcgatgaacttggtctccctcctatcggcaagacagagaagaccggtaaacgtagcacttcagcggcggttttagaagctcttcgcgaagtccatcccattgtggacaagatcttgcaataccgcgaactcgcgaaattgaaaggcacctatattgaccgtcttccggcattagtccacccgaaaacgggacgcctccatacccgcttcaaccaaacagccacggcgaccggtcgtttgtcctcctctgatccaaaccttcagaatattccagtacgtaccccattgggccagaagatccgccgtgcgtttgtagctgaggagggttggcgtttagtggccctcgattatagccaaattgaattacgtgtccttgcccatctttctggcgatgagaacctcatccgcgtgtttcaggaaggcaaagacattcacactcaaacggcaagctggatgtttggattatcagctgaagcgatcgatcctttgatgcgtcgtgcagcgaagaccatcaatttcggtgttctctacggtatgagtgcctttcgtttgtcgcaggaattaggcattccctatgaagaagctcaggcgttcattcagaaatactttcaaagctatcccaaagttaaagcatggatcgagaagactctcgaagaaggccgcacacgtggttacgtagagaccttatttggacgtcgccgctatgttcccgatttaaacgctcgcgtgaaaggcaagcgtgaagccgccgaacgcatggcgttcaacatgcctgtacagggcacggcagctgacctcatgaaacttgcaatggtgcgcctttttccacaattgcgtgaagttggtgcccgcatgctcttgcaggtccacgatgaactcttgttagaagcgccaaaagagcgtgcggaagaggtggcagccctcgcgaaagaagttatggaaggcgtgtggcccttagcggtgcctcttgaagtcgaagttggtattggcgaggattggctggctgccaaagga

SEQ ID NO: 3420 - protein, 841 aa, synthetic construct
  REGION 1..841: note = Variant of DNA polymerase I from Thermus sp. strain 2.9
MHHHHHHGGSGVLPVFEPKGRVLLVDGHHLAYRNFFALKGLTTSSGEPVQGVYGFAKSLLKALKEDGDVVIVVFDAKAPSFRHEAYEAYKAGRAPTPEDFPRQLALMKELVDLLGLERLEVPGFEADDVLATLAKKAEREGYEVQILTADRDLFQLLSPRISVLHPEGHRITPEWLWEKYGLRPEQWVDFRALAGDPSDNIPGVKGIGEKTALKLLKEWGSLENLLKNLDQVKPESVREKILAHLEDLKLSRELSRVRTDLPLEVDFQRRREPDWEGLKAFLERLEFGSLLHEFGLLESPLPAEEAPWPPPEGAFLGYRLSRPEPMWAELLALAASAQGRVYRAEHPHGALRGLFEVRGLLAKDLAVVALREGLDLPPTDDPMLLAYLLDPSNTTPEGVARRYGGEWTEDAAKRALLAERLHANLLGRLQGEERLLWLYEEVEKPLSRVLAHMEATGVKLDVAYLENLSLEVAAHMRRLEEEVFRLAGRSFRLNSRDQLERVLFDELGLPPIGKTEKTGKRSTSAAVLEALREVHPIVDKILQYRELAKLKGTYIDRLPALVHPKTGRLHTRFNQTATATGRLSSSDPNLQNIPVRTPLGQKIRRAFVAEEGWRLVALDYSQIELRVLAHLSGDENLIRVFQEGKDIHTQTASWMFGLSAEAIDPLMRRAAKTINFGVLYGMSAFRLSQELGIPYEEAQAFIQKYFQSYPKVKAWIEKTLEEGRTRGYVETLFGRRRYVPDLNARVKGKREAAERMAFNMPVQGTAADLMKLAMVRLFPQLREVGARMLLQVHDELLLEAPKERAEEVAALAKEVMEGVWPLAVPLEVEVGIGEDWLAAKG

SEQ ID NO: 3421 - DNA, 2523 bp, synthetic construct
  misc_feature 1..2523: note = Variant of DNA polymerase I from Thermus sp. strain 2.9
  source 1..2523: mol_type = other DNA
atgcaccatcatcatcatcatggcggtagcggcgtgttaccggtgttcgagcctaaaggtcgcgtgcttctggttgatggccatcatctcgcgtatcgtaacttctttgccctgaaaggattaaccaccagcagcggcgagccggtacagggtgtctacggctttgcaaagtcgctcctgaaagctctgaaagaagacggtgatgtggtgattgttgtctttgatgcgaaagcgccaagttttcgccacgaagcgtacgaagcttacaaagccgggcgtgctccaacgccggaagactttcctcgccaattggcgcttatgaaggaattagtggatttgcttggcctcgaacgcttggaagttcccggtttcgaggcagacgacgtattagcgactctcgcaaagaaagccgaacgtgagggctatgaagtccagatcttgacagcagatcgcgatcttttccagcttttatctccgcgcatctcggtgttacacccggaagggcatcgtatcaccccggaatggctctgggagaaatatggtttgcgtcccgaacaatgggtggattttcgcgccttagcaggcgatccgagcgacaatattccgggagttaaaggtatcggcgagaagacggcgctcaagctccttaaagaatgggggtcgttggagaacttgcttaagaatttagatcaggtcaaaccagagtcagtgcgtgagaagattcttgctcacctcgaagacctcaaattaagccgcgaattgtcccgtgtacgcaccgatttgccgctcgaagttgatttccaacgccgccgcgaacctgactgggagggtcttaaagcgtttttagagcgtcttgaatttggttcgctcttgcatgaattcggccttttagaaagcccgttaccagccgaagaagcaccttggccaccgcccgagggcgcgtttttaggttaccgtttgagtcgcccggaaccgatgtgggccgaattactggctcttgcagcgtctgcccagggacgtgtgtatcgcgcggaagaccctcatggtgcgctccgcggcctcttcgaagtccgtggactccttgccaaagacttagctgttgttgcattgcgcgaaggtcttgatttacctccgactgatgatccaatgcttcttgcgtacctcttggacccgtcaaacacgacgcccgaaggcgtagcccgtcgttacggcggcgagtggaccgaagatgcagcgaaacgcgcgttattggccgaacgtttgcacgccaatttattaggacgtttgcaaggcgaggaacgtctcctctggctttacgaagaagtggagaaaccattgagtgtggtgctcgcgcatatggaagctaccggtgtcaaattagacgtggcgtatttggagaatctcagccttgaagttgctgcccacatgcgccgcttggaggaagaagtattccgtttagcaggccgttcctttcgccttaattctcgcgatcagttagaacgtgtgttgttcgatgaacttggtctccctcctatcggcaagacagagaagaccggtaaacgtagcacttcagcggcggttttagaagctcttcgcgaagtccatcccattgtggacaagatcttgcaataccgcgaactcgcgaaattgaaaggcacctatattgaccgtcttccggcattagtccacccgaaaacgggacgcctccatacccgcttcaaccaaacagccacggcgaccggtcgtttgtcctcctctgatccaaaccttcagaatattccagtacgtaccccattgggccagaagatccgccgtgcgtttgtagctgaggagggttggcgtttagtggccctcgattatagccaaattgaattacgtgtccttgcccatctttctggcgatgagaacctcatccgcgtgtttcaggaaggcaaagacattcacactcaaacggcaagctggatgtttggattatcagctgaagcgatcgatcctttgatgcgtcgtgcagcgaagaccatcaatttcggtgttctctacggtatgagtgcctttcgtttgtcgcaggaattaggcattccctatgaagaagctcaggcgttcattcagaaatactttcaaagctatcccaaagttaaagcatggatcgagaagactctcgaagaaggccgcacacgtggttacgtagagaccttatttggacgtcgccgctatgttcccgatttaaacgctcgcgtgaaaggcaagcgtgaagccgccgaacgcatggcgttcaacatgcctgtacagggcacggcagctgacctcatgaaacttgcaatggtgcgcctttttccacaattgcgtgaagttggtgcccgcatgctcttgcaggtgcccgatgaactcttgttagaagcgccaaaagagcgtgcggaagaggtggcagccctcgcgaaagaagttatggaaggcgtgtggcccttagcggtgcctcttgaagtcgaagttggtattggcgaggattggctggctgccaaagga

SEQ ID NO: 3422 - protein, 841 aa, synthetic construct
  REGION 1..841: note = Variant of DNA polymerase I from Thermus sp. strain 2.9
MHHHHHHGGSGVLPVFEPKGRVLLVDGHHLAYRNFFALKGLTTSSGEPVQGVYGFAKSLLKALKEDGDVVIVVFDAKAPSFRHEAYEAYKAGRAPTPEDFPRQLALMKELVDLLGLERLEVPGFEADDVLATLAKKAEREGYEVQILTADRDLFQLLSPRISVLHPEGHRITPEWLWEKYGLRPEQWVDFRALAGDPSDNIPGVKGIGEKTALKLLKEWGSLENLLKNLDQVKPESVREKILAHLEDLKLSRELSRVRTDLPLEVDFQRRREPDWEGLKAFLERLEFGSLLHEFGLLESPLPAEEAPWPPPEGAFLGYRLSRPEPMWAELLALAASAQGRVYRAEDPHGALRGLFEVRGLLAKDLAVVALREGLDLPPTDDPMLLAYLLDPSNTTPEGVARRYGGEWTEDAAKRALLAERLHANLLGRLQGEERLLWLYEEVEKPLSVVLAHMEATGVKLDVAYLENLSLEVAAHMRRLEEEVFRLAGRSFRLNSRDQLERVLFDELGLPPIGKTEKTGKRSTSAAVLEALREVHPIVDKILQYRELAKLKGTYIDRLPALVHPKTGRLHTRFNQTATATGRLSSSDPNLQNIPVRTPLGQKIRRAFVAEEGWRLVALDYSQIELRVLAHLSGDENLIRVFQEGKDIHTQTASWMFGLSAEAIDPLMRRAAKTINFGVLYGMSAFRLSQELGIPYEEAQAFIQKYFQSYPKVKAWIEKTLEEGRTRGYVETLFGRRRYVPDLNARVKGKREAAERMAFNMPVQGTAADLMKLAMVRLFPQLREVGARMLLQVPDELLLEAPKERAEEVAALAKEVMEGVWPLAVPLEVEVGIGEDWLAAKG

SEQ ID NO: 3423 - DNA, 2523 bp, synthetic construct
  misc_feature 1..2523: note = Variant of DNA polymerase I from Thermus sp. strain 2.9
  source 1..2523: mol_type = other DNA
atgcaccatcatcatcatcatggcggtagcggcgtgttaccggtgttcgagcctaaaggtcgcgtgcttctggttgatggccatcatctcgcgtatcgtaacttctttgccctgaaaggattaaccaccagcagcggcgagccggtacagggtgtctacggctttgcaaagtcgctcctgaaagctctgaaagaagacggtgatgtggtgattgttgtctttgatgcgaaagcgccaagttttcgccacgaagcgtacgaagcttacaaagccgggcgtgctccaacgccggaagactttcctcgccaattggcgcttatgaaggaattagtggatttgcttggcctcgaacgcttggaagttcccggtttcgaggcagacgacgtattagcgactctcgcaaagaaagccgaacgtgagggctatgaagtccagatcttgacagcagatcgcgatcttttccagcttttatctccgcgcatctcggtgttacacccggaagggcatcgtatcaccccggaatggctctgggagaaatatggtttgcgtcccgaacaatgggtggattttcgcgccttagcaggcgatccgagcgacaatattccgggagttaaaggtatcggcgagaagacggcgctcaagctccttaaagaatgggggtcgttggagaacttgcttaagaatttagatcaggtcaaaccagagtcagtgcgtgagaagattcttgctcacctcgaagacctcaaattaagccgcgaattgtcccgtgtacgcaccgatttgccgctcgaagttgatttccaacgccgccgcgaacctgactgggagggtcttaaagcgtttttagagcgtcttgaatttggttcgctcttgcatgaattcggccttttagaaagcccgttaccagccgaagaagcaccttggccaccgcccgagggcgcgtttttaggttaccgtttgagtcgcccggaaccgatgtgggccgaattactggctcttgcagcgtctgcccagggacgtgtgtatcgcgcggaagaccctcatggtgcgctccgcggcctcttcgaagtccgtggactccttgccaaagacttagctgttgttgcattgcgcgaaggtcttgatttacctccgactgatgatccaatgcttcttgcgtacctcttggacccgtcaaacacgacgcccgaaggcgtagcccgtcgttacggcggcgagtggaccgaagatgcagcgaaacgcgcgttattggccgaacgtttgcacgccaatttattaggacgtttgcaaggcgaggaacgtctcctctggctttacgaagaagtggagaaaccattgagtcgcgtgctcgcgcatatggaagctaccggtgtcaaattagacgtggcgtatttggagaatctcagccttgaagttgctgcccacatgcgccgcttggaggaagaagtattccgtttagcaggccgttcctttcgccttaattctcgcgatcagttagaacgtgtgttgttcgatgaacttggtctccctcctatcggcaagacagagaagaccggtaaacgtagcacttcagcggcggttttagaagctcttcgcgaagtccatcccattgtggacaagatcttgcaataccgcgaactcgcgaaattgaaaggcacctatattgaccgtcttccggcattagtccacccgaaaacgggacgcctccatacccgcttcaaccaaacagccacggcgaccggtcgtttgtcctcctctgatccaaaccttcagaatattccagtacgtaccccattgggccagaagatccgccgtgcgtttgtagctgaggagggttggcgtttagtggccctcgattatagccaaattgaattacgtgtccttgcccatctttctggcgatgagaacctcatccgcgtgtttcaggaaggcaaagacattcacactcaaacggcaagctggatgtttggattatcagctgaagcgatcgatcctttgatgcgtcgtgcagcgaagaccatcaatttcggtgttctctacggtatgagtgcctttcgtttgtcgcaggaattaggcattccctatgaagaagctcaggcgttcattcagaaatactttcaaagctatcccaaagttaaagcatggatcgagaagactctcgaagaaggccgcacacgtggttacgtagagaccttatttggacgtcgccgctatgttcccgatttaaacgctcgcgtgaaaggcaagcgtgaagccgccgaacgcatggcgttcaacatgcctgtacagggcacggcagctgacctcatgaaacttgcaatggtgcgcctttttccacaattgcgtgaagttggtgcccgcatgctcttgcaggtccacgatgaactcttgttagaagcgccaaaagagcgtgcggaagaggtggcagccctcgcgaaagaagttatggaaggcgtgtggcccttagcggtgcctcttgaagtcgaagttggtttgggcgaggattggctggctgccaaagga

SEQ ID NO: 3424 - protein, 841 aa, synthetic construct
  REGION 1..841: note = Variant of DNA polymerase I from Thermus sp. strain 2.9
MHHHHHHGGSGVLPVFEPKGRVLLVDGHHLAYRNFFALKGLTTSSGEPVQGVYGFAKSLLKALKEDGDVVIVVFDAKAPSFRHEAYEAYKAGRAPTPEDFPRQLALMKELVDLLGLERLEVPGFEADDVLATLAKKAEREGYEVQILTADRDLFQLLSPRISVLHPEGHRITPEWLWEKYGLRPEQWVDFRALAGDPSDNIPGVKGIGEKTALKLLKEWGSLENLLKNLDQVKPESVREKILAHLEDLKLSRELSRVRTDLPLEVDFQRRREPDWEGLKAFLERLEFGSLLHEFGLLESPLPAEEAPWPPPEGAFLGYRLSRPEPMWAELLALAASAQGRVYRAEDPHGALRGLFEVRGLLAKDLAVVALREGLDLPPTDDPMLLAYLLDPSNTTPEGVARRYGGEWTEDAAKRALLAERLHANLLGRLQGEERLLWLYEEVEKPLSRVLAHMEATGVKLDVAYLENLSLEVAAHMRRLEEEVFRLAGRSFRLNSRDQLERVLFDELGLPPIGKTEKTGKRSTSAAVLEALREVHPIVDKILQYRELAKLKGTYIDRLPALVHPKTGRLHTRFNQTATATGRLSSSDPNLQNIPVRTPLGQKIRRAFVAEEGWRLVALDYSQIELRVLAHLSGDENLIRVFQEGKDIHTQTASWMFGLSAEAIDPLMRRAAKTINFGVLYGMSAFRLSQELGIPYEEAQAFIQKYFQSYPKVKAWIEKTLEEGRTRGYVETLFGRRRYVPDLNARVKGKREAAERMAFNMPVQGTAADLMKLAMVRLFPQLREVGARMLLQVHDELLLEAPKERAEEVAALAKEVMEGVWPLAVPLEVEVGLGEDWLAAKG

SEQ ID NO: 3425 - DNA, 2523 bp, synthetic construct
  misc_feature 1..2523: note = Variant of DNA polymerase I from Thermus sp. strain 2.9
  source 1..2523: mol_type = other DNA
atgcaccatcatcatcatcatggcggtagcggcgtgttagaggtgttcgagcctaaaggtcgcgtgcttctggttgatggccatcatctcgcgtatcgtaacttctttgccctgaaaggattaaccaccagcagcggcgagccggtacatggtgtctacggctttgcaaagtcgctcctgaaagctctgaaagaagacggtgatgtggtgattgttgtctttgatgcgaaagcgccaagttttcgccacgaagcgtacgaagcttacaaagccgggcgtgctccaacgccggaagactttcctcgccaattggcgcttatgaaggaattagtggatttgcttggcctcgaacgcttggaagttcccggtttcgaggcagacgacgtattagcgactctcgcaaagaaagccgaacgtgagggctatgaagtccagatcttgacagcagatcgcgatcttttccagcttttatctccgcgcatctcggtgttacacccggaagggcatcgtatcaccccggaatggctctgggagaaatatggtttgcgtcccgaacaatgggtggattttcgcgccttagcaggcgatcctagcgacaatattccgggagttaaaggtatcggcgagaagacggcgctcaagctccttaaagaatgggggtcgttggagaacttgcttaagaatttagatcaggtcaaaccagagtcagtgcgtgagaagattcttgctcacctcgaagacctcaaattaagccgcgaattgtcccgtgtacgcaccgatttgccgctcgaagttgatttccaacgccgccgcgaacctgactgggagggtcttaaagcgtttttagagcgtcttgaatttggttcgctcttgcatgaattcggccttttagaaagcccgttaccagccgaagaagcaccttggccaccgcccgagggcgcgtttttaggttaccgtttgagtcgcccggaaccgatgtgggccgaattactggctcttgcagcgtctgcccagggacgtgtgtatcgcgcggaagaccctcatggtgcgctccgcggcctcttcgaagtccgtggactccttgccaaagacttagctgttgttgcattgcgcgaaggtcttgatttacctccgactgatgatccaatgcttcttgcgtacctcttggacccgtcaaacacgacgcctgaaggcgtagcccgtcgttacggcggcgagtggaccgaagatgcagcgaaacgcgcgttattggccgaacgtttgcacgccaatttattaggacgtttgcaaggcgaggaacgtctcctctggctttacgaagaagtggagaaaccattgagtcgcgtgctcgcgcatatggaagctaccggtgtcaaattagacgtggcgtatttggagaatctcagccttgaagttgctgcccacatgcgccgcttggaggaagaagtattccgtttagcaggccgttcctttcgccttaattctcgcgatcagttagaacgtgtgttgttcgatgaacttggtctccctcctatcggcaagacagagaagaccggtaaacgtagcacttcagcggcggttttagaagctcttcgcgaagtccatcccattgtggacaagatcttgcaataccgcgaactcgcgaaattgaaaggcacctatattgaccgtcttccggcattagtccacccgaaaacgggacgcctccatacccgcttcaaccaaacagccacggcgaccggtcgtttgtcctcctctgatccaaaccttcagaatattccagtacgtaccccgttgggccagaagatccgccgtgcgtttgtagctgaggagggttggcgtttagtggccctcgattatagccaaattgaattacgtgtccttgcccatctttctggcgatgagaacctcatccgcgtgtttcaggaaggcaaagacattcacactcaaacggcaagctggatgtttggattatcagctgaagcgatcgatcctttgatgcgtcgtgcagcgaagaccatcaatttcggtgttctctacggtatgagtgcctttcgtttgtcgcaggaattaggcattccctatgaagaagctcaggcgttcattcagaaatactttcaaagctatcccaaagttaaagcatggatcgagaagactctcgaagaaggccgcacccgtggttacgtagagaccttatttggacgtcgccgctatgttcccgatttaaacgctcgcgtgaaaggcaagcgtgaagccgccgaacgcatggcgttcaacatgcctgtacagggcacggcagctgacctcatgaaacttgcaatggtgcgcctttttccacaattgcgtgaagttggtgcccgcatgctcttgcaggtccacgatgaactcttgttagaagcgccaaaagagcgtgcggaagaggtggcagccctcgcgaaagaagttatggaaggcgtgtggcccttagcggtgcctcttgaagtcgaagttggtattggcgaggattggctggctgccaaagga

SEQ ID NO: 3426 - protein, 841 aa, synthetic construct
  REGION 1..841: note = Variant of DNA polymerase I from Thermus sp. strain 2.9
MHHHHHHGGSGVLEVFEPKGRVLLVDGHHLAYRNFFALKGLTTSSGEPVHGVYGFAKSLLKALKEDGDVVIVVFDAKAPSFRHEAYEAYKAGRAPTPEDFPRQLALMKELVDLLGLERLEVPGFEADDVLATLAKKAEREGYEVQILTADRDLFQLLSPRISVLHPEGHRITPEWLWEKYGLRPEQWVDFRALAGDPSDNIPGVKGIGEKTALKLLKEWGSLENLLKNLDQVKPESVREKILAHLEDLKLSRELSRVRTDLPLEVDFQRRREPDWEGLKAFLERLEFGSLLHEFGLLESPLPAEEAPWPPPEGAFLGYRLSRPEPMWAELLALAASAQGRVYRAEDPHGALRGLFEVRGLLAKDLAVVALREGLDLPPTDDPMLLAYLLDPSNTTPEGVARRYGGEWTEDAAKRALLAERLHANLLGRLQGEERLLWLYEEVEKPLSRVLAHMEATGVKLDVAYLENLSLEVAAHMRRLEEEVFRLAGRSFRLNSRDQLERVLFDELGLPPIGKTEKTGKRSTSAAVLEALREVHPIVDKILQYRELAKLKGTYIDRLPALVHPKTGRLHTRFNQTATATGRLSSSDPNLQNIPVRTPLGQKIRRAFVAEEGWRLVALDYSQIELRVLAHLSGDENLIRVFQEGKDIHTQTASWMFGLSAEAIDPLMRRAAKTINFGVLYGMSAFRLSQELGIPYEEAQAFIQKYFQSYPKVKAWIEKTLEEGRTRGYVETLFGRRRYVPDLNARVKGKREAAERMAFNMPVQGTAADLMKLAMVRLFPQLREVGARMLLQVHDELLLEAPKERAEEVAALAKEVMEGVWPLAVPLEVEVGIGEDWLAAKG

SEQ ID NO: 3427 - DNA, 2523 bp, synthetic construct
  misc_feature 1..2523: note = Variant of DNA polymerase I from Thermus sp. strain 2.9
  source 1..2523: mol_type = other DNA
atgcaccatcatcatcatcatggcggtagcggcgtgttaccggtgttcgagcctaaaggtcgcgtgcttctggttgatggccatcatctcgcgtatcgtaacttctttgccctgaaaggattaaccaccagcagcggcgagccggtacagggtgtctacggctttgcaaagtcgctcctgaaagctctgaaagaagacggtgatgtggtgattgttgtctttgatgcgaaagcgccaagttttcgccacgaagcgtacgaagcttacaaagccgggcgtgctccaacgccggaagactttcctcgccaattggcgcttatgaaggaattagtggatttgcttggcctcgaacgcttggaagttcccggtttcgaggcagacgacgtattagcgactctcgcaaagaaagccgaacgtgagggctatgaagtccagatcttgacagcagatcgcgatcttttccagcttttatctccgcgcatctcggtgttacacccggaagggcatcgtatcaccccggaatggctctgggagaaatatggtttgcgtcccgaacaatgggtggattttcgcgccttagcaggcgatccgagcgacaatattccgggagttaaaggtatcggcgagaagacggcgctcaagctccttaaagaatgggggtcgttggagaacttgcttaagaatttagatcaggtcaaaccagagtcagtgcgtgagaagattcttgctcacctcgaagacctcaaattaagccgcgaattgtcccgtgtacgcaccgatttgccgctcgaagttgatttccaacgccgccgcgaacctgactgggagggtcttaaagcgtttttagagcgtcttgaatttggttcgctcttgcatgaattcggccttttagaaagcccgttaccagccgaagaagcaccttggccaccgcccgagggcgcgtttttaggttaccgtttgagtcgcccggaaccgatgtgggccgaattactggctcttgcagcgtctgcccagggacgtgtgtatcgcgcggaagaccctcatggtgcgctccgcggcctcttcgaagtccgtggactccttgccaaagacttagctgttgttgcattgcgcgaaggtcttgatttacctccgactgatgatccaatgcttcttgcgtacctcttggacccgtcaaacacgacgcccgaaggcgtagcccgtcgttacggcggcgagtggaccgaagatgcagcgaaacgcgcgttattggccgaacgtttgcacgccaatttattaggacgtttgcaaggcgaggaacgtctcctctggctttacgaagaagtggagaaaccattgagttcggtgctcgcgcatatggaagctaccggtgtcaaattagacgtggcgtatttggagaatctcagccttgaagttgctgcccacatgcgccgcttggaggaagaagtattccgtttagcaggccgttcctttcgccttaattctcgcgatcagttagaacgtgtgttgttcgatgaacttggtctccctcctatcggcaagacagagaagaccggtaaacgtagcacttcagcggcggttttagaagctcttcgcgaagtccatcccattgtggacaagatcttgcaataccgcgaactcgcgaaattgaaaggcacctatattgaccgtcttccggcattagtccacccgaaaacgggacgcctccatacccgcttcaaccaaacagccacggcgaccggtcgtttgtcctcctctgatccaaaccttcagaatattccagtacgtaccccattgggccagaagatccgccgtgcgtttgtagctgaggagggttggcgtttagtggccctcgattatagccaaattgaattacgtgtccttgcccatctttctggcgatgagaacctcatccgcgtgtttcaggaaggcaaagacattcacactcaaacggcaagctggatgtttggattatcagctgaagcgatcgatcctttgatgcgtcgtgcagcgaagaccatcaatttcggtgttctctacggtatgagtgcctttcgtttgtcgcaggaattaggcattccctatgaagaagctcaggcgttcattcagaaatactttcaaagctatcccaaagttaaagcatggatcgagaagactctcgaagaaggccgcacacgtggttacgtagagaccttatttggacgtcgccgctatgttcccgatttaaacgctcgcgtgaaaggcaagcgtgaagccgccgaacgcatggcgttcaacatgcctgtacagggcacggcagctgacctcatgaaacttgcaatggtgcgcctttttccacaattgcgtgaagttggtgcccgcatgctcttgcaggtccacgatgaactcttgttagaagcgccaaaagagcgtgcggaagaggtggcagccctcgcgaaagaagttatggaaggcgtgtggcccttagcggtgcctcttgaagtcgaagttggtattggcgaggattggctggctgccaaagga

SEQ ID NO: 3428 - protein, 841 aa, synthetic construct
  REGION 1..841: note = Variant of DNA polymerase I from Thermus sp. strain 2.9
MHHHHHHGGSGVLPVFEPKGRVLLVDGHHLAYRNFFALKGLTTSSGEPVQGVYGFAKSLLKALKEDGDVVIVVFDAKAPSFRHEAYEAYKAGRAPTPEDFPRQLALMKELVDLLGLERLEVPGFEADDVLATLAKKAEREGYEVQILTADRDLFQLLSPRISVLHPEGHRITPEWLWEKYGLRPEQWVDFRALAGDPSDNIPGVKGIGEKTALKLLKEWGSLENLLKNLDQVKPESVREKILAHLEDLKLSRELSRVRTDLPLEVDFQRRREPDWEGLKAFLERLEFGSLLHEFGLLESPLPAEEAPWPPPEGAFLGYRLSRPEPMWAELLALAASAQGRVYRAEDPHGALRGLFEVRGLLAKDLAVVALREGLDLPPTDDPMLLAYLLDPSNTTPEGVARRYGGEWTEDAAKRALLAERLHANLLGRLQGEERLLWLYEEVEKPLSSVLAHMEATGVKLDVAYLENLSLEVAAHMRRLEEEVFRLAGRSFRLNSRDQLERVLFDELGLPPIGKTEKTGKRSTSAAVLEALREVHPIVDKILQYRELAKLKGTYIDRLPALVHPKTGRLHTRFNQTATATGRLSSSDPNLQNIPVRTPLGQKIRRAFVAEEGWRLVALDYSQIELRVLAHLSGDENLIRVFQEGKDIHTQTASWMFGLSAEAIDPLMRRAAKTINFGVLYGMSAFRLSQELGIPYEEAQAFIQKYFQSYPKVKAWIEKTLEEGRTRGYVETLFGRRRYVPDLNARVKGKREAAERMAFNMPVQGTAADLMKLAMVRLFPQLREVGARMLLQVHDELLLEAPKERAEEVAALAKEVMEGVWPLAVPLEVEVGIGEDWLAAKG

SEQ ID NO: 3429 - DNA, 2523 bp, synthetic construct
  misc_feature 1..2523: note = Variant of DNA polymerase I from Thermus sp. strain 2.9
  source 1..2523: mol_type = other DNA
atgcaccatcatcatcatcatggcggtagcggcgtgttaccggtgttcgagcctaaaggtcgcgtgcttctggttgatggccatcatctcgcgtatcgtaacttctttgccctgaaaggattaaccaccagcagcggcgagccggtacagggtgtctacggctttgcaaagtcgctcctgaaagctctgaaagaagacggtgatgtggtgattgttgtctttgatgcgaaagcgccaagttttcgccacgaagcgtacgaagcttacaaagccgggcgtgctccaacgccggaagactttcctcgccaattggcgcttatgaaggaattagtggatttgcttggcctcgaacgcttggaagttagtggtttcgaggcagacgacgtattagcgactctcgcaaagaaagccgaacgtgagggctatgaagtccagatcttgacagcagatcgcgatcttttccagcttttatctccgcgcatctcggtgttacacccggaagggcatcgtatcaccccggaatggctctgggagaaatatggtttgcgtcccgaacaatgggtggattttcgcgccttagcaggcgatccgagcgacaatattccgggagttaaaggtatcggcgagaagacggcgctcaagctccttaaagaatgggggtcgttggagaacttgcttaagaatttagatcaggtcaaaccagagtcagtgcgtgagaagattcttgctcacctcgaagacctcaaattaagccgcgaattgtcccgtgtacgcaccgatttgccgctcgaagttgatttccaacgccgccgcgaacctgactgggagggtcttaaagcgtttttagagcgtcttgaatttggttcgctcttgcatgaattcggccttttagaaagcccgttaccagccgaagaagcaccttggccaccgcccgagggcgcgtttttaggttaccgtttgagtcgcccggaaccgatgtgggccgaattactggctcttgcagcgtctgcccagggacgtgtgtatcgcgcggaagaccctcatggtgcgctccgcggcctcttcgaagtccgtggactccttgccaaagacttagctgttgttgcattgcgcgaaggtcttgatttacctccgactgatgatccaatgcttcttgcgtacctcttggacccgtcaaacacgacgcccgaaggcgtagcccgtcgttacggcggcgagtggaccgaagatgcagcgaaacgcgcgttattggccgaacgtttgcacgccaatttattaggacgtttgcaaggcgaggaacgtctcctctggctttacgaagaagtggagaaaccattgagtcgcgtgctcgcgcatatggaagctaccggtgtcaaattagacgtggcgtatttggagaatctcagccttgaagttgctgcccacatgcgccgcttggaggaagaagtattccgtttagcaggccgttcctttcgccttaattctcgcgatcagttagaacgtgtgttgttcgatgaacttggtctccctcctatcggcaagacagagaagaccggtaaacgtagcacttcagcggcggttttagaagctcttcgcgaagtccatcccattgtggacaagatcttgcaataccgcgaactcgcgaaattgaaaggcacctatattgaccgtcttccggcattagtccacccgaaaacgggacgcctccatacccgcttcaaccaaacagccacggcgaccggtcgtttgtcctcctctgatccaaaccttcagaatattccagtacgtaccccattgggccagaagatccgccgtgcgtttgtagctgaggagggttggcgtttagtggccctcgattatagccaaattgaattacgtgtccttgcccatctttctggcgatgagaacctcatccgcgtgtttcaggaaggcaaagacattcacactcaaacggcaagctggatgtttggattatcagctgaagcgatcgatcctttgatgcgtcgtgcagcgaagaccatcaatttcggtgttctctacggtatgagtgcctttcgtttgtcgcaggaattaggcattccctatgaagaagctcaggcgttcattcagaaatactttcaaagctatcccaaagttaaagcatggatcgagaagactctcgaagaaggccgcacacgtggttacgtagagaccttatttggacgtcgccgctatgttcccgatttaaacgctcgcgtgaaaggcaagcgtgaagccgccgaacgcatggcgttcaacatgcctgtacagggcacggcagctgacctcatgaaacttgcaatggtgcgcctttttccacaattgcgtgaagttggtgcccgcatgctcttgcaggtccacgatgaactcttgttagaagcgccaaaagagcgtgcggaagaggtggcagccctcgcgaaagaagttatggaaggcgtgtggcccttagcggtgcctcttgaagtcgaagttggtattggcgaggattggctggctgccaaagga

SEQ ID NO: 3430 - protein, 841 aa, synthetic construct
  REGION 1..841: note = Variant of DNA polymerase I from Thermus sp. strain 2.9
MHHHHHHGGSGVLPVFEPKGRVLLVDGHHLAYRNFFALKGLTTSSGEPVQGVYGFAKSLLKALKEDGDVVIVVFDAKAPSFRHEAYEAYKAGRAPTPEDFPRQLALMKELVDLLGLERLEVSGFEADDVLATLAKKAEREGYEVQILTADRDLFQLLSPRISVLHPEGHRITPEWLWEKYGLRPEQWVDFRALAGDPSDNIPGVKGIGEKTALKLLKEWGSLENLLKNLDQVKPESVREKILAHLEDLKLSRELSRVRTDLPLEVDFQRRREPDWEGLKAFLERLEFGSLLHEFGLLESPLPAEEAPWPPPEGAFLGYRLSRPEPMWAELLALAASAQGRVYRAEDPHGALRGLFEVRGLLAKDLAVVALREGLDLPPTDDPMLLAYLLDPSNTTPEGVARRYGGEWTEDAAKRALLAERLHANLLGRLQGEERLLWLYEEVEKPLSRVLAHMEATGVKLDVAYLENLSLEVAAHMRRLEEEVFRLAGRSFRLNSRDQLERVLFDELGLPPIGKTEKTGKRSTSAAVLEALREVHPIVDKILQYRELAKLKGTYIDRLPALVHPKTGRLHTRFNQTATATGRLSSSDPNLQNIPVRTPLGQKIRRAFVAEEGWRLVALDYSQIELRVLAHLSGDENLIRVFQEGKDIHTQTASWMFGLSAEAIDPLMRRAAKTINFGVLYGMSAFRLSQELGIPYEEAQAFIQKYFQSYPKVKAWIEKTLEEGRTRGYVETLFGRRRYVPDLNARVKGKREAAERMAFNMPVQGTAADLMKLAMVRLFPQLREVGARMLLQVHDELLLEAPKERAEEVAALAKEVMEGVWPLAVPLEVEVGIGEDWLAAKG

SEQ ID NO: 3431 - DNA, 2523 bp, synthetic construct
  misc_feature 1..2523: note = Variant of DNA polymerase I from Thermus sp. strain 2.9
  source 1..2523: mol_type = other DNA
atgcaccatcatcatcatcatggcggtagcggcgtgttaccggtgttcgagcctaaaggtcgcgtgcttctggttgatggccatcatctcgcgtatcgtaacttctttgccctgaaaggattaaccaccagcagcggcgagccggtacagggtgtctacggctttgcaaagtcgctcctgaaagctctgaaagaagacggtgatgtggtgattgttgtctttgatgcgaaagcgccaagttttcgccacgaagcgtacgaagcttacaaagccgggcgtgctccaacgccggaagactttcctcgccaattggcgcttatgaaggaattagtggatttgcttggcctcgaacgcttggaagttcccggtttcgaggcagacgacgtattagcgactctcgcaaagaaagccgaacgtgagggctatgaagtccagatcttgacagcagatcgcgatcttttccagcttttatctccgcgcatctcggtgttacacccggaagggcatcgtatcaccccggaatggctctgggagaaatatggtttgcgtcccgaacaatgggtggattttcgcgccttagcaggcgatccgagcgacaatattccgggagttaaaggtatcggcgagaagacggcgctcaagctccttaaagaatgggggtcgttggagaacttgcttaagaatttagatcaggtcaaaccagagtcagtgcgtgagaagattcttgctcacctcgaagacctcaaattaagccgcgaattgtcccgtgtacgcaccgatttgccgctcgaagttgatttccaacgccgccgcgaacctgactgggagggtcttaaagcgtttttagagcgtcttgaatttggttcgctcttgcatgaattcggccttttagaaagcccgttaccagccgaagaagcaccttggccaccgcccgagggcgcgtttttaggttaccgtttgagtcgcccggaaccgatgtgggccgaattactggctcttgcagcgtctgcccagggacgtgtgtatcgcgcggaagaccctcatcgtgcgctccgcggcctcttcgaagtccgtggactccttgccaaagacttagctgttgttgcattgcgcgaaggtcttgatttacctccgactgatgatccaatgcttcttgcgtacctcttggacccgtcaaacacgacgcccgaaggcgtagcccgtcgttacggcggcgagtggaccgaagatgcagcgaaacgcgcgttattggccgaacgtttgcacgccaatttattaggacgtttgcaaggcgaggaacgtctcctctggctttacgaagaagtggagaaaccattgagtcgcgtgctcgcgcatatggaagctaccggtgtcaaattagacgtggcgtatttggagaatctcagccttgaagttgctgcccacatgcgccgcttggaggaagaagtattccgtttagcaggccgttcctttcgccttaattctcgcgatcagttagaacgtgtgttgttcgatgaacttggtctccctcctatcggcaagacagagaagaccggtaaacgtagcacttcagcggcggttttagaagctcttcgcgaagtccatcccattgtggacaagatcttgcaataccgcgaactcgcgaaattgaaaggcacctatattgaccgtcttccggcattagtccacccgaaaacgggacgcctccatacccgcttcaaccaaacagccacggcgaccggtcgtttgtcctcctctgatccaaaccttcagaatattccagtacgtaccccattgggccagaagatccgccgtgcgtttgtagctgaggagggttggcgtttagtggccctcgattatagccaaattgaattacgtgtccttgcccatctttctggcgatgagaacctcatccgcgtgtttcaggaaggcaaagacattcacactcaaacggcaagctggatgtttggattatcagctgaagcgatcgatcctttgatgcgtcgtgcagcgaagaccatcaatttcggtgttctctacggtatgagtgcctttcgtttgtcgcaggaattaggcattccctatgaagaagctcaggcgttcattcagaaatactttcaaagctatcccaaagttaaagcatggatcgagaagactctcgaagaaggccgcacacgtggttacgtagagaccttatttggacgtcgccgctatgttcccgatttaaacgctcgcgtgaaaggcaagcgtgaagccgccgaacgcatggcgttcaacatgcctgtacagggcacggcagctgacctcatgaaacttgcaatggtgcgcctttttccacaattgcgtgaagttggtgcccgcatgctcttgcaggtccacgatgaactcttgttagaagcgccaaaagagcgtgcggaagaggtggcagccctcgcgaaagaagttatggaaggcgtgtggcccttagcggtgcctcttgaagtcgaagttggtattggcgaggattggctggctgccaaagga

SEQ ID NO: 3432 - protein, 841 aa, synthetic construct
  REGION 1..841: note = Variant of DNA polymerase I from Thermus sp. strain 2.9
MHHHHHHGGSGVLPVFEPKGRVLLVDGHHLAYRNFFALKGLTTSSGEPVQGVYGFAKSLLKALKEDGDVVIVVFDAKAPSFRHEAYEAYKAGRAPTPEDFPRQLALMKELVDLLGLERLEVPGFEADDVLATLAKKAEREGYEVQILTADRDLFQLLSPRISVLHPEGHRITPEWLWEKYGLRPEQWVDFRALAGDPSDNIPGVKGIGEKTALKLLKEWGSLENLLKNLDQVKPESVREKILAHLEDLKLSRELSRVRTDLPLEVDFQRRREPDWEGLKAFLERLEFGSLLHEFGLLESPLPAEEAPWPPPEGAFLGYRLSRPEPMWAELLALAASAQGRVYRAEDPHRALRGLFEVRGLLAKDLAVVALREGLDLPPTDDPMLLAYLLDPSNTTPEGVARRYGGEWTEDAAKRALLAERLHANLLGRLQGEERLLWLYEEVEKPLSRVLAHMEATGVKLDVAYLENLSLEVAAHMRRLEEEVFRLAGRSFRLNSRDQLERVLFDELGLPPIGKTEKTGKRSTSAAVLEALREVHPIVDKILQYRELAKLKGTYIDRLPALVHPKTGRLHTRFNQTATATGRLSSSDPNLQNIPVRTPLGQKIRRAFVAEEGWRLVALDYSQIELRVLAHLSGDENLIRVFQEGKDIHTQTASWMFGLSAEAIDPLMRRAAKTINFGVLYGMSAFRLSQELGIPYEEAQAFIQKYFQSYPKVKAWIEKTLEEGRTRGYVETLFGRRRYVPDLNARVKGKREAAERMAFNMPVQGTAADLMKLAMVRLFPQLREVGARMLLQVHDELLLEAPKERAEEVAALAKEVMEGVWPLAVPLEVEVGIGEDWLAAKG

SEQ ID NO: 3433 - DNA, 2523 bp, synthetic construct
  misc_feature 1..2523: note = Variant of DNA polymerase I from Thermus sp. strain 2.9
  source 1..2523: mol_type = other DNA
atgcaccatcatcatcatcatggcggtagcggcgtgttaccggtgttcgagcctaaaggtcgcgtgcttctggttgatggccatcatctcgcgtatcgtaacttctttgccctgaaaggattaaccaccagcagcggcgagccggtacagggtgtctacggctttgcaaagtcgctcctgaaagctctgaaagaagacggtgatgtggtgattgttgtctttgatgcgaaagcgccaagttttcgccacgaagcgtacgaagcttacaaagccgggcgtgctccaacgccggaagactttcctcgccaattggcgcttatgaaggaattagtggatttgcttggcctcgaacgcttggaagttcccggtttcgaggcagacgacgtattagcgactctcgcaaagaaagccgaacgtgagggctatgaagtccagatcttgacagcagatcgcgatcttttccagcttttatctccgcgcatctcggtgttacacccggaagggcatcgtatcaccccggaatggctctgggagaaatatggtttgcgtcccgaacaatgggtggattttcgcgccttagcaggcgatccgagcgacaatattccgggagttaaaggtatcggcgagaagacggcgctcaagctccttaaagaatgggggtcgttggagaacttgcttaagaatttagatcaggtcaaaccagagtcagtgcgtgagaagattcttgctcacctcgaagacctcaaattaagccgcgaattgtcccgtgtacgcaccgatttgccgctcgaagttgatttccaacgccgccgcgaacctgactgggagggtcttaaagcgtttttagagcgtcttgaatttggttcgctcttgcatgaattcggccttttagaaagcccgttaccagccgaagaagcaccttggccaccgcccgagggcgcgtttttaggttaccgtttgagtcgcccggaaccgatgtgggccgaattactggctcttgcagcgtctgcccagggacgtgtgtatcgcgcggaagaccctcatggtgcgctccgcggcctcttcgaagtccgtggactccttgccaaagacttagctgttgttgcattgcgcgaaggtcttgatttacctccgactgatgatccaatgcttcttgcgtacctcttggacccgtcaaacacgacgcccgaaggcgtagcccgtcgttacggcggcgagtggaccgaagatgcagcgaaacgcgcgttattggccgaacgtttgcacgccaatttattaggacgtttgcaaggcgaggaacgtctcctctggctttacgaagaagtggagaaaccattgagtcgcgtgctcgcgcatatggaagctaccggtgtcaaattagacgtggcgtatttggagaatctcagccttgaagttgctgcccacatgcgccgcttggaggaagaagtattccgtttagcaggccgttcctttcgccttaattctcgcgatcagttagaacgtgtgttgttcgatgaacttggtctccctcctatcggcaagacagagaagaccggtaaacgtagcacttcagcggcggttttagaagctcttcgcgaagtccatcccattgtggacaagatcttgcaataccgcgaactcgcgaaattgaaaggcacctatattgaccgtcttccggcattagtccacccgaaaacgggacgcctccatacccgcttcaaccaaacagccacggcgaccggtcgtttgtcctcctctgatccaaaccttcagaatattccagtacgtaccccattgggccagaagatccgccgtgcgtttgtagctgaggagggttggcgtttagtggccctcgattatagccaaattgaattacgtgtccttgcccatctttctggcgatgagaacctcatccgcgtgtttcaggaaggcaaagacattcacactcaaacggcaagctggatgtttggattatcagctgaagcgatcgatcctttgatgcgtcgtgcagcgaagaccatcaatttcggtgttctctacggtatgagtgcctttcgtttgtcgcaggaattaggcattccctatgaagaagctcaggcgttcattcagaaatactttcaaagctatcccaaagttaaagcatggatcgagaagactctcgaagaaggccgcacacgtggttacgtagagaccttatttggacgtcgccgctatgttcccgatttaaacctgcgcgtgaaaggcaagcgtgaagccgccgaacgcatggcgttcaacatgcctgtacagggcacggcagctgacctcatgaaacttgcaatggtgcgcctttttccacaattgcgtgaagttggtgcccgcatgctcttgcaggtccacgatgaactcttgttagaagcgccaaaagagcgtgcggaagaggtggcagccctcgcgaaagaagttatggaaggcgtgtggcccttagcggtgcctcttgaagtcgaagttggtattggcgaggattggctggctgccaaagga

SEQ ID NO: 3434 - protein, 841 aa, synthetic construct
  REGION 1..841: note = Variant of DNA polymerase I from Thermus sp. strain 2.9
MHHHHHHGGSGVLPVFEPKGRVLLVDGHHLAYRNFFALKGLTTSSGEPVQGVYGFAKSLLKALKEDGDVVIVVFDAKAPSFRHEAYEAYKAGRAPTPEDFPRQLALMKELVDLLGLERLEVPGFEADDVLATLAKKAEREGYEVQILTADRDLFQLLSPRISVLHPEGHRITPEWLWEKYGLRPEQWVDFRALAGDPSDNIPGVKGIGEKTALKLLKEWGSLENLLKNLDQVKPESVREKILAHLEDLKLSRELSRVRTDLPLEVDFQRRREPDWEGLKAFLERLEFGSLLHEFGLLESPLPAEEAPWPPPEGAFLGYRLSRPEPMWAELLALAASAQGRVYRAEDPHGALRGLFEVRGLLAKDLAVVALREGLDLPPTDDPMLLAYLLDPSNTTPEGVARRYGGEWTEDAAKRALLAERLHANLLGRLQGEERLLWLYEEVEKPLSRVLAHMEATGVKLDVAYLENLSLEVAAHMRRLEEEVFRLAGRSFRLNSRDQLERVLFDELGLPPIGKTEKTGKRSTSAAVLEALREVHPIVDKILQYRELAKLKGTYIDRLPALVHPKTGRLHTRFNQTATATGRLSSSDPNLQNIPVRTPLGQKIRRAFVAEEGWRLVALDYSQIELRVLAHLSGDENLIRVFQEGKDIHTQTASWMFGLSAEAIDPLMRRAAKTINFGVLYGMSAFRLSQELGIPYEEAQAFIQKYFQSYPKVKAWIEKTLEEGRTRGYVETLFGRRRYVPDLNLRVKGKREAAERMAFNMPVQGTAADLMKLAMVRLFPQLREVGARMLLQVHDELLLEAPKERAEEVAALAKEVMEGVWPLAVPLEVEVGIGEDWLAAKG

SEQ ID NO: 3435 - DNA, 2523 bp, synthetic construct
  misc_feature 1..2523: note = Variant of DNA polymerase I from Thermus sp. strain 2.9
  source 1..2523: mol_type = other DNA
atgcaccatcatcatcatcatggcggtagcggcgtgttaccggtgttcgagcctaaaggtcgcgtgcttctggttgatggccatcatctcgcgtatcgtaacttctttgccctgaaaggattaaccaccagcagcggcgagccggtacagggtgtctacggctttgcaaagtcgctcctgaaagctctgaaagaagacggtgatgtggtgattgttgtctttgatgcgaaagcgccaagttttcgccacgaagcgtacgaagcttacaaagccgggcgtgctccaacgccggaagactttcctcgccaattggcgcttatgaaggaattagtggatttgcttggcctcgaacgcttggaagttcccggtttcgaggcagacgacgtattagcgactctcgcaaagaaagccgaacgtgagggctatgaagtccagatcttgacagcagatcgcgatcttttccagcttttatctccgcgcatctcggtgttacacccggaagggcatcgtatcaccccggaatggctctgggagaaatatggtttgcgtcccgaacaatgggtggattttcgcgccttagcaggcgatccgagcgacaatattccgggagttaaaggtatcggcgagaagacggcgctcaagctccttaaagaatgggggtcgttggagaacttgcttaagaatttagatcaggtcaaaccagagtcagtgcgtgagaagattcttgctcacctcgaagacctcaaattaagccgcgaattgtcccgtgtacgcaccgatttgccgctcgaagttgatttccaacgccgccgcgaacctgactgggagggtcttaaagcgtttttagagcgtcttgaatttggttcgctcttgcatgaattcggccttttagaaagcccgttaccagccgaagaagcaccttggccaccgcccgagggcgcgtttttaggttaccgtttgagtcgcccggaaccgatgtgggccgaattactggctcttgcagcgtctgcccagggacgtgtgtatcgcgcggaaatgcctcatggtgcgctccgcggcctcttcgaagtccgtggactccttgccaaagacttagctgttgttgcattgcgcgaaggtcttgatttacctccgactgatgatccaatgcttcttgcgtacctcttggacccgtcaaacacgacgcccgaaggcgtagcccgtcgttacggcggcgagtggaccgaagatgcagcgaaacgcgcgttattggccgaacgtttgcacgccaatttattaggacgtttgcaaggcgaggaacgtctcctctggctttacgaagaagtggagaaaccattgagtcgcgtgctcgcgcatatggaagctaccggtgtcaaattagacgtggcgtatttggagaatctcagccttgaagttgctgcccacatgcgccgcttggaggaagaagtattccgtttagcaggccgttcctttcgccttaattctcgcgatcagttagaacgtgtgttgttcgatgaacttggtctccctcctatcggcaagacagagaagaccggtaaacgtagcacttcagcggcggttttagaagctcttcgcgaagtccatcccattgtggacaagatcttgcaataccgcgaactcgcgaaattgaaaggcacctatattgaccgtcttccggcattagtccacccgaaaacgggacgcctccatacccgcttcaaccaaacagccacggcgaccggtcgtttgtcctcctctgatccaaaccttcagaatattccagtacgtaccccattgggccagaagatccgccgtgcgtttgtagctgaggagggttggcgtttagtggccctcgattatagccaaattgaattacgtgtccttgcccatctttctggcgatgagaacctcatccgcgtgtttcaggaaggcaaagacattcacactcaaacggcaagctggatgtttggattatcagctgaagcgatcgatcctttgatgcgtcgtgcagcgaagaccatcaatttcggtgttctctacggtatgagtgcctttcgtttgtcgcaggaattaggcattccctatgaagaagctcaggcgttcattcagaaatactttcaaagctatcccaaagttaaagcatggatcgagaagactctcgaagaaggccgcacacgtggttacgtagagaccttatttggacgtcgccgctatgttcccgatttaaacgctcgcgtgaaaggcaagcgtgaagccgccgaacgcatggcgttcaacatgcctgtacagggcacggcagctgacctcatgaaacttgcaatggtgcgcctttttccacaattgcgtgaagttggtgcccgcatgctcttgcaggtccacgatgaactcttgttagaagcgccaaaagagcgtgcggaagaggtggcagccctcgcgaaagaagttatggaaggcgtgtggcccttagcggtgcctcttgaagtcgaagttggtattggcgaggattggctggctgccaaagga

SEQ ID NO: 3436 - protein, 841 aa, synthetic construct
  REGION 1..841: note = Variant of DNA polymerase I from Thermus sp. strain 2.9
MHHHHHHGGSGVLPVFEPKGRVLLVDGHHLAYRNFFALKGLTTSSGEPVQGVYGFAKSLLKALKEDGDVVIVVFDAKAPSFRHEAYEAYKAGRAPTPEDFPRQLALMKELVDLLGLERLEVPGFEADDVLATLAKKAEREGYEVQILTADRDLFQLLSPRISVLHPEGHRITPEWLWEKYGLRPEQWVDFRALAGDPSDNIPGVKGIGEKTALKLLKEWGSLENLLKNLDQVKPESVREKILAHLEDLKLSRELSRVRTDLPLEVDFQRRREPDWEGLKAFLERLEFGSLLHEFGLLESPLPAEEAPWPPPEGAFLGYRLSRPEPMWAELLALAASAQGRVYRAEMPHGALRGLFEVRGLLAKDLAVVALREGLDLPPTDDPMLLAYLLDPSNTTPEGVARRYGGEWTEDAAKRALLAERLHANLLGRLQGEERLLWLYEEVEKPLSRVLAHMEATGVKLDVAYLENLSLEVAAHMRRLEEEVFRLAGRSFRLNSRDQLERVLFDELGLPPIGKTEKTGKRSTSAAVLEALREVHPIVDKILQYRELAKLKGTYIDRLPALVHPKTGRLHTRFNQTATATGRLSSSDPNLQNIPVRTPLGQKIRRAFVAEEGWRLVALDYSQIELRVLAHLSGDENLIRVFQEGKDIHTQTASWMFGLSAEAIDPLMRRAAKTINFGVLYGMSAFRLSQELGIPYEEAQAFIQKYFQSYPKVKAWIEKTLEEGRTRGYVETLFGRRRYVPDLNARVKGKREAAERMAFNMPVQGTAADLMKLAMVRLFPQLREVGARMLLQVHDELLLEAPKERAEEVAALAKEVMEGVWPLAVPLEVEVGIGEDWLAAKG

SEQ ID NO: 3437 - DNA, 2523 bp, synthetic construct
  misc_feature 1..2523: note = Variant of DNA polymerase I from Thermus sp. strain 2.9
  source 1..2523: mol_type = other DNA
atgcaccatcatcatcatcatggcggtagcggcgtgttaccggtgttcgagcctaaaggtcgcgtgcttctggttgatggccatcatctcgcgtatcgtaacttctttgccctgaaaggattaaccaccagcagcggcgagccggtacagggtgtctacggctttgcaaagtcgctcctgaaagctctgaaagaagacggtgatgtggtgattgttgtctttgatgcgaaagcgccaagttttcgccacgaagcgtacgaagcttacaaagccgggcgtgctccaacgccggaagactttcctcgccaattggcgcttatgaaggaattagtggatttgcttggcctcgaacgcttggaagttcccggtttcgaggcagacgacgtattagcgactctcgcaaagaaagccgaacgtgagggctatgaagtccagatcttgacagcagatcgcgatcttttccagcttttatctccgcgcatctcggtgttacacccggaagggcatcgtatcaccccggaatggctctgggagaaatatggtttgcgtcccgaacaatgggtggattttcgcgccttagcaggcgatccgagcgacaatattccgggagttaaaggtatcggcgagaagacggcgctcaagctccttggggaatgggggtcgttggagaacttgcttaagaatttagatcaggtcaaaccagagtcagtgcgtgagaagattcttgctcacctcgaagacctcaaattaagccgcgaattgtcccgtgtacgcaccgatttgccgctcgaagttgatttccaacgccgccgcgaacctgactgggagggtcttaaagcgtttttagagcgtcttgaatttggttcgctcttgcatgaattcggccttttagaaagcccgttaccagccgaagaagcaccttggccaccgcccgagggcgcgtttttaggttaccgtttgagtcgcccggaaccgatgtgggccgaattactggctcttgcagcgtctgcccagggacgtgtgtatcgcgcggaagaccctcatggtgcgctccgcggcctcttcgaagtccgtggactccttgccaaagacttagctgttgttgcattgcgcgaaggtcttgatttacctccgactgatgatccaatgcttcttgcgtacctcttggacccgtcaaacacgacgcccgaaggcgtagcccgtcgttacggcggcgagtggaccgaagatgcagcgaaacgcgcgttattggccgaacgtttgcacgccaatttattaggacgtttgcaaggcgaggaacgtctcctctggctttacgaagaagtggagaaaccattgagtcgcgtgctcgcgcatatggaagctaccggtgtcaaattagacgtggcgtatttggagaatctcagccttgaagttgctgcccacatgcgccgcttggaggaagaagtattccgtttagcaggccgttcctttcgccttaattctcgcgatcagttagaacgtgtgttgttcgatgaacttggtctccctcctatcggcaagacagagaagaccggtaaacgtagcacttcagcggcggttttagaagctcttcgcgaagtccatcccattgtggacaagatcttgcaataccgcgaactcgcgaaattgaaaggcacctatattgaccgtcttccggcattagtccacccgaaaacgggacgcctccatacccgcttcaaccaaacagccacggcgaccggtcgtttgtcctcctctgatccaaaccttcagaatattccagtacgtaccccattgggccagaagatccgccgtgcgtttgtagctgaggagggttggcgtttagtggccctcgattatagccaaattgaattacgtgtccttgcccatctttctggcgatgagaacctcatccgcgtgtttcaggaaggcaaagacattcacactcaaacggcaagctggatgtttggattatcagctgaagcgatcgatcctttgatgcgtcgtgcagcgaagaccatcaatttcggtgttctctacggtatgagtgcctttcgtttgtcgcaggaattaggcattccctatgaagaagctcaggcgttcattcagaaatactttcaaagctatcccaaagttaaagcatggatcgagaagactctcgaagaaggccgcacacgtggttacgtagagaccttatttggacgtcgccgctatgttcccgatttaaacgctcgcgtgaaaggcaagcgtgaagccgccgaacgcatggcgttcaacatgcctgtacagggcacggcagctgacctcatgaaacttgcaatggtgcgcctttttccacaattgcgtgaagttggtgcccgcatgctcttgcaggtccacgatgaactcttgttagaagcgccaaaagagcgtgcggaagaggtggcagccctcgcgaaagaagttatggaaggcgtgtggcccttagcggtgcctcttgaagtcgaagttggtattggcgaggattggctggctgccaaagga

SEQ ID NO: 3438 - protein, 841 aa, synthetic construct
  REGION 1..841: note = Variant of DNA polymerase I from Thermus sp. strain 2.9
MHHHHHHGGSGVLPVFEPKGRVLLVDGHHLAYRNFFALKGLTTSSGEPVQGVYGFAKSLLKALKEDGDVVIVVFDAKAPSFRHEAYEAYKAGRAPTPEDFPRQLALMKELVDLLGLERLEVPGFEADDVLATLAKKAEREGYEVQILTADRDLFQLLSPRISVLHPEGHRITPEWLWEKYGLRPEQWVDFRALAGDPSDNIPGVKGIGEKTALKLLGEWGSLENLLKNLDQVKPESVREKILAHLEDLKLSRELSRVRTDLPLEVDFQRRREPDWEGLKAFLERLEFGSLLHEFGLLESPLPAEEAPWPPPEGAFLGYRLSRPEPMWAELLALAASAQGRVYRAEDPHGALRGLFEVRGLLAKDLAVVALREGLDLPPTDDPMLLAYLLDPSNTTPEGVARRYGGEWTEDAAKRALLAERLHANLLGRLQGEERLLWLYEEVEKPLSRVLAHMEATGVKLDVAYLENLSLEVAAHMRRLEEEVFRLAGRSFRLNSRDQLERVLFDELGLPPIGKTEKTGKRSTSAAVLEALREVHPIVDKILQYRELAKLKGTYIDRLPALVHPKTGRLHTRFNQTATATGRLSSSDPNLQNIPVRTPLGQKIRRAFVAEEGWRLVALDYSQIELRVLAHLSGDENLIRVFQEGKDIHTQTASWMFGLSAEAIDPLMRRAAKTINFGVLYGMSAFRLSQELGIPYEEAQAFIQKYFQSYPKVKAWIEKTLEEGRTRGYVETLFGRRRYVPDLNARVKGKREAAERMAFNMPVQGTAADLMKLAMVRLFPQLREVGARMLLQVHDELLLEAPKERAEEVAALAKEVMEGVWPLAVPLEVEVGIGEDWLAAKG

SEQ ID NO: 3439 - DNA, 2523 bp, synthetic construct
  misc_feature 1..2523: note = Variant of DNA polymerase I from Thermus sp. strain 2.9
  source 1..2523: mol_type = other DNA
atgcaccatcatcatcatcatggcggtagcggcgtgttagaggtgttcgagcctaaaggtcgcgtgcttctggttgatggccatcatctcgcgtatcgtaacttctttgccctgaaaggattaaccaccagcagcggcgagccggtacagggtgtctacggctttgcaaagtcgctcctgaaagctctgaaagaagacggtgatgtggtgattgttgtctttgatgcgaaagcgccaagttttcgccacgaagcgtacgaagcttacaaagccgggcgtgctcctacgccggaagactttcctcgccaattggcgcttatgaaggaattagtggatttgcttggcctcgaacgcttggaagttcccggtttcgaggcagacgacgtattagcgactctcgcaaagaaagccgaacgtgagggctatgaagtccagatcttgacagcagatcgcgatcttttccagcttttatctccgcgcatctcggtgttacacccggatgggcatcgtatcaccccggaatggctctgggagaaatatggtttgcgtcccgaacaatgggtggattttcgcgccttagcaggcgatccgagcgacaatattccgggagttaaaggtatcggcgagaagacggcgctcaagctccttaaagaatgggggtcgttggagaacttgcttaagaatttagatcaggtcaaaccagagtcagtgcgtgagaagattcttgctcacctcgaagacctcgagttaagccgcgaattgtcccgtgtacgcaccgatttgccgctcgaagttgatttccaacgccgccgcgaacctgactgggagggtcttaaagcgtttttagagcgtcttgaatttggttcgctcttgcatgaattcggccttttagaaagcccgttaccagccgaagaagcaccttggccaccgcccgagggcgcgtttttaggttaccgtttgagtcgcccggaaccgatgtgggccgaattactggctcttgcagcgtctgcccagggacgtgtgtatcgcgcggaagaccctcatggtgcgctccgcggcctcttcgaagtccgtggactccttgccaaagacttagctgttgttgcattgcgcgaaggtcttgatttacctccgactgatgatccaatgcttcttgcgtacctcttggacccgtcaaacacgacgcccgaaggcgtagcccgtcgttacggcggcgagtggaccgaagatgcagcgaaacgcgcgttattggccgaacgtttgcacgccaatttattaggacgtttgcaaggcgaggaacgtctcctctggctttacgaagaagtggagaaaccattgagtcgcgtgctcgcgcatatggaagctaccggtgtcaaattagacgtggcgtatttggagaatctcagccttgaagttgctgcccacatgcgccgcttggaggaagaagtattccgtttagcaggccgttcctttcgccttaattctcgcgatcagttagaacgtgtgttgttcgatgaacttggtctccctcctatcggcaagacagagaagaccggtaaacgtagcacttcagcggcggttttagaagctcttcgcgaagtccatcccattgtggacaagatcttgcaataccgcgaactcgcgaaattgaaaggcacctatattgaccgtcttccggcattagtccacccgaaaacgggacgcctccatacccgcttcaaccaaacagccacggcgaccggtcgtttgtcctcctctgatccaaaccttcagaatattccagtacgtaccccattgggccagaagatccgccgtgcgtttgtagctgaggagggttggcgtttagtggccctcgattatagccaaattgaattacgtgtccttgcccatctttctggcgatgagaacctcatccgcgtgtttgaggaaggcaaagacattcacactcaaacggcaagctggatgtttggattatcagctgaagcgatcgatcctttgatgcgtcgtgcagcgaagaccatcaatttcggtgttctctacggtatgagtgcctttcgtttgtcgcaggaattaggcattccctacgaagaagctcaggcgttcattcagaaatactttcaaagctatcccaaagttaaagcatggatcgagaagactctcgaagaaggccgcacacgtggttacgtagagaccttatttggacgtcgccgctatgttcccgatttaaacgctcgcgtgaaaggcaagcgtgaagccgccgaacgcatggcgttcaacatgcctgtacagggcacggcagctgacctcatgaaacttgcaatggtgcgcctttttccacaattgcgtgaagttggtgcccgcatgctcttgcaggtccacgatgaactcttgttagaagcgccaaaagagcgtgcggaagaggtggcagccctcgcgaaagaagttatggaaggcgtgtggcccttagcggtgcctcttgaagtcgaagttggtattggcgaggattggctggctgccaaagga

SEQ ID NO: 3440 - protein, 841 aa, synthetic construct
  REGION 1..841: note = Variant of DNA polymerase I from Thermus sp. strain 2.9
MHHHHHHGGSGVLEVFEPKGRVLLVDGHHLAYRNFFALKGLTTSSGEPVQGVYGFAKSLLKALKEDGDVVIVVFDAKAPSFRHEAYEAYKAGRAPTPEDFPRQLALMKELVDLLGLERLEVPGFEADDVLATLAKKAEREGYEVQILTADRDLFQLLSPRISVLHPDGHRITPEWLWEKYGLRPEQWVDFRALAGDPSDNIPGVKGIGEKTALKLLKEWGSLENLLKNLDQVKPESVREKILAHLEDLELSRELSRVRTDLPLEVDFQRRREPDWEGLKAFLERLEFGSLLHEFGLLESPLPAEEAPWPPPEGAFLGYRLSRPEPMWAELLALAASAQGRVYRAEDPHGALRGLFEVRGLLAKDLAVVALREGLDLPPTDDPMLLAYLLDPSNTTPEGVARRYGGEWTEDAAKRALLAERLHANLLGRLQGEERLLWLYEEVEKPLSRVLAHMEATGVKLDVAYLENLSLEVAAHMRRLEEEVFRLAGRSFRLNSRDQLERVLFDELGLPPIGKTEKTGKRSTSAAVLEALREVHPIVDKILQYRELAKLKGTYIDRLPALVHPKTGRLHTRFNQTATATGRLSSSDPNLQNIPVRTPLGQKIRRAFVAEEGWRLVALDYSQIELRVLAHLSGDENLIRVFEEGKDIHTQTASWMFGLSAEAIDPLMRRAAKTINFGVLYGMSAFRLSQELGIPYEEAQAFIQKYFQSYPKVKAWIEKTLEEGRTRGYVETLFGRRRYVPDLNARVKGKREAAERMAFNMPVQGTAADLMKLAMVRLFPQLREVGARMLLQVHDELLLEAPKERAEEVAALAKEVMEGVWPLAVPLEVEVGIGEDWLAAKG

SEQ ID NO: 3441 - DNA, 2523 bp, synthetic construct
  misc_feature 1..2523: note = Variant of DNA polymerase I from Thermus sp. strain 2.9
  source 1..2523: mol_type = other DNA
atgcaccatcatcatcatcatggcggtagcggcgtgttaccggtgttcgagcctaaaggtcgcgtgcttctggttgatggccatcatctcgcgtatcgtaacttctttgccctgaaaggattaaccaccagcagcggcgagccggtacagggtgtctacggctttgcaaagtcgctcctgaaagctctgaaagaagacggtgatgtggtgattgttgtctttgatgcgaaagcgccaagttttcgccacgaagcgtacgaagcttacaaagccgggcgtgctccaacgccggaagactttcctcgccaattggagcttatgaaggaattagtggatttgcttggcctcgaacgcttggaagttcccggtttcgaggcagacgacgtattagcgactctcgcaaagaaagccgaacgtgagggctatgaagtccagatcttgacagcagatcgcgatcttttccagcttttatctccgcgcatctcggtgttacacccggaagggcatcgtatcaccccggaatggctctgggagaaatatggtttgcgtcccgaacaatgggtggattttcgcgccttagcaggcgatccgagcgacaatattccgggagttaaaggtatcggcgagaagacggcgctcaagctccttaaagaatgggggtcgttggagaacttgcttaagaatttagatcaggtcaaaccagagtcagtgcgtgagaagattcttgctcacctcgaagacctcaaattaagccgcgaattgtcccgtgtacgcaccgatttgccgctcgaagttgatttccaacgccgccgcgaacctgactgggagggtcttaaagcgtttttagagcgtcttgaatttggttcgctcttgcatgaattcggccttttagaaagcccgttaccagccgaagaagcaccttggccaccgcccgagggcgcgtttttaggttaccgtttgagtcgcccggaaccgatgtgggccgaattactggctcttgcagcgtctgcccagggacgtgtgtatcgcgcggaagaccctcatggtgcgctccgcggcctcttcgaagtccgtggactccttgccaaagacttagctgttgttgcattgcgcgaaggtcttgatttacctccgactgatgatccaatgcttcttgcgtacctcttggacccgtcaaacacgacgcccgaaggcgtagcccgtcgttacggcggcgagtggaccgaagatgcagcgaaacgcgcgttattggccgaacgtttgcacgccaatttattaggacgtttgcaaggcgaggaacgtctcctctggctttacgaagaagtggagaaaccattgagtcgcgtgctcgcgcatatggaagctaccggtgtcaaattagacgtggcgtatttggagaatctcagccttgaagttgctgcccacatgcgccgcttggaggaagaagtattccgtttagcaggccgttcctttcgccttaattctcgcgatcagttagaacgtgtgttgttcgatgaacttggtctccctcctatcggcaagacagagaagaccggtaaacgtagcacttcagcggcggttttagaagctcttcgcgaagtccatcccattgtggacaagatcttgcaataccgcgaactcgcgaaattgaaaggcacctatattgaccgtcttccggcattagtccacccgaaaacgggacgcctccatacccgcttcaaccaaacagccacggcgaccggtcgtttgtcctcctctgatccaaaccttcagaatattccagtacgtaccccattgggccagaagatccgccgtgcgtttgtagctgaggagggttggcgtttagtggccctcgattatagccaaattgaattacgtgtccttgcccatctttctggcgatgagaacctcatccgcgtgtttcaggaaggcaaagacattcacactcaaacggcaagctggatgtttggattatcagctgaagcgatcgatcctttgatgcgtcgtgcagcgaagaccatcaatttcggtgttctctacggtatgagtgcctttcgtttgtcgcaggaattaggcattccctatgaagaagctcaggcgttcattcagaaatactttcaaagctatcccaaagttaaagcatggatcgagaagactctcgaagaaggccgcacacgtggttacgtagagaccttatttggacgtcgccgctatgttcccgatttaaacgctcgcgtgaaaggcaagcgtgaagccgccgaacgcatggcgttcaacatgcctgtacagggcacggcagctgacctcatgaaacttgcaatggtgcgcctttttccacaattgcgtgaagttggtgcccgcatgctcttgcaggtccacgatgaactcttgttagaagcgccaaaagagcgtgcggaagaggtggcagccctcgcgaaagaagttatggaaggcgtgtggcccttagcggtgcctcttgaagtcgaagttggtattggcgaggattggctggctgccaaagga

SEQ ID NO: 3442 - protein, 841 aa, synthetic construct
  REGION 1..841: note = Variant of DNA polymerase I from Thermus sp. strain 2.9
MHHHHHHGGSGVLPVFEPKGRVLLVDGHHLAYRNFFALKGLTTSSGEPVQGVYGFAKSLLKALKEDGDVVIVVFDAKAPSFRHEAYEAYKAGRAPTPEDFPRQLELMKELVDLLGLERLEVPGFEADDVLATLAKKAEREGYEVQILTADRDLFQLLSPRISVLHPEGHRITPEWLWEKYGLRPEQWVDFRALAGDPSDNIPGVKGIGEKTALKLLKEWGSLENLLKNLDQVKPESVREKILAHLEDLKLSRELSRVRTDLPLEVDFQRRREPDWEGLKAFLERLEFGSLLHEFGLLESPLPAEEAPWPPPEGAFLGYRLSRPEPMWAELLALAASAQGRVYRAEDPHGALRGLFEVRGLLAKDLAVVALREGLDLPPTDDPMLLAYLLDPSNTTPEGVARRYGGEWTEDAAKRALLAERLHANLLGRLQGEERLLWLYEEVEKPLSRVLAHMEATGVKLDVAYLENLSLEVAAHMRRLEEEVFRLAGRSFRLNSRDQLERVLFDELGLPPIGKTEKTGKRSTSAAVLEALREVHPIVDKILQYRELAKLKGTYIDRLPALVHPKTGRLHTRFNQTATATGRLSSSDPNLQNIPVRTPLGQKIRRAFVAEEGWRLVALDYSQIELRVLAHLSGDENLIRVFQEGKDIHTQTASWMFGLSAEAIDPLMRRAAKTINFGVLYGMSAFRLSQELGIPYEEAQAFIQKYFQSYPKVKAWIEKTLEEGRTRGYVETLFGRRRYVPDLNARVKGKREAAERMAFNMPVQGTAADLMKLAMVRLFPQLREVGARMLLQVHDELLLEAPKERAEEVAALAKEVMEGVWPLAVPLEVEVGIGEDWLAAKG

SEQ ID NO: 3443 - DNA, 2523 bp, synthetic construct
  misc_feature 1..2523: note = Variant of DNA polymerase I from Thermus sp. strain 2.9
  source 1..2523: mol_type = other DNA
atgcaccatcatcatcatcatggcggtagcggcgtgttacctgtgttcgagcctaaaggtcgcgtgcttctggttgatggccatcatctcgcgtatcgtaacttctttgccctgaaaggattaaccaccagcagcggcgagccggtacagggtgtctacggctttgcaaagtcgctcctgaaagctctgaaagaagacggtgatgtggtgattgttgtctttgatgcgaaagcgccaagttttcgccacgaagcgtacgaagcttacaaagccgggcgtgctccaacgccggaagactttcctcgccaattggcgcttatgaaggaattagtggatttgcttggcctcgaacgcttggaagttcccggtttcgaggcagacgacgtattagcgactctcgcaaagaaagccgaacgcgagggctatgaagtccagatcttgacagcagatcgcgatcttttccagcttttatctccgcgcatctcggtgttacacccggaagggcatcgtatcaccccggaatggctctgggagaaatatggtttgcgtcccgaacaatgggtggattttcgcgccttagcaggcgatccgagcgacaatattccgggagttaaaggtatcggcgagaagacggcgctcaagctccttaaagaatgggggtcgttggagaacttgcttaagaatttagatcaggtcaaaccagagtcagtgcgtgagaagattcttgctcacctcgaagacctcaaattaagccgcgaattgtcccgtgtacgcaccgatttgccgctcgaagttgatttccaacgccgccgcgaacctgactgggagggtcttaaagcgtttttagagcgtcttgaatttggttcgctcttgcatgaattcggccttttagaaagcccgttaccagccgaagaagcaccttggccaccgcccgagggcgcgtttttaggttaccgtttgagtcgcccggaaccgatgtgggccgaattactggctcttgcagcgtctgcccagggacgtgtgtatcgcgcggaagaccctcatggtgcgctccgcggcctcttcgaagtccgtggactccttgccaaagacttagctgttgttgcattgcgcgaaggtcttgatttacctccgactgatgatccaatgcttcttgcgtacctcttggacccgtcaaacacgacgcccgaaggcgtagcccgtcgttacggcggcgagtggaccgaagatgcagcgaaacgcgcgttattggccgaacgtttgcacgccaatttattaggacgtttgcaaggcgaggagcgtctcctctggctttacgaagaagtggagaaaccattgagtcgcgtgctcgcgcatatggaagctaccggtgtcaaattagacgtggcgtatttggagaatctcagccttgaagttgctgcccacatgcgccgcttggaggaagaagtattccgtttagcaggccgttcctttcgccttaattctcgcgatcagttagaacgtgtgttgttcgatgaacttggtctccctcctatcggcaagacagagaagaccggtaaacgtagcacttcagcggcggttttagaagctcttcgcgaagtccatcccattgtggacaagatcttgcaataccgcgaactcgcgaaattgaaaggcacctatattgaccgtcttccggcattagtccacccgaaaacgggacgcctccatacccgcttcaaccaaacagccacggcgaccggtcgtttgtcctcctctgatccaaaccttcagaatattccagtacgtaccccattgggccagaagatccgccgtgcgtttgtagctgaggagggttggcgtttagtggccctcgattatagccaaattgaattacgtgtccttgcccatctttctggcgatgagaacctcatccgcgtgtttgaggaaggcaaagacattcacactcaaacggcaagctggatgtttggattatcagctgaagcgatcgatcctttgatgcgtcgtgcagcgaagaccatcaatttcggtgttctctacggtatgagtgcctttcgtttgtcgcaggaattaggcattccctatgaagaagctcaggcgttcattcagaaatactttcaaagctatcccaaagttaaagcatggatcgagaagactctcgaagaaggccgcacacgtggttacgtagagaccttatttggacgtcgccgctatgttcccgatttaaacgctcgcgtgaaaggcaagcgtgaagccgccgaacgcatggcgttcaacatgcctgtacagggcacggcagctgacctcatgaaacttgcaatggtgcgcctttttccacaattgcgtgaagttggtgcccgcatgctcttgcaggtccacgatgaactcttgttagaagcgccaaaagagcgtgcggaagaggtggcagccctcgcgaaagaagttatggaaggcgtgtggcccttagcggtgcctcttgaagtcgaagttggtattggcgaggattggctggctgccaaagga

SEQ ID NO: 3444 - protein, 841 aa, synthetic construct
  REGION 1..841: note = Variant of DNA polymerase I from Thermus sp. strain 2.9
MHHHHHHGGSGVLPVFEPKGRVLLVDGHHLAYRNFFALKGLTTSSGEPVQGVYGFAKSLLKALKEDGDVVIVVFDAKAPSFRHEAYEAYKAGRAPTPEDFPRQLALMKELVDLLGLERLEVPGFEADDVLATLAKKAEREGYEVQILTADRDLFQLLSPRISVLHPEGHRITPEWLWEKYGLRPEQWVDFRALAGDPSDNIPGVKGIGEKTALKLLKEWGSLENLLKNLDQVKPESVREKILAHLEDLKLSRELSRVRTDLPLEVDFQRRREPDWEGLKAFLERLEFGSLLHEFGLLESPLPAEEAPWPPPEGAFLGYRLSRPEPMWAELLALAASAQGRVYRAEDPHGALRGLFEVRGLLAKDLAVVALREGLDLPPTDDPMLLAYLLDPSNTTPEGVARRYGGEWTEDAAKRALLAERLHANLLGRLQGEERLLWLYEEVEKPLSRVLAHMEATGVKLDVAYLENLSLEVAAHMRRLEEEVFRLAGRSFRLNSRDQLERVLFDELGLPPIGKTEKTGKRSTSAAVLEALREVHPIVDKILQYRELAKLKGTYIDRLPALVHPKTGRLHTRFNQTATATGRLSSSDPNLQNIPVRTPLGQKIRRAFVAEEGWRLVALDYSQIELRVLAHLSGDENLIRVFEEGKDIHTQTASWMFGLSAEAIDPLMRRAAKTINFGVLYGMSAFRLSQELGIPYEEAQAFIQKYFQSYPKVKAWIEKTLEEGRTRGYVETLFGRRRYVPDLNARVKGKREAAERMAFNMPVQGTAADLMKLAMVRLFPQLREVGARMLLQVHDELLLEAPKERAEEVAALAKEVMEGVWPLAVPLEVEVGIGEDWLAAKG

SEQ ID NO: 3445 - DNA, 2523 bp, synthetic construct
  misc_feature 1..2523: note = Variant of DNA polymerase I from Thermus sp. strain 2.9
  source 1..2523: mol_type = other DNA
atgcaccatcatcatcatcatggcggtagcggcgtgttaccggtgttcgagcctaaaggtcgcgtgcttctggttgatggccatcatctcgcgtatcgtaacttctttgccctgaaaggattaaccaccagcagcggcgagccggtacagggtgtctacggctttgcaaagtcgctcctgaaagctctgaaagaagacggtgatgtggtgattgttgtctttgatgcgaaagcgccaagttttcgccacgaagcgtacgaagcttacaaagccgggcgtgctccaacgccggaagactttcctcgccaattggcgcttatgaaggaattagtggatttgcttggcctcgaacgcttggaagttcccggtttcgaggcagacgacgtattagcgactctcgcaaagaaagccgaacgtgagggctatgaagtccagatcttgacagcagatcgcgatcttttccagcttttatctccgcgcatctcggtgttacacccggaagggcatcgtatcaccccggaatggctctgggagaaatatggtttgcgtcccgaacaatgggtggattttcgcgccttagcaggcgatccgagcgacaatattccgggagttaaaggtatcggcgagaagacggcgctcaagctccttaaagaatgggggtcgttggagaacttgcttaagaatttagatcaggtcaaaccagagtcagtgcgtgagaagattcttgctcacctcgaagacctcaaattaagccgcgaattgtcccgtgtacgcaccgatttgccgctcgaagttgatttccaacgccgccgcgaacctgactgggagggtcttaaagcgtttttagagcgtcttgaatttggttcgctcttgcatgaattcggccttttagaaagcccgttaccagccgaagaagcaccttggccaccgcccgagggcgcgtttttaggttaccgtttgagtcgcccggaaccgatgtgggccgaattactggctcttgcagcgtctgcccagggacgtgtgtatcgcgcggaagaccctcatggtgcgctccgcggcctcttcgaagtccgtggactccttgccaaagacttagctgttgttgcattgcgcgaaggtcttgatttacctccgactgatgatccaatgcttcttgcgtacctcttggacccgtcaaacacgacgcccgaaggcgtagcccgtcgttacggcggcgagtggaccgaagatgcagcgaaacgcgcgttattggccgaacgtttgcacgccaatttacatggacgtttgcaaggcgaggaacgtctcctctggctttacgaagaagtggagaaaccattgagtcgcgtgctcgcgcatatggaagctaccggtgtcaaattagacgtggcgtatttggagaatctcagccttgaagttgctgcccacatgcgccgcttggaggaagaagtattccgtttagcaggccgttcctttcgccttaattctcgcgatcagttagaacgtgtgttgttcgatgaacttggtctccctcctatcggcaagacagagaagaccggtaaacgtagcacttcagcggcggttttagaagctcttcgcgaagtccatcccattgtggacaagatcttgcaataccgcgaactcgcgaaattgaaaggcacctatattgaccgtcttccggcattagtccacccgaaaacgggacgcctccatacccgcttcaaccaaacagccacggcgaccggtcgtttgtcctcctctgatccaaaccttcagaatattccagtacgtaccccattgggccagaagatccgccgtgcgtttgtagctgaggagggttggcgtttagtggccctcgattatagccaaattgaattacgtgtccttgcccatctttctggcgatgagaacctcatccgcgtgtttcaggaaggcaaagacattcacactcaaacggcaagctggatgtttggattatcagctgaagcgatcgatcctttgatgcgtcgtgcagcgaagaccatcaatttcggtgttctctacggtatgagtgcctttcgtttgtcgcaggaattaggcattccctatgaagaagctcaggcgttcattcagaaatactttcaaagctatcccaaagttaaagcatggatcgagaagactctcgaagaaggccgcacacgtggttacgtagagaccttatttggacgtcgccgctatgttcccgatttaaacgctcgcgtgaaaggcaagcgtgaagccgccgaacgcatggcgttcaacatgcctgtacagggcacggcagctgacctcatgaaacttgcaatggtgcgcctttttccacaattgcgtgaagttggtgcccgcatgctcttgcaggtccacgatgaactcttgttagaagcgccaaaagagcgtgcggaagaggtggcagccctcgcgaaagaagttatggaaggcgtgtggcccttagcggtgcctcttgaagtcgaagttggtattggcgaggattggctggctgccaaagga

SEQ ID NO: 3446 - protein, 841 aa, synthetic construct
  REGION 1..841: note = Variant of DNA polymerase I from Thermus sp. strain 2.9
MHHHHHHGGSGVLPVFEPKGRVLLVDGHHLAYRNFFALKGLTTSSGEPVQGVYGFAKSLLKALKEDGDVVIVVFDAKAPSFRHEAYEAYKAGRAPTPEDFPRQLALMKELVDLLGLERLEVPGFEADDVLATLAKKAEREGYEVQILTADRDLFQLLSPRISVLHPEGHRITPEWLWEKYGLRPEQWVDFRALAGDPSDNIPGVKGIGEKTALKLLKEWGSLENLLKNLDQVKPESVREKILAHLEDLKLSRELSRVRTDLPLEVDFQRRREPDWEGLKAFLERLEFGSLLHEFGLLESPLPAEEAPWPPPEGAFLGYRLSRPEPMWAELLALAASAQGRVYRAEDPHGALRGLFEVRGLLAKDLAVVALREGLDLPPTDDPMLLAYLLDPSNTTPEGVARRYGGEWTEDAAKRALLAERLHANLHGRLQGEERLLWLYEEVEKPLSRVLAHMEATGVKLDVAYLENLSLEVAAHMRRLEEEVFRLAGRSFRLNSRDQLERVLFDELGLPPIGKTEKTGKRSTSAAVLEALREVHPIVDKILQYRELAKLKGTYIDRLPALVHPKTGRLHTRFNQTATATGRLSSSDPNLQNIPVRTPLGQKIRRAFVAEEGWRLVALDYSQIELRVLAHLSGDENLIRVFQEGKDIHTQTASWMFGLSAEAIDPLMRRAAKTINFGVLYGMSAFRLSQELGIPYEEAQAFIQKYFQSYPKVKAWIEKTLEEGRTRGYVETLFGRRRYVPDLNARVKGKREAAERMAFNMPVQGTAADLMKLAMVRLFPQLREVGARMLLQVHDELLLEAPKERAEEVAALAKEVMEGVWPLAVPLEVEVGIGEDWLAAKG

SEQ ID NO: 3447 - DNA, 2523 bp, synthetic construct
  misc_feature 1..2523: note = Variant of DNA polymerase I from Thermus sp. strain 2.9
  source 1..2523: mol_type = other DNA
atgcaccatcatcatcatcatggcggtagcggcgtgttaccggtgttcgagcctaaaggtcgcgtgcttctggttgatggccatcatctcgcgtatcgtaacttctttgccctgaaaggattaaccaccagcagcggcgagccggtacagggtgtctacggctttgcaaagtcgctcctgaaagctctgaaagaagacggtgatgtggtgattgttgtctttgatgcgaaagcgccaagttttcgccacgaagcgtacgaagcttacaaagccgggcgtgctccaacgccggaagactttcctcgccaattggcgcttatgaaggaattagtggatttgcttggcctcgaacgcttggaagttcccggtttcgaggcagacgacgtattagcgactctcgcaaagaaagccgaacgtgagggctatgaagtccagatcttgacagcagatcgcgatcttttccagcttttatctccgcgcatctcggtgttacacccggaagggcatcgtatcaccccggaatggctctgggagaaatatggtttgcgtcccgaacaatgggtggattttcgcgccttagcaggcgatccgagcgacaatattccgggagttaaaggtatcggcgagaagacggcgctcaagctccttaaagaatgggggtcgttggagaacttgcttaagaatttagatcaggtcaaaccagagtcagtgcgtgagaagattcttgctcacctcgaagacctcaaattaagccgcgaattgtcccgtgtacgcaccgatttgccgctcgaagttgatttccaacgccgccgcgaacctgactgggagggtcttaaagcgtttttagagcgtcttgaatttggttcgctcttgcatgaattcggccttttagaaagcccgttaccagccgaagaagcaccttggccaccgcccgagggcgcgtttttaggttaccgtttgagtcgcccggaaccgatgtgggccgaattactggctcttgcagcgtctgcccagggacgtgtgtatcgcgcggaagaccctcatggtgcgctccgcggcctcttcgaagtccgtggactccttgccaaagacttagctgttgttgcattgcgcgaaggtcttgatttacctccgactgatgatccaatgcttcttgcgtacctcttggacccgtcaaacacgacgcccgaaggcgtagcccgtcgttacggcggcgagtggaccgaagatgcagcgaaacgcgcgttattggccgaacgtttgcacgccaatttattaggacgtttgcaaggcgaggaacgtctcctctggctttacgaagaagtggagaaaccattgagtcgcgtgctcgcgcatatggaagctaccggtgtccggttagacgtggcgtatttggagaatctcagccttgaagttgctgcccacatgcgccgcttggaggaagaagtattccgtttagcaggccgttcctttcgccttaattctcgcgatcagttagaacgtgtgttgttcgatgaacttggtctccctcctatcggcaagacagagaagaccggtaaacgtagcacttcagcggcggttttagaagctcttcgcgaagtccatcccattgtggacaagatcttgcaataccgcgaactcgcgaaattgaaaggcacctatattgaccgtcttccggcattagtccacccgaaaacgggacgcctccatacccgcttcaaccaaacagccacggcgaccggtcgtttgtcctcctctgatccaaaccttcagaatattccagtacgtaccccattgggccagaagatccgccgtgcgtttgtagctgaggagggttggcgtttagtggccctcgattatagccaaattgaattacgtgtccttgcccatctttctggcgatgagaacctcatccgcgtgtttcaggaaggcaaagacattcacactcaaacggcaagctggatgtttggattatcagctgaagcgatcgatcctttgatgcgtcgtgcagcgaagaccatcaatttcggtgttctctacggtatgagtgcctttcgtttgtcgcaggaattaggcattccctatgaagaagctcaggcgttcattcagaaatactttcaaagctatcccaaagttaaagcatggatcgagaagactctcgaagaaggccgcacacgtggttacgtagagaccttatttggacgtcgccgctatgttcccgatttaaacgctcgcgtgaaaggcaagcgtgaagccgccgaacgcatggcgttcaacatgcctgtacagggcacggcagctgacctcatgaaacttgcaatggtgcgcctttttccacaattgcgtgaagttggtgcccgcatgctcttgcaggtccacgatgaactcttgttagaagcgccaaaagagcgtgcggaagaggtggcagccctcgcgaaagaagttatggaaggcgtgtggcccttagcggtgcctcttgaagtcgaagttggtattggcgaggattggctggctgccaaagga

SEQ ID NO: 3448 - protein, 841 aa, synthetic construct
  REGION 1..841: note = Variant of DNA polymerase I from Thermus sp. strain 2.9
MHHHHHHGGSGVLPVFEPKGRVLLVDGHHLAYRNFFALKGLTTSSGEPVQGVYGFAKSLLKALKEDGDVVIVVFDAKAPSFRHEAYEAYKAGRAPTPEDFPRQLALMKELVDLLGLERLEVPGFEADDVLATLAKKAEREGYEVQILTADRDLFQLLSPRISVLHPEGHRITPEWLWEKYGLRPEQWVDFRALAGDPSDNIPGVKGIGEKTALKLLKEWGSLENLLKNLDQVKPESVREKILAHLEDLKLSRELSRVRTDLPLEVDFQRRREPDWEGLKAFLERLEFGSLLHEFGLLESPLPAEEAPWPPPEGAFLGYRLSRPEPMWAELLALAASAQGRVYRAEDPHGALRGLFEVRGLLAKDLAVVALREGLDLPPTDDPMLLAYLLDPSNTTPEGVARRYGGEWTEDAAKRALLAERLHANLLGRLQGEERLLWLYEEVEKPLSRVLAHMEATGVRLDVAYLENLSLEVAAHMRRLEEEVFRLAGRSFRLNSRDQLERVLFDELGLPPIGKTEKTGKRSTSAAVLEALREVHPIVDKILQYRELAKLKGTYIDRLPALVHPKTGRLHTRFNQTATATGRLSSSDPNLQNIPVRTPLGQKIRRAFVAEEGWRLVALDYSQIELRVLAHLSGDENLIRVFQEGKDIHTQTASWMFGLSAEAIDPLMRRAAKTINFGVLYGMSAFRLSQELGIPYEEAQAFIQKYFQSYPKVKAWIEKTLEEGRTRGYVETLFGRRRYVPDLNARVKGKREAAERMAFNMPVQGTAADLMKLAMVRLFPQLREVGARMLLQVHDELLLEAPKERAEEVAALAKEVMEGVWPLAVPLEVEVGIGEDWLAAKG

SEQ ID NO: 3449 - DNA, 2523 bp, synthetic construct
  misc_feature 1..2523: note = Variant of DNA polymerase I from Thermus sp. strain 2.9
  source 1..2523: mol_type = other DNA
atgcaccatcatcatcatcatggcggtaggggcgtgttaccggtgttcgagcctaaaggtcgcgtgcttctggttgatggccatcatctcgcgtatcgtaacttctttgccctgaaaggattaaccaccagcagcggcgagccggtacagggtgtctacggctttgcaaagtcgctcctgaaagctctgaaagaagacggtgatgtggtgattgttgtctttgatgcgaaagcgccaagttttcgccacgaagcgtacgaagcttacaaagccgggcgtgctccaacgccggaagactttcctcgccaattggcgcttatgaaggaattagtggatttgcttggcctcgaacgcttggaagttcccggtttcgaggcagacgacgtattagcgactctcgcaaagaaagccgaacgtgagggctatgaagtccagatcttgacagcagatcgcgatcttttccagcttttatctccgcgcatctcggtgttacacccggaagggcatcgtatcaccccggaatggctctgggagaaatatggtttgcgtcccgaacaatgggtggattttcgcgccttagcaggcgatccgagcgacaatattccgggagttaaaggtatcggcgagaagacggcgctcaagctccttaaagaatgggggtcgttggagaacttgcttaagaatttagatcaggtcaaaccagagtcagtgcgtgagaagattcttgctcacctcgaagacctcaaattaagccgcgaattgtcccgtgtacgcaccgatttgccgctcgaagttgatttccaacgccgccgcgaacctgactgggagggtcttaaagcgtttttagagcgtcttgaatttggttcgctcttgcatgaattcggccttttagaaagcccgttaccagccgaagaagcaccttggccaccgcccgagggcgcgtttttaggttaccgtttgagtcgcccggaaccgatgtgggccgaattactggctcttgcagcgtctgcccagggacgtgtgtatcgcgcggaagaccctcatggtgcgctccgcggcctcttcgaagtccgtggactccttgccaaagacttagctgttgttgcattgcgcgaaggtcttgatttacctccgactgatgatccaatgcttcttgcgtacctcttggacccgtcaaacacgacgcccgaaggcgtagcccgtcgttacggcggcgagtggaccgaagatgcagcgaaacgcgcgttattggccgaacgtttgcacgccaatttattaggacgtttgcaaggcgaggaacgtctcctctggctttacgaagaagtggagaaaccattgagtcgcgtgctcgcgcatatggaagctaccggtgtcaaattagacgtggcgtatttggagaatctcagccttgaagttgctgcccacatgcgccgcttggaggaagaagtattccgtttagcaggccgttcctttcgccttaattctcgcgatcagttagaacgtgtgttgttcgatgaacttggtctccctcctatcggcaagacagagaagaccggtaaacgtagcacttcagcggcggttttagaagctcttcgcgaagtccatcccattgtggacaagatcttgcaataccgcgaactcgcgaaattgaaaggcacctatattgaccgtcttccggcattagtccacccgaaaacgggacgcctccatacccgcttcaaccaaacagccacggcgaccggtcgtttgtcctcctctgatccaaaccttcagaatattccagtacgtaccccattgggccagaagatccgccgtgcgtttgtagctgaggagggttggcgtttagtggccctcgattatagccaaattgaattacgtgtccttgcccatctttctggcgatgagaacctcatccgcgtgtttcaggaaggcaaagacattcacactcaaacggcaagctggatgtttggattatcagctgaagcgatcgatcctttgatgcgtcgtgcagcgaagaccatcaatttcggtgttctctacggtatgagtgcctttcgtttgtcgcaggaattaggcattccctatgaagaagctcaggcgttcattcagaaatactttcaaagctatcccaaagttaaagcatggatcgagaagactctcgaagaaggccgcacacgtggttacgtagagaccttatttggacgtcgccgctatgttcccgatttaaacgctcgcgtgaaaggcaagcgtgaagccgccgaacgcatggcgttcaacatgcctgtacagggcacggcagctgacctcatgaaacttgcaatggtgcgcctttttccacaattgcgtgaagttggtgcccgcatgctcttgcaggtccacgatgaactcttgttagaagcgccaaaagagcgtgcggaagaggtggcagccctcgcgaaagaagttatggaaggcgtgtggcccttagcggtgcctcttgaagtcgaagttggtattggcgaggattggctggctgccaaagga

SEQ ID NO: 3450 - protein, 841 aa, synthetic construct
  REGION 1..841: note = Variant of DNA polymerase I from Thermus sp. strain 2.9
MHHHHHHGGRGVLPVFEPKGRVLLVDGHHLAYRNFFALKGLTTSSGEPVQGVYGFAKSLLKALKEDGDVVIVVFDAKAPSFRHEAYEAYKAGRAPTPEDFPRQLALMKELVDLLGLERLEVPGFEADDVLATLAKKAEREGYEVQILTADRDLFQLLSPRISVLHPEGHRITPEWLWEKYGLRPEQWVDFRALAGDPSDNIPGVKGIGEKTALKLLKEWGSLENLLKNLDQVKPESVREKILAHLEDLKLSRELSRVRTDLPLEVDFQRRREPDWEGLKAFLERLEFGSLLHEFGLLESPLPAEEAPWPPPEGAFLGYRLSRPEPMWAELLALAASAQGRVYRAEDPHGALRGLFEVRGLLAKDLAVVALREGLDLPPTDDPMLLAYLLDPSNTTPEGVARRYGGEWTEDAAKRALLAERLHANLLGRLQGEERLLWLYEEVEKPLSRVLAHMEATGVKLDVAYLENLSLEVAAHMRRLEEEVFRLAGRSFRLNSRDQLERVLFDELGLPPIGKTEKTGKRSTSAAVLEALREVHPIVDKILQYRELAKLKGTYIDRLPALVHPKTGRLHTRFNQTATATGRLSSSDPNLQNIPVRTPLGQKIRRAFVAEEGWRLVALDYSQIELRVLAHLSGDENLIRVFQEGKDIHTQTASWMFGLSAEAIDPLMRRAAKTINFGVLYGMSAFRLSQELGIPYEEAQAFIQKYFQSYPKVKAWIEKTLEEGRTRGYVETLFGRRRYVPDLNARVKGKREAAERMAFNMPVQGTAADLMKLAMVRLFPQLREVGARMLLQVHDELLLEAPKERAEEVAALAKEVMEGVWPLAVPLEVEVGIGEDWLAAKG

SEQ ID NO: 3451 - DNA, 2523 bp, synthetic construct
  misc_feature 1..2523: note = Variant of DNA polymerase I from Thermus sp. strain 2.9
  source 1..2523: mol_type = other DNA
atgcaccatcatcatcatcatggcggtagcggcgtgttagaggtgttcgagcctaaaggtcgcgtgcttctggttgatggccatcatctcgcgtatcgtaacttctttgccctgaaaggattaaccaccagcagcggcgagccggtacagggtgtctacggctttgcaaagtcgctcctgaaagctctgaaagaagacggtgatgtggtgattgttgtctttgatgcgaaagcgccaagttttcgccacgaagcgtacgaagcttacaaagccgggcgtgctccaacgccggaagactttcctcgccaattggcgcttatgaaggaattagtggatttgcttggcctcgaacgcttggaagttcccggtttcgaggcagacgacgtattagcgactctcgcaaagaaagccgaacgtgagggctatgaagtccagatcttgacagcagatcgcgatcttttccagcttttatctccgcgcatctcggtgttacacccggatgggcatcgtatcaccccggaatggctctgggagaaatatggtttgcgtcccgaacaatgggtggattttcgcgccttagcaggcgatccgagcgacaatattccgggagttaaaggtatcggcgagaagacggcgctcaagctccttaaagaatgggggtcgttggagaacttgcttaagaatttagatcaggtcaaaccagagtcagtgcgtgagaagattcttgctcacctcgaagacctcaaattaagccgcgaattgtcccgtgtacgcaccgatttgccgctcgaagttgatttccaacgccgccgcgaacctgactgggagggtcttaaagcgtttttagagcgtcttgaatttggttcgctcttgcatgaattcggccttttagaaagcccgttaccagccgaagaagcaccttggccaccgcccgagggcgcgtttttaggttaccgtttgagtcgcccggaaccgatgtgggccgaattactggctcttgcagcgtctgcccagggacgtgtgtatcgcgcggaagaccctcatggtgcgctccgcggcctcttcgaagtccgtggactccttgccaaagacttagctgttgttgcattgcgcgaaggtcttgatttacctccgactgatgatccaatgcttcttgcgtacctcttggacccgtcaaacacgacgcctgaaggcgtagcccgtcgttacggcggcgagtggaccgaagatgcagcgaaacgcgcgttattggccgaacgtttgcacgccaatttattaggacgtttgcaaggcgaggaacgtctcctctggctttacgaagaagtggagaaaccattgagtcgcgtgctcgcgcatatggaagctaccggtgtcaaattagacgtggcgtatttggagaatctcagccttgaagttgctgcccacatgcgccgcttggaggaagaagtattccgtttagcaggccgttcctttcgccttaattctcgcgatcagttagaacgtgtgttgttcgatgaacttggtctccctcctatcggcaagacagagaagaccggtaaacgtagcacttcagcggcggttttagaagctcttcgcgaagtccatcccattgtggacaagatcttgcaataccgcgaactcgcgaaattgaaaggcacctatattgaccgtcttccggcattagtccacccgaaaacgggacgcctccatacccgcttcaaccaaacagccacggcgaccggtcgtttgtcctcctctgatccaaaccttcagaatattccagtacgtaccccattgggccagaagatccgccgtgcgtttgtagctgaggagggttggcgtttagtggccctcgattatagccaaattgaattacgtgtccttgcccatctttctggcgatgagaacctcatccgcgtgtttcaggaaggcaaagacattcacactcaaacggcaagctggatgtttggattatcagctgaagcgatcgatcctttgatgcgtcgtgcagcgaagaccatcaatttcggtgttctctacggtatgagtgcctttcgtttgtcgcaggaattaggcattccctacgaagaagctcaggcgttcattcagaaatactttcaaagctatcccaaagttaaagcatggatcgagaagactctcgaagaaggccgccaccgtggttacgtagagaccttatttggacgtcgccgctatgttcccgatttaaacgctcgcgtgaaaggcaagcgtgaagccgccgaacgcatggcgttcaacatgcctgtacagggcacggcagctgacctcatgaaacttgcaatggtgcgcctttttccacaattgcgtgaagttggtgcccgcatgctcttgcaggtccacgatgaactcttgttagaagcgccaaaagagcgtgcggaagaggtggcagccctcgcgaaagaagttatggaaggcgtgtggcccttagcggtgcctcttgaagtcgaagttggtattggcgaggattggctggctgccaaagga

SEQ ID NO: 3452 - protein, 841 aa, synthetic construct
  REGION 1..841: note = Variant of DNA polymerase I from Thermus sp. strain 2.9
MHHHHHHGGSGVLEVFEPKGRVLLVDGHHLAYRNFFALKGLTTSSGEPVQGVYGFAKSLLKALKEDGDVVIVVFDAKAPSFRHEAYEAYKAGRAPTPEDFPRQLALMKELVDLLGLERLEVPGFEADDVLATLAKKAEREGYEVQILTADRDLFQLLSPRISVLHPDGHRITPEWLWEKYGLRPEQWVDFRALAGDPSDNIPGVKGIGEKTALKLLKEWGSLENLLKNLDQVKPESVREKILAHLEDLKLSRELSRVRTDLPLEVDFQRRREPDWEGLKAFLERLEFGSLLHEFGLLESPLPAEEAPWPPPEGAFLGYRLSRPEPMWAELLALAASAQGRVYRAEDPHGALRGLFEVRGLLAKDLAVVALREGLDLPPTDDPMLLAYLLDPSNTTPEGVARRYGGEWTEDAAKRALLAERLHANLLGRLQGEERLLWLYEEVEKPLSRVLAHMEATGVKLDVAYLENLSLEVAAHMRRLEEEVFRLAGRSFRLNSRDQLERVLFDELGLPPIGKTEKTGKRSTSAAVLEALREVHPIVDKILQYRELAKLKGTYIDRLPALVHPKTGRLHTRFNQTATATGRLSSSDPNLQNIPVRTPLGQKIRRAFVAEEGWRLVALDYSQIELRVLAHLSGDENLIRVFQEGKDIHTQTASWMFGLSAEAIDPLMRRAAKTINFGVLYGMSAFRLSQELGIPYEEAQAFIQKYFQSYPKVKAWIEKTLEEGRHRGYVETLFGRRRYVPDLNARVKGKREAAERMAFNMPVQGTAADLMKLAMVRLFPQLREVGARMLLQVHDELLLEAPKERAEEVAALAKEVMEGVWPLAVPLEVEVGIGEDWLAAKG

SEQ ID NO: 3453 - DNA, 2523 bp, synthetic construct
  misc_feature 1..2523: note = Variant of DNA polymerase I from Thermus sp. strain 2.9
  source 1..2523: mol_type = other DNA
atgcaccatcatcatcatcatggcggtagcggcgtgttaccggtgttcgagcctaaaggtcgcgtgcttctggttgatggccatcatctcgcgtatcgtaacttctttgccctgaaaggattaaccaccagcagcggcgagccggtacagggtgtctacggctttgcaaagtcgctcctgaaagctctgaaagaagacggtgatgtggtgattgttgtctttgatgcgaaagcgccaagttttcgccacgaagcgtacgaagcttacaaagccgggcgtgctccaacgccggaagactttcctcgccaattggcgcttatgaaggaattagtggatttgcttggcctcgaacgcttggaagttcccggtttcgaggcagacgacgtattagcgactctcgcaaagaaagccgaacgtgagggctatgaagtccagatcttgacagcagatcgcgatcttttccagcttttatctccgcgcatctcggtgttacacccggaagggcatcgtatcaccccggaatggctctgggagaaatatggtttgcgtcccgaacaatgggtggattttcgcgccttagcaggcgatccgagcgacaatattccgggagttaaaggtatcggcgagaagacggcgctcaagctccttaaagaatgggggtcgttggagaacttgcttaagaatttagatcaggtcaaaccagagtcagtgcgtgagaagattcttgctcacctcgaagacctcaaattaagccgcgaattgtcccgtgtacgcaccgatttgccgctcgaagttgatttccaacgccgccgcgaacctgactgggagggtcttaaagcgtttttagagcgtcttgaatttggttcgctcttgcatgaattcggccttttagaaagcccgttaccagccgaagaagcaccttggccaccgcccgagggcgcgtttttaggttaccgtttgagtcgcccggaaccgatgtgggccgaattactggctcttgcagcgtctgcccagggacgtgtgtatcgcgcggaagaccctcatggtgcgctccgcggcctcttcgaagtccgtggactccttgccaaagacttagctgttgttgcattgcgcgaaggtcttgatttacctccgactgatgatccaatgcttcttgcgtacctcttggacccgtcaaacacgacgcccgaaggcgtagcccgtcgttacggcggcgagtggaccgaagatgcagcgaaacgcgcgttattggccgaacgtttgcacgccaatttattaggacgtttgcaaggcgaggaacgtctcctctggctttacgaagaagtggagaaaccattgagtcgcgtgctcgcgcatatggaagctaccggtgtcaaattagacgtggcgtatttggagaatctcagccttgaagttgctgcccacatgcgccgcttggaggaagaagtattccgtttagcaggccgttcctttcgccttaattctcgcgatcagttagaacgtgtgttgttcgatgaacttggtctccctcctatcggcaagacagagaagaccggtaaacgtagcacttcagcggcggttttagaagctcttcgcgaagtccatcccattgtggacaagatcttgcaataccgcgaactcgcgaaattgaaaggcacctatattgaccgtcttccggcattagtccacccgaaaacgggacgcctccatacccgcttcaaccaaacagccacggcgaccggtcgtttgtcctcctctgatccaaaccttcagaatattccagtacgtaccccattgggccagaagatccgccgtgcgtttgtagctgaggagggttggcgtttagtggccctcgattatagccaaattgaattacgtgtccttgcccatctttctggcgatgagaacctcatccgcgtgtttcaggaaggcaaagacattcacactcaaacggcaagctggatgtttggattatcagctgaagcgatcgatcctttgatgcgtcgtgcagcgaagaccatcaatttcggtgttctctacggtatgagtgcctttcgtttggcgcaggaattaggcattccctatgaagaagctcaggcgttcattcagaaatactttcaaagctatcccaaagttaaagcatggatcgagaagactctcgaagaaggccgcacacgtggttacgtagagaccttatttggacgtcgccgctatgttcccgatttaaacgctcgcgtgaaaggcaagcgtgaagccgccgaacgcatggcgttcaacatgcctgtacagggcacggcagctgacctcatgaaacttgcaatggtgcgcctttttccacaattgcgtgaagttggtgcccgcatgctcttgcaggtccacgatgaactcttgttagaagcgccaaaagagcgtgcggaagaggtggcagccctcgcgaaagaagttatggaaggcgtgtggcccttagcggtgcctcttgaagtcgaagttggtattggcgaggattggctggctgccaaagga

SEQ ID NO: 3454 - protein, 841 aa, synthetic construct
  REGION 1..841: note = Variant of DNA polymerase I from Thermus sp. strain 2.9
MHHHHHHGGSGVLPVFEPKGRVLLVDGHHLAYRNFFALKGLTTSSGEPVQGVYGFAKSLLKALKEDGDVVIVVFDAKAPSFRHEAYEAYKAGRAPTPEDFPRQLALMKELVDLLGLERLEVPGFEADDVLATLAKKAEREGYEVQILTADRDLFQLLSPRISVLHPEGHRITPEWLWEKYGLRPEQWVDFRALAGDPSDNIPGVKGIGEKTALKLLKEWGSLENLLKNLDQVKPESVREKILAHLEDLKLSRELSRVRTDLPLEVDFQRRREPDWEGLKAFLERLEFGSLLHEFGLLESPLPAEEAPWPPPEGAFLGYRLSRPEPMWAELLALAASAQGRVYRAEDPHGALRGLFEVRGLLAKDLAVVALREGLDLPPTDDPMLLAYLLDPSNTTPEGVARRYGGEWTEDAAKRALLAERLHANLLGRLQGEERLLWLYEEVEKPLSRVLAHMEATGVKLDVAYLENLSLEVAAHMRRLEEEVFRLAGRSFRLNSRDQLERVLFDELGLPPIGKTEKTGKRSTSAAVLEALREVHPIVDKILQYRELAKLKGTYIDRLPALVHPKTGRLHTRFNQTATATGRLSSSDPNLQNIPVRTPLGQKIRRAFVAEEGWRLVALDYSQIELRVLAHLSGDENLIRVFQEGKDIHTQTASWMFGLSAEAIDPLMRRAAKTINFGVLYGMSAFRLAQELGIPYEEAQAFIQKYFQSYPKVKAWIEKTLEEGRTRGYVETLFGRRRYVPDLNARVKGKREAAERMAFNMPVQGTAADLMKLAMVRLFPQLREVGARMLLQVHDELLLEAPKERAEEVAALAKEVMEGVWPLAVPLEVEVGIGEDWLAAKG

SEQ ID NO: 3455 - DNA, 2523 bp, synthetic construct
  misc_feature 1..2523: note = Variant of DNA polymerase I from Thermus sp. strain 2.9
  source 1..2523: mol_type = other DNA
atgcaccatcatcatcatcatggcggtagcggcgtgttaccggtgttcgagcctaaaggtcgcgtgcttctggttgatggccatcatctcgcgtatcgtaacttctttgccctgaaaggattaaccaccagcagcggcgagccggtacagggtgtctacggctttgcaaagtcgctcctgaaagctctgaaagaagacggtgatgtggtgattgttgtctttgatgcgaaagcgccaagttttcgccacgaagcgtacgaagcttacaaagccgggcgtgctccaacgccggaagactttcctcgccaattggcgcttatgaaggaattagtggatttgcttggcctcgaacgcttggaagttcccggtttcgaggcagacgacgtattagcgactctcgcaaagaaagccgaacgtgagggctatgaagtccagatcttgacagcagatcgcgatcttttccagcttttatctccgcgcatctcggtgttacacccggaagggcatcgtatcaccccggaatggctctgggagaaatatggtttgcgtcccgaacaatgggtggattttcgcgccttagcaggcgatccgagcgacaatattccgggagttaaaggtatcggcgagaagacggcgctcaagctccttaaagaatgggggtcgttggagaacttgcttaagaatttagatcaggtcaaaccagagtcagtgcgtgagaagattcttgctcacctcgaagacctcaaattaagccgcgaattgtcccgtgtacgcaccgatttgccgctcgaagttgatttccaacgccgccgcgaacctgactgggagggtcttaaagcgtttttagagcgtcttgaatttggttcgctcttgcatgaattcggccttttagaaagcccgttaccagccgaagaagcaccttggccaccgcccgagggcgcgtttttaggttaccgtttgagtcgcccggaaccgatgtgggccgaattactggctcttgcagcgtctgcccagggacgtgtgtatcgcgcggaagaccctcatggtgcgctccgcggcctcttcgaagtccgtggactccttgccaaagacttagctgttgttgcattgcgcgaaggtcttgatttacctccgactgatgatccaatgcttcttgcgtacctcttggacccgtcaaacacgacgcccgaaggcgtagcccgtcgttacggcggcgagtggaccgaagatgcagcgaaacgcgcgttattggccgaacgtttgcacgccaatttattaggacgtttgcaaggcgaggaacgtctcctctggcttttcgaagaagtggagaaaccattgagtcgcgtgctcgcgcatatggaagctaccggtgtcaaattagacgtggcgtatttggagaatctcagccttgaagttgctgcccacatgcgccgcttggaggaagaagtattccgtttagcaggccgttcctttcgccttaattctcgcgatcagttagaacgtgtgttgttcgatgaacttggtgtgcctcctatcggcaagacagagaagaccggtaaacgtagcacttcagcggcggttttagaagctcttcgcgaagtccatcccattgtggacaagatcttgcaataccgcgaactcgcgaaattgaaaggcacctatattgaccgtcttccggcattagtccacccgaaaacgggacgcctccatacccgcttcaaccaaacagccacggcgaccggtcgtttgtcctcctctgatccaaaccttcagaatattccagtacgtaccccattgggccagaagatccgccgtgcgtttgtagctgaggagggttggcgtttagtggccctcgattatagccaaattgaattacgtgtccttgcccatctttctggcgatgagaacctcatccgcgtgtttcaggaaggcaaagacattcacactcaaacggcaagctggatgtttggattatcagctgaagcgatcgatcctttgatgcgtcgtgcagcgaagaccatcaatttcggtgttctctacggtatgagtgcctttcgtttgtcgcaggaattaggcattccctatgaagaagctcaggcgttcattcagaaatactttcaaagctatcccaaagttaaagcatggatcgagaagactctcgaagaaggccgcacacgtggttacgtagagaccttatttggacgtcgccgctatgttcccgatttaaacgctcgcgtgaaaggcaagcgtgaagccgccgaacgcatggcgttcaacatgcctgtacagggcacggcagctgacctcatgaaacttgcaatggtgcgcctttttccacaattgcgtgaagttggtgcccgcatgatcttgcaggtccacgatgaactcttgttagaagcgccaaaagagcgtgcggaagaggtggcagccctcgcgaaagaagttatggaaggcgtgtggcccttagcggtgcctcttgaagtcgaagttggtattggcgaggattggctggctgccaaagga

SEQ ID NO: 3456 - protein, 841 aa, synthetic construct
  REGION 1..841: note = Variant of DNA polymerase I from Thermus sp. strain 2.9
MHHHHHHGGSGVLPVFEPKGRVLLVDGHHLAYRNFFALKGLTTSSGEPVQGVYGFAKSLLKALKEDGDVVIVVFDAKAPSFRHEAYEAYKAGRAPTPEDFPRQLALMKELVDLLGLERLEVPGFEADDVLATLAKKAEREGYEVQILTADRDLFQLLSPRISVLHPEGHRITPEWLWEKYGLRPEQWVDFRALAGDPSDNIPGVKGIGEKTALKLLKEWGSLENLLKNLDQVKPESVREKILAHLEDLKLSRELSRVRTDLPLEVDFQRRREPDWEGLKAFLERLEFGSLLHEFGLLESPLPAEEAPWPPPEGAFLGYRLSRPEPMWAELLALAASAQGRVYRAEDPHGALRGLFEVRGLLAKDLAVVALREGLDLPPTDDPMLLAYLLDPSNTTPEGVARRYGGEWTEDAAKRALLAERLHANLLGRLQGEERLLWLFEEVEKPLSRVLAHMEATGVKLDVAYLENLSLEVAAHMRRLEEEVFRLAGRSFRLNSRDQLERVLFDELGVPPIGKTEKTGKRSTSAAVLEALREVHPIVDKILQYRELAKLKGTYIDRLPALVHPKTGRLHTRFNQTATATGRLSSSDPNLQNIPVRTPLGQKIRRAFVAEEGWRLVALDYSQIELRVLAHLSGDENLIRVFQEGKDIHTQTASWMFGLSAEAIDPLMRRAAKTINFGVLYGMSAFRLSQELGIPYEEAQAFIQKYFQSYPKVKAWIEKTLEEGRTRGYVETLFGRRRYVPDLNARVKGKREAAERMAFNMPVQGTAADLMKLAMVRLFPQLREVGARMILQVHDELLLEAPKERAEEVAALAKEVMEGVWPLAVPLEVEVGIGEDWLAAKG

SEQ ID NO: 3457 - DNA, 2523 bp, synthetic construct
  misc_feature 1..2523: note = Variant of DNA polymerase I from Thermus sp. strain 2.9
  source 1..2523: mol_type = other DNA
atgcaccatcatcatcatcatggcggtagcggcgtgttaccggtgttcgagcctaaaggtcgcgtgcttctggttgatggccatcatctcgcgtatcgtaacttctttgccctgaaaggattaaccaccagcagcggcgagccggtacagggtgtctacggctttgcaaagtcgctcctgaaagctctgaaagaagacggtgatgtggtgattgttgtctttgatgcgaaagcgccaagttttcgccacgaagcgtacgaagcttacaaagccgggcgtgctccaacgccggaagactttcctcgccaattggcgcttatgaaggaattagtggatttgcttggcctcgaacgcttggaagttcccggtttcgaggcagacgacgtattagcgactctcgcaaagaaagccgaacgtgagggctatgaagtccagatcttgacagcagatcgcgatcttttccagcttttatctccgcgcatctcggtgttacacccggaagggcatcgtatcaccccggaatggctctgggagaaatatggtttgcgtcccgaacaatgggtggattttcgcgccttagcaggcgatccgagcgacaatattccgggagttaaaggtatcggcgagaagacggcgctcaagctccttaaagaatgggggtcgttggagaacttgcttaagaatttagatcaggtcaaaccagagtcagtgcgtgagaagattcttgctcacctcgaagacctcaaattaagccgcgaattgtcccgtgtacgcaccgatttgccgctcgaagttgatttccaacgccgccgcgaacctgactgggagggtcttaaagcgtttttagagcgtcttgaatttggttcgctcttgcatgaattcggccttttagaaagcccgttaccagccgaagaagcaccttggccaccgcccgagggcgcgtttttaggttaccgtttgagtcgcccggaaccgatgtgggccgaattactggctcttgcagcgtctgcccagggacgtgtgtatcgcgcggaagaccctcatggtgcgctccgcggcctcttcgaagtccgtggactccttgccaaagacttagctgttgttgcattgcgcgaaggtcttgatttacctccgactgatgatccaatgcttcttgcgtacctcttggacccgtcaaacacgacgcccgaaggcgtagcccgtcgttacggcggcgagtggaccgaagatgcagcgaaacgcgcgttattggccgaacgtttgcacgccaatttattaggacgtttgcaaggcgaggaacgtctcctctggctttacgaagaagtggagaaaccattgagtcgcgtgctcgcgcatatggaagctaccggtgtcaaattagacgtggcgtatttggagaatctcagccttgaagttgctgcccacatgcgccgcttggaggaagaagtattccgtttagcaggccgttcctttcgccttaattctcgcgatcagttagaacgtgtgttgttcgatgaacttggtctccctcctatcggcaagacagagaagaccggtaaacgtagcacttcagcggcggttttagaagctcttcgcgaagtccatcccattgtggacaagatcttgcaataccgcgaactcgcgaaattgaaaggcacctatattgaccgtcttccggcattagtccacccgaaaacgggacgcctccatacccgcttcaaccaaacagccacggcgaccggtcgtttgtcctcctctgatccaaaccttcagaatattccagtacgtaccccattgggccagaagatccgccgtgcgtttgtagctgaggagggttggcgtttagtggccctcgattatagccaaattgaattacgtgtccttgcccatctttctggcgatgagaacctcatccgcgtgtttcaggaaggcaaagacattcacactcaaacggcaagctggatgtttggattaggtgctgaagcgatcgatcctttgatgcgtcgtgcagcgaagaccatcaatttcggtgttctctacggtatgagtgcctttcgtttgtcgcaggaattaggcattccctatgaagaagctcaggcgttcattcagaaatactttcaaagctatcccaaagttaaagcatggatcgagaagactctcgaagaaggccgcacacgtggttacgtagagaccttatttggacgtcgccgctatgttcccgatttaaacgctcgcgtgaaaggcaagcgtgaagccgccgaacgcatggcgttcaacatgcctgtacagggcacggcagctgacctcatgaaacttgcaatggtgcgcctttttccacaattgcgtgaagttggtgcccgcatgctcttgcaggtccacgatgaactcttgttagaagcgccaaaagagcgtgcggaagaggtggcagccctcgcgaaagaagttatggaaggcgtgtggcccttagcggtgcctcttgaagtcgaagttggtattggcgaggattggctggctgccaaagga

SEQ ID NO: 3458 - protein, 841 aa, synthetic construct
  REGION 1..841: note = Variant of DNA polymerase I from Thermus sp. strain 2.9
MHHHHHHGGSGVLPVFEPKGRVLLVDGHHLAYRNFFALKGLTTSSGEPVQGVYGFAKSLLKALKEDGDVVIVVFDAKAPSFRHEAYEAYKAGRAPTPEDFPRQLALMKELVDLLGLERLEVPGFEADDVLATLAKKAEREGYEVQILTADRDLFQLLSPRISVLHPEGHRITPEWLWEKYGLRPEQWVDFRALAGDPSDNIPGVKGIGEKTALKLLKEWGSLENLLKNLDQVKPESVREKILAHLEDLKLSRELSRVRTDLPLEVDFQRRREPDWEGLKAFLERLEFGSLLHEFGLLESPLPAEEAPWPPPEGAFLGYRLSRPEPMWAELLALAASAQGRVYRAEDPHGALRGLFEVRGLLAKDLAVVALREGLDLPPTDDPMLLAYLLDPSNTTPEGVARRYGGEWTEDAAKRALLAERLHANLLGRLQGEERLLWLYEEVEKPLSRVLAHMEATGVKLDVAYLENLSLEVAAHMRRLEEEVFRLAGRSFRLNSRDQLERVLFDELGLPPIGKTEKTGKRSTSAAVLEALREVHPIVDKILQYRELAKLKGTYIDRLPALVHPKTGRLHTRFNQTATATGRLSSSDPNLQNIPVRTPLGQKIRRAFVAEEGWRLVALDYSQIELRVLAHLSGDENLIRVFQEGKDIHTQTASWMFGLGAEAIDPLMRRAAKTINFGVLYGMSAFRLSQELGIPYEEAQAFIQKYFQSYPKVKAWIEKTLEEGRTRGYVETLFGRRRYVPDLNARVKGKREAAERMAFNMPVQGTAADLMKLAMVRLFPQLREVGARMLLQVHDELLLEAPKERAEEVAALAKEVMEGVWPLAVPLEVEVGIGEDWLAAKG

SEQ ID NO: 3459 - DNA, 2523 bp, synthetic construct
  misc_feature 1..2523: note = Variant of DNA polymerase I from Thermus sp. strain 2.9
  source 1..2523: mol_type = other DNA
atgcaccatcatcatcatcatggcggtagcggcgtgttaccggtgttcgagcctaaaggtcgcgtgcttctggttgatggccatcatctcgcgtatcgtaacttctttgccctgaaaggattaaccaccagcagcggcgagccggtacagggtgtctacggctttgcaaagtcgctcctgaaagctctgaaagaagacggtgatgtggtgattgttgtctttgatgcgaaagcgccaagttttcgccacgaagcgtacgaagcttacaaagccgggcgtgctccaacgccggaagactttcctcgccaattggcgcttatgaaggaattagtggatttgcttggcctcgaacgcttggaagttcccggtttcgaggcagacgacgtattagcgactctcgcaaagaaagccgaacgtgagggctatgaagtccagatcttgacagcagatcgcgatcttttccagcttttatctccgcgcatctcggtgttacacccggaagggcatcgtatcaccccggaatggctctgggagaaatatggtttgcgtcccgaacaatgggtggattttcgcgccttagcaggcgatccgagcgacaatattccgggagttaaaggtatcggcgagaagacggcgctcaagctccttaaagaatgggggtcgttggagaacttgcttaagaatttagatcaggtcaaaccagagtcagtgcgtgagaagattcttgctcacctcgaagacctcaaattaagccgcgaattgtcccgtgtacgcaccgatttgccgctcgaagttgatttccaacgccgccgcgaacctgactgggagggtcttaaagcgtttttagagcgtcttgaatttggttcgctcttgcatgaattcggccttttagaaagcccgttaccagccgaagaagcaccttggccaccgcccgagggcgcgtttttaggttaccgtttgagtcgcccggaaccgatgtgggccgaattactggctcttgcagcgtctgcccagggacgtgtgtatcgcgcggaagaccctcatggtgcgctccgcggcctcttcgaagtccgtggactccttgccaaagacttagctgttgttgcattgcgcgaaggtcttgatttacctccgactgatgatccaatgcttcttgcgtacctcttggacccgtcaaacacgacgcccgaaggcgtagcccgtcgttacggcggcgagtggaccgaagatgcagcgaaacgcgcgttattggccgaacgtttgcacgccaatttattaggacgtttgcaaggcgaggaacgtctcctctggctttacgaagaagtggagaaaccattgagtcgcgtgctcgcgcatatggaagctaccggtgtcaaattagacgtggcgtatttggagaatctcagccttgaagttgctgcccacatgcgccgcttggaggaagaagtattccagttagcaggccgttcctttcgccttaattctcgcgatcagttagaacgtgtgttgttcgatgaacttggtctccctcctatcggcaagacagagaagaccggtaaacgtagcacttcagcggcggttttagaagctcttcgcgaagtccatcccattgtggacaagatcttgcaataccgcgaactcgcgaaattgaaaggcacctatattgaccgtcttccggcattagtccacccgaaaacgggacgcctccatacccgcttcaaccaaacagccacggcgaccggtcgtttgtcctcctctgatccaaaccttcagaatattccagtacgtaccccattgggccagaagatccgccgtgcgtttgtagctgaggagggttggcgtttagtggccctcgattatagccaaattgaattacgtgtccttgcccatctttctggcgatgagaacctcatccgcgtgtttcaggaaggcaaagacattcacactcaaacggcaagctggatgtttggattatcagctgaagcgatcgatcctttgatgcgtcgtgcagcgaagaccatcaatttcggtgttctctacggtatgagtgcctttcgtttgtcgcaggaattaggcattccctatgaagaagctcaggcgttcattcagaaatactttcaaagctatcccaaagttaaagcatggatcgagaagactctcgaagaaggccgcacacgtggttacgtagagaccttatttggacgtcgccgctatgttcccgatttaaacgctcgcgtgaaaggcaagcgtgaagccgccgaacgcatggcgttcaacatgcctgtacagggcacggcagctgacctcatgaaacttgcaatggtgcgcctttttccacaattgcgtgaagttggtgcccgcatgctcttgcaggtccacgatgaactcttgttagaagcgccaaaagagcgtgcggaagaggtggcagccctcgcgaaagaagttatggaaggcgtgtggcccttagcggtgcctcttgaagtcgaagttggtattggcgaggattggctggctgccaaagga

SEQ ID NO: 3460 - protein, 841 aa, synthetic construct
  REGION 1..841: note = Variant of DNA polymerase I from Thermus sp. strain 2.9
MHHHHHHGGSGVLPVFEPKGRVLLVDGHHLAYRNFFALKGLTTSSGEPVQGVYGFAKSLLKALKEDGDVVIVVFDAKAPSFRHEAYEAYKAGRAPTPEDFPRQLALMKELVDLLGLERLEVPGFEADDVLATLAKKAEREGYEVQILTADRDLFQLLSPRISVLHPEGHRITPEWLWEKYGLRPEQWVDFRALAGDPSDNIPGVKGIGEKTALKLLKEWGSLENLLKNLDQVKPESVREKILAHLEDLKLSRELSRVRTDLPLEVDFQRRREPDWEGLKAFLERLEFGSLLHEFGLLESPLPAEEAPWPPPEGAFLGYRLSRPEPMWAELLALAASAQGRVYRAEDPHGALRGLFEVRGLLAKDLAVVALREGLDLPPTDDPMLLAYLLDPSNTTPEGVARRYGGEWTEDAAKRALLAERLHANLLGRLQGEERLLWLYEEVEKPLSRVLAHMEATGVKLDVAYLENLSLEVAAHMRRLEEEVFQLAGRSFRLNSRDQLERVLFDELGLPPIGKTEKTGKRSTSAAVLEALREVHPIVDKILQYRELAKLKGTYIDRLPALVHPKTGRLHTRFNQTATATGRLSSSDPNLQNIPVRTPLGQKIRRAFVAEEGWRLVALDYSQIELRVLAHLSGDENLIRVFQEGKDIHTQTASWMFGLSAEAIDPLMRRAAKTINFGVLYGMSAFRLSQELGIPYEEAQAFIQKYFQSYPKVKAWIEKTLEEGRTRGYVETLFGRRRYVPDLNARVKGKREAAERMAFNMPVQGTAADLMKLAMVRLFPQLREVGARMLLQVHDELLLEAPKERAEEVAALAKEVMEGVWPLAVPLEVEVGIGEDWLAAKG

SEQ ID NO: 3461 - DNA, 2523 bp, synthetic construct
  misc_feature 1..2523: note = Variant of DNA polymerase I from Thermus sp. strain 2.9
  source 1..2523: mol_type = other DNA
atgcaccatcatcatcatcatggcggtagcggcgtgttaccggtgttcgagcctaaaggtcgcgtgcttctggttgatggccatcatctcgcgtatcgtaacttctttgccctgaaaggattaaccaccagcagcggcgagccggtacagggtgtctacggctttgcaaagtcgctcctgaaagctctgaaagaagacggtgatgtggtgattgttgtctttgatgcgaaagcgccaagttttcgccacgaagcgtacgaagcttacaaagccgggcgtgctccaacgccggaagactttcctcgccaattggcgcttatgaaggaattagtggatttgcttggcctcgaacgcttggaagttcccggtttcgaggcagacgacgtattagcgactctcgcaaagaaagccgaacgtgagggctatgaagtccagatcttgacagcagatcgcgatcttttccagcttttatctccgcgcatctcggtgttacacccggaagggcatcgtatcaccccggaatggctctgggagaaatatggtttgcgtcccgaacaatgggtggattttcgcgccttagcaggcgatccgagcgacaatattccgggagttaaaggtatcggcgagaagacggcgctcaagctccttaaagaatgggggtcgttggagaacttgcttaagaatttagatcaggtcaaaccagagtcagtgcgtgagaagattcttgctcacctcgaagacctcaaattaagccgcgaattgtcccgtgtacgcaccgatttgccgctcgaagttgatttccaacgccgccgcgaacctgactgggagggtcttaaagcgtttttagagcgtcttgaatttggttcgctcttgcatgaattcggccttttagaaagcccgttaccagccgaagaagcaccttggccaccgcccgagggcgcgtttttaggttaccgtttgagtcgcccggaaccgatgtgggccgaattactggctcttgcagcgtctgcccagggacgtgtgtatcgcgcggaagaccctcatggtgcgctccgcggcctcttcgaagtccgtggactccttgccaaagacttagctgttgttgcattgcgcgaaggtcttgatttacctccgactgatgatccaatgcttcttgcgtacctcttggacccgtcaaacacgacgcccgaaggcgtagcccgtcgttacggcggcgagtggaccgaagatgcagcgaaacgcgcgttattggccgaacgtttgcacgccaatttattaggacgtttgcaaggcgaggaacgtctcctctggctttacgaagaagtggagaaaccattgagtcgcgtgctcgcgcatatggaagctaccggtgtcaaattagacgtggcgtatttggagaatctcagccttgaagttgctgcccacatgcgccgcttggaggaagcggtattccgtttagcaggccgttcctttcgccttaattctcgcgatcagttagaacgtgtgttgttcgatgaacttggtctccctcctatcggcaagacagagaagaccggtaaacgtagcacttcagcggcggttttagaagctcttcgcgaagtccatcccattgtggacaagatcttgcaataccgcgaactcgcgaaattgaaaggcacctatattgaccgtcttccggcattagtccacccgaaaacgggacgcctccatacccgcttcaaccaaacagccacggcgaccggtcgtttgtcctcctctgatccaaaccttcagaatattccagtacgtaccccattgggccagaagatccgccgtgcgtttgtagctgaggagggttggcgtttagtggccctcgattatagccaaattgaattacgtgtccttgcccatctttctggcgatgagaacctcatccgcgtgtttcaggaaggcaaagacattcacactcaaacggcaagctggatgtttggattatcagctgaagcgatcgatcctttgatgcgtcgtgcagcgaagaccatcaatttcggtgttctctacggtatgagtgcctttcgtttgtcgcaggaattaggcattccctatgaagaagctcaggcgttcattcagaaatactttcaaagctatcccaaagttaaagcatggatcgagaagactctcgaagaaggccgcacacgtggttacgtagagaccttatttggacgtcgccgctatgttcccgatttaaacgctcgcgtgaaaggcaagcgtgaagccgccgaacgcatggcgttcaacatgcctgtacagggcacggcagctgacctcatgaaacttgcaatggtgcgcctttttccacaattgcgtgaagttggtgcccgcatgctcttgcaggtccacgatgaactcttgttagaagcgccaaaagagcgtgcggaagaggtggcagccctcgcgaaagaagttatggaaggcgtgtggcccttagcggtgcctcttgaagtcgaagttggtattggcgaggattggctggctgccaaagga

SEQ ID NO: 3462 - protein, 841 aa, synthetic construct
  REGION 1..841: note = Variant of DNA polymerase I from Thermus sp. strain 2.9
MHHHHHHGGSGVLPVFEPKGRVLLVDGHHLAYRNFFALKGLTTSSGEPVQGVYGFAKSLLKALKEDGDVVIVVFDAKAPSFRHEAYEAYKAGRAPTPEDFPRQLALMKELVDLLGLERLEVPGFEADDVLATLAKKAEREGYEVQILTADRDLFQLLSPRISVLHPEGHRITPEWLWEKYGLRPEQWVDFRALAGDPSDNIPGVKGIGEKTALKLLKEWGSLENLLKNLDQVKPESVREKILAHLEDLKLSRELSRVRTDLPLEVDFQRRREPDWEGLKAFLERLEFGSLLHEFGLLESPLPAEEAPWPPPEGAFLGYRLSRPEPMWAELLALAASAQGRVYRAEDPHGALRGLFEVRGLLAKDLAVVALREGLDLPPTDDPMLLAYLLDPSNTTPEGVARRYGGEWTEDAAKRALLAERLHANLLGRLQGEERLLWLYEEVEKPLSRVLAHMEATGVKLDVAYLENLSLEVAAHMRRLEEAVFRLAGRSFRLNSRDQLERVLFDELGLPPIGKTEKTGKRSTSAAVLEALREVHPIVDKILQYRELAKLKGTYIDRLPALVHPKTGRLHTRFNQTATATGRLSSSDPNLQNIPVRTPLGQKIRRAFVAEEGWRLVALDYSQIELRVLAHLSGDENLIRVFQEGKDIHTQTASWMFGLSAEAIDPLMRRAAKTINFGVLYGMSAFRLSQELGIPYEEAQAFIQKYFQSYPKVKAWIEKTLEEGRTRGYVETLFGRRRYVPDLNARVKGKREAAERMAFNMPVQGTAADLMKLAMVRLFPQLREVGARMLLQVHDELLLEAPKERAEEVAALAKEVMEGVWPLAVPLEVEVGIGEDWLAAKG

SEQ ID NO: 3463 - DNA, 2523 bp, synthetic construct
  misc_feature 1..2523: note = Variant of DNA polymerase I from Thermus sp. strain 2.9
  source 1..2523: mol_type = other DNA
atgcaccatcatcatcatcatggcggtagcggcgtgttacctgtgttcgagcctaaaggtcgcgtgcttctggttgatggccatcatctcgcgtatcgtaacttctttgccctgaaaggattaaccaccagcagcggcgagccggtacagggtgtctacggctttgcaaagtcgctcctgaaagctctgaaagaagacggtgatgtggtgattgttgtctttgatgcgaaagcgccaagttttcgccacgaagcgtacgaagcttacaaagccgggcgtgctccaacgccggaagactttcctcgccaattggcgcttatgaaggaattagtggatttgcttggcctcgaacgcttggaagttcccggtttcgaggcagacgacgtattagcgactctcgcaaagaaagccgaacgcgagggctatgaagtccagatcttgacagcagatcgcgatcttttccagcttttatctccgcgcatctcggtgttacacccggaagggcatcgtatcaccccggaatggctctgggagaaatatggtttgcgtcccgaacaatgggtggattttcgcgccttagcaggcgatccgagcgacaatattccgggagttaaaggtatcggcgagaagacggcgctcaagctccttaaagaatgggggtcgttggagaacttgcttaagaatttagatcaggtcaaaccagagtcagtgcgtgagaagattcttgctcacctcgaagacctcaagttaagccgcgaattgtcccgtgtacgcaccgatttgccgctcgaagttgatttccaacgccgccgcgaacctgactgggagggtcttaaagcgtttttagagcgtcttgaatttggttcgctcttgcatgaattcggccttttagaaagcccgttaccagccgaagaagcaccttggccaccgcccgagggcgcgtttttaggttaccgtttgagtcgcccggaaccgatgtgggccgaattactggctcttgcagcgtctgcccagggacgtgtgtatcgcgcggaagaccctcatggtgcgctccgcggcctcttcgaagtccgtggactccttgccaaagacttagctgttgttgcattgcgcgaaggtcttgatttacctccgactgatgatccaatgcttcttgcgtacctcttggacccgtcaaacacgacgcctgaaggcgtagcccgtcgttacggcggcgagtggaccgaagatgcagcgaaacgcgcgttattggccgaacgtttgcacgccaatttattaggacgtttgcaaggcgaggaacgtctcctctggctttacgaagaagtggagaaaccattgagtcgcgtgctcgcgcatatggaagctaccggtgtcaaattagacgtggcgtatttggagaatctcagccttgaagttgctgcccacatgcgccgcttggaggaagaagtattccgtttagcaggccgttcctttcgccttaattctcgcgatcagttagaacgtgtgttgttcgatgaacttggtctccctcctatcggcaagacagagaagaccggtaaacgtagcacttcagcggcggttttagaagctcttcgcgaagtccatcccattgtggacaagatcttgcaataccgcgaactcgcgaaattgaaaggcacctatattgaccgtcttccggcattagtccacccgaaaacgggacgcctccatacccgcttcaaccaaacagccacggcgaccggtcgtttgtcctcctctgatccaaaccttcagaatattccagtacgtaccccattgggccagaagatccgccgtgcgtttgtagctgaggagggttggcgtttagtggccctcgattatagccaaattgaattacgtgtccttgcccatctttctggcgatgagaacctcatccgcgtgtttcaggaaggcaaagacattcacactcaaacggcaagctggatgtttggattatcagctgaagcgatcgatcctttgatgcgtcgtgcagcgaagaccatcaatttcggtgttctctacggtatgagtgcctttcgtttgtcgcaggaattaggcattcccaaagaagaagctcaggcgttcattcagaaatactttcaaagctatcccaaagttaaagcatggatcgagaagactctcgaagaaggccgcacacgtggttacgtagagaccttatttggacgtcgccgctatgttcccgatttaaacgctcgcgtgaaaggcaagcgtgaagccgccgaacgcatggcgttcaacatgcctgtacagggcacggcagctgacctcatgaaacttgcaatggtgcgcctttttccacaattgcgtgaagttggtgcccgcatgctcttgcaggtccacgatgaactcttgttagaagcgccaaaagagcgtgcggaagaggtggcagccctcgcgaaagaagttatggaaggcgtgtggcccttagcggtgcctcttgaagtcgaagttggtattggcgaggattggctggctgccaaagga

SEQ ID NO: 3464 - protein, 841 aa, synthetic construct
  REGION 1..841: note = Variant of DNA polymerase I from Thermus sp. strain 2.9
MHHHHHHGGSGVLPVFEPKGRVLLVDGHHLAYRNFFALKGLTTSSGEPVQGVYGFAKSLLKALKEDGDVVIVVFDAKAPSFRHEAYEAYKAGRAPTPEDFPRQLALMKELVDLLGLERLEVPGFEADDVLATLAKKAEREGYEVQILTADRDLFQLLSPRISVLHPEGHRITPEWLWEKYGLRPEQWVDFRALAGDPSDNIPGVKGIGEKTALKLLKEWGSLENLLKNLDQVKPESVREKILAHLEDLKLSRELSRVRTDLPLEVDFQRRREPDWEGLKAFLERLEFGSLLHEFGLLESPLPAEEAPWPPPEGAFLGYRLSRPEPMWAELLALAASAQGRVYRAEDPHGALRGLFEVRGLLAKDLAVVALREGLDLPPTDDPMLLAYLLDPSNTTPEGVARRYGGEWTEDAAKRALLAERLHANLLGRLQGEERLLWLYEEVEKPLSRVLAHMEATGVKLDVAYLENLSLEVAAHMRRLEEEVFRLAGRSFRLNSRDQLERVLFDELGLPPIGKTEKTGKRSTSAAVLEALREVHPIVDKILQYRELAKLKGTYIDRLPALVHPKTGRLHTRFNQTATATGRLSSSDPNLQNIPVRTPLGQKIRRAFVAEEGWRLVALDYSQIELRVLAHLSGDENLIRVFQEGKDIHTQTASWMFGLSAEAIDPLMRRAAKTINFGVLYGMSAFRLSQELGIPKEEAQAFIQKYFQSYPKVKAWIEKTLEEGRTRGYVETLFGRRRYVPDLNARVKGKREAAERMAFNMPVQGTAADLMKLAMVRLFPQLREVGARMLLQVHDELLLEAPKERAEEVAALAKEVMEGVWPLAVPLEVEVGIGEDWLAAKG

SEQ ID NO: 3465 - DNA, 2523 bp, synthetic construct
  misc_feature 1..2523: note = Variant of DNA polymerase I from Thermus sp. strain 2.9
  source 1..2523: mol_type = other DNA
atgcaccatacgcatcatcatggcggtagcggcgtgttaccggtgttcgagcctaaaggtcgcgtgcttctggttgatggccatcatctcgcgtatcgtaacttctttgccctgaaaggattaaccaccagcagcggcgagccggtacagggtgtctacggctttgcaaagtcgctcctgaaagctctgaaagaagacggtgatgtggtgattgttgtctttgatgcgaaagcgccaagttttcgccacgaagcgtacgaagcttacaaagccgggcgtgctccaacgccggaagactttcctcgccaattggcgcttatgaaggaattagtggatttgcttggcctcgaacgcttggaagttcccggtttcgaggcagacgacgtattagcgactctcgcaaagaaagccgaacgtgagggctatgaagtccagatcttgacagcagatcgcgatcttttccagcttttatctccgcgcatctcggtgttacacccggaagggcatcgtatcaccccggaatggctctgggagaaatatggtttgcgtcccgaacaatgggtggattttcgcgccttagcaggcgatccgagcgacaatattccgggagttaaaggtatcggcgagaagacggcgctcaagctccttaaagaatgggggtcgttggagaacttgcttaagaatttagatcaggtcaaaccagagtcagtgcgtgagaagattcttgctcacctcgaagacctcaaattaagccgcgaattgtcccgtgtacgcaccgatttgccgctcgaagttgatttccaacgccgccgcgaacctgactgggagggtcttaaagcgtttttagagcgtcttgaatttggttcgctcttgcatgaattcggccttttagaaagcccgttaccagccgaagaagcaccttggccaccgcccgagggcgcgtttttaggttaccgtttgagtcgcccggaaccgatgtgggccgaattactggctcttgcagcgtctgcccagggacgtgtgtatcgcgcggaagaccctcatggtgcgctccgcggcctcttcgaagtccgtggactccttgccaaagacttagctgttgttgcattgcgcgaaggtcttgatttacctccgactgatgatccaatgcttcttgcgtacctcttggacccgtcaaacacgacgcccgaaggcgtagcccgtcgttacggcggcgagtggaccgaagatgcagcgaaacgcgcgttattggccgaacgtttgcacgccaatttattaggacgtttgcaaggcgaggaacgtctcctctggctttacgaagaagtggagaaaccattgagtcgcgtgctcgcgcatatggaagctaccggtgtcaaattagacgtggcgtatttggagaatctcagccttgaagttgctgcccacatgcgccgcttggaggaagaagtattccgtttagcaggccgttcctttcgccttaattctcgcgatcagttagaacgtgtgttgttcgatgaacttggtctccctcctatcggcaagacagagaagaccggtaaacgtagcacttcagcggcggttttagaagctcttcgcgaagtccatcccattgtggacaagatcttgcaataccgcgaactcgcgaaattgaaaggcacctatattgaccgtcttccggcattagtccacccgaaaacgggacgcctccatacccgcttcaaccaaacagccacggcgaccggtcgtttgtcctcctctgatccaaaccttcagaatattccagtacgtaccccattgggccagaagatccgccgtgcgtttgtagctgaggagggttggcgtttagtggccctcgattatagccaaattgaattacgtgtccttgcccatctttctggcgatgagaacctcatccgcgtgtttcaggaaggcaaagacattcacactcaaacggcaagctggatgtttggattatcagctgaagcgatcgatcctttgatgcgtcgtgcagcgaagaccatcaatttcggtgttctctacggtatgagtgcctttcgtttgtcgcaggaattaggcattccctatgaagaagctcaggcgttcattcagaaatactttcaaagctatcccaaagttaaagcatggatcgagaagactctcgaagaaggccgcacacgtggttacgtagagaccttatttggacgtcgccgctatgttcccgatttaaacgctcgcgtgaaaggcaagcgtgaagccgccgaacgcatggcgttcaacatgcctgtacagggcacggcagctgacctcatgaaacttgcaatggtgcgcctttttccacaattgcgtgaagttggtgcccgcatgctcttgcaggtccacgatgaactcttgttagaagcgccaaaagagcgtgcggaagaggtggcagccctcgcgaaagaagttatggaaggcgtgtggcccttagcggtgcctcttgaagtcgaagttggtattggcgaggattggctggctgccaaagga

SEQ ID NO: 3466 - protein, 841 aa, synthetic construct
  REGION 1..841: note = Variant of DNA polymerase I from Thermus sp. strain 2.9
MHHTHHHGGSGVLPVFEPKGRVLLVDGHHLAYRNFFALKGLTTSSGEPVQGVYGFAKSLLKALKEDGDVVIVVFDAKAPSFRHEAYEAYKAGRAPTPEDFPRQLALMKELVDLLGLERLEVPGFEADDVLATLAKKAEREGYEVQILTADRDLFQLLSPRISVLHPEGHRITPEWLWEKYGLRPEQWVDFRALAGDPSDNIPGVKGIGEKTALKLLKEWGSLENLLKNLDQVKPESVREKILAHLEDLKLSRELSRVRTDLPLEVDFQRRREPDWEGLKAFLERLEFGSLLHEFGLLESPLPAEEAPWPPPEGAFLGYRLSRPEPMWAELLALAASAQGRVYRAEDPHGALRGLFEVRGLLAKDLAVVALREGLDLPPTDDPMLLAYLLDPSNTTPEGVARRYGGEWTEDAAKRALLAERLHANLLGRLQGEERLLWLYEEVEKPLSRVLAHMEATGVKLDVAYLENLSLEVAAHMRRLEEEVFRLAGRSFRLNSRDQLERVLFDELGLPPIGKTEKTGKRSTSAAVLEALREVHPIVDKILQYRELAKLKGTYIDRLPALVHPKTGRLHTRFNQTATATGRLSSSDPNLQNIPVRTPLGQKIRRAFVAEEGWRLVALDYSQIELRVLAHLSGDENLIRVFQEGKDIHTQTASWMFGLSAEAIDPLMRRAAKTINFGVLYGMSAFRLSQELGIPYEEAQAFIQKYFQSYPKVKAWIEKTLEEGRTRGYVETLFGRRRYVPDLNARVKGKREAAERMAFNMPVQGTAADLMKLAMVRLFPQLREVGARMLLQVHDELLLEAPKERAEEVAALAKEVMEGVWPLAVPLEVEVGIGEDWLAAKG

SEQ ID NO: 3467 - DNA, 2523 bp, synthetic construct
  misc_feature 1..2523: note = Variant of DNA polymerase I from Thermus sp. strain 2.9
  source 1..2523: mol_type = other DNA
atgcaccatcatcatcatcatggcggtagcggcgtgttaccggtgttcgagcctaaaggtcgcgtgcttctggttgatggccatcatctcgcgtatcgtaacttctttgccctgaaaggattaaccaccagcagcggcgagccggtacagggtgtctacggctttgcaaagtcgctcctgaaagctctgaaagaagacggtgatgtggtgattgttgtctttgatgcgaaagcgccaagttttcgccacgaagcgtacgaagcttacaaagccgggcgtgctccaacgccggaagactttcctcgccaattggcgcttatgaaggaattagtggatttgcttggcctcgaacgcttggaagttcccggtttcgaggcagacgacgtattagcgactctcgcaaagaaagccgaacgtgagggctatgaagtccagatcttgacagcagatcgcgatcttttccagcttttatctccgcgcatctcggtgttacacccggaagggcatcgtatcaccccggaatggctctgggagaaatatggtttgcgtcccgaacaatgggtggattttcgcgccttagcaggcgatccgagcgacaatattccgggagttaaaggtatcggcgagaagacggcgctcaagctccttaaagaatgggggtcgttggagaacttgcttaagaatttagatcaggtcaaaccagagtcagtgcgtgagaagattcttgctcacctcgaagacctcaaattaagccgcgaattgtcccgtgtacgcaccgatttgccgctcgaagttgatttccaacgccgccgcgaacctgactgggagggtcttaaagcgtttttagagcgtcttgaatttggttcgctcttgcatgaattcggccttttagaaagcccgttaccagccgaagaagcaccttggccaccgcccgagggcgcgtttttaggttaccgtttgagtcgcccggaaccgatgtgggccgaattactggctcttgcagcgtctgcccagggacgtgtgtatcgcgcggaagaccctcatggtgcgctccgcggcctcttcgaagtccgtggactccttgccaaagacttagctgttgttgcattgcgcgaaggtcttgatttagggccgactgatgatccaatgcttcttgcgtacctcttggacccgtcaaacacgacgcccgaaggcgtagcccgtcgttacggcggcgagtggaccgaagatgcagcgaaacgcgcgttattggccgaacgtttgcacgccaatttattaggacgtttgcaaggcgaggaacgtctcctctggctttacgaagaagtggagaaaccattgagtcgcgtgctcgcgcatatggaagctaccggtgtcaaattagacgtggcgtatttggagaatctcagccttgaagttgctgcccacatgcgccgcttggaggaagaagtattccgtttagcaggccgttcctttcgccttaattctcgcgatcagttagaacgtgtgttgttcgatgaacttggtctccctcctatcggcaagacagagaagaccggtaaacgtagcacttcagcggcggttttagaagctcttcgcgaagtccatcccattgtggacaagatcttgcaataccgcgaactcgcgaaattgaaaggcacctatattgaccgtcttccggcattagtccacccgaaaacgggacgcctccatacccgcttcaaccaaacagccacggcgaccggtcgtttgtcctcctctgatccaaaccttcagaatattccagtacgtaccccattgggccagaagatccgccgtgcgtttgtagctgaggagggttggcgtttagtggccctcgattatagccaaattgaattacgtgtccttgcccatctttctggcgatgagaacctcatccgcgtgtttcaggaaggcaaagacattcacactcaaacggcaagctggatgtttggattatcagctgaagcgatcgatcctttgatgcgtcgtgcagcgaagaccatcaatttcggtgttctctacggtatgagtgcctttcgtttgtcgcaggaattaggcattccctatgaagaagctcaggcgttcattcagaaatactttcaaagctatcccaaagttaaagcatggatcgagaagactctcgaagaaggccgcacacgtggttacgtagagaccttatttggacgtcgccgctatgttcccgatttaaacgctcgcgtgaaaggcaagcgtgaagccgccgaacgcatggcgttcaacatgcctgtacagggcacggcagctgacctcatgaaacttgcaatggtgcgcctttttccacaattgcgtgaagttggtgcccgcatgctcttgcaggtccacgatgaactcttgttagaagcgccaaaagagcgtgcggaagaggtggcagccctcgcgaaagaagttatggaaggcgtgtggcccttagcggtgcctcttgaagtcgaagttggtattggcgaggattggctggctgccaaagga

SEQ ID NO: 3468 - protein, 841 aa, synthetic construct
  REGION 1..841: note = Variant of DNA polymerase I from Thermus sp. strain 2.9
MHHHHHHGGSGVLPVFEPKGRVLLVDGHHLAYRNFFALKGLTTSSGEPVQGVYGFAKSLLKALKEDGDVVIVVFDAKAPSFRHEAYEAYKAGRAPTPEDFPRQLALMKELVDLLGLERLEVPGFEADDVLATLAKKAEREGYEVQILTADRDLFQLLSPRISVLHPEGHRITPEWLWEKYGLRPEQWVDFRALAGDPSDNIPGVKGIGEKTALKLLKEWGSLENLLKNLDQVKPESVREKILAHLEDLKLSRELSRVRTDLPLEVDFQRRREPDWEGLKAFLERLEFGSLLHEFGLLESPLPAEEAPWPPPEGAFLGYRLSRPEPMWAELLALAASAQGRVYRAEDPHGALRGLFEVRGLLAKDLAVVALREGLDLGPTDDPMLLAYLLDPSNTTPEGVARRYGGEWTEDAAKRALLAERLHANLLGRLQGEERLLWLYEEVEKPLSRVLAHMEATGVKLDVAYLENLSLEVAAHMRRLEEEVFRLAGRSFRLNSRDQLERVLFDELGLPPIGKTEKTGKRSTSAAVLEALREVHPIVDKILQYRELAKLKGTYIDRLPALVHPKTGRLHTRFNQTATATGRLSSSDPNLQNIPVRTPLGQKIRRAFVAEEGWRLVALDYSQIELRVLAHLSGDENLIRVFQEGKDIHTQTASWMFGLSAEAIDPLMRRAAKTINFGVLYGMSAFRLSQELGIPYEEAQAFIQKYFQSYPKVKAWIEKTLEEGRTRGYVETLFGRRRYVPDLNARVKGKREAAERMAFNMPVQGTAADLMKLAMVRLFPQLREVGARMLLQVHDELLLEAPKERAEEVAALAKEVMEGVWPLAVPLEVEVGIGEDWLAAKG

SEQ ID NO: 3469 - DNA, 2523 bp, synthetic construct
  misc_feature 1..2523: note = Variant of DNA polymerase I from Thermus sp. strain 2.9
  source 1..2523: mol_type = other DNA
atgcaccatcatcatcatcatggcggtagccgggtgttaccggtgttcgagcctaaaggtcgcgtgcttctggttgatggccatcatctcgcgtatcgtaacttctttgccctgaaaggattaaccaccagcagcggcgagccggtacagggtgtctacggctttgcaaagtcgctcctgaaagctctgaaagaagacggtgatgtggtgattgttgtctttgatgcgaaagcgccaagttttcgccacgaagcgtacgaagcttacaaagccgggcgtgctccaacgccggaagactttcctcgccaattggcgcttatgaaggaattagtggatttgcttggcctcgaacgcttggaagttcccggtttcgaggcagacgacgtattagcgactctcgcaaagaaagccgaacgtgagggctatgaagtccagatcttgacagcagatcgcgatcttttccagcttttatctccgcgcatctcggtgttacacccggaagggcatcgtatcaccccggaatggctctgggagaaatatggtttgcgtcccgaacaatgggtggattttcgcgccttagcaggcgatccgagcgacaatattccgggagttaaaggtatcggcgagaagacggcgctcaagctccttaaagaatgggggtcgttggagaacttgcttaagaatttagatcaggtcaaaccagagtcagtgcgtgagaagattcttgctcacctcgaagacctcaaattaagccgcgaattgtcccgtgtacgcaccgatttgccgctcgaagttgatttccaacgccgccgcgaacctgactgggagggtcttaaagcgtttttagagcgtcttgaatttggttcgctcttgcatgaattcggccttttagaaagcccgttaccagccgaagaagcaccttggccaccgcccgagggcgcgtttttaggttaccgtttgagtcgcccggaaccgatgtgggccgaattactggctcttgcagcgtctgcccagggacgtgtgtatcgcgcggaagaccctcatggtgcgctccgcggcctcttcgaagtccgtggactccttgccaaagacttagctgttgttgcattgcgcgaaggtcttgatttacctccgactgatgatccaatgcttcttgcgtacctcttggacccgtcaaacacgacgcccgaaggcgtagcccgtcgttacggcggcgagtggaccgaagatgcagcgaaacgcgcgttattggccgaacgtttgcacgccaatttattaggacgtttgcaaggcgaggaacgtctcctctggctttacgaagaagtggagaaaccattgagtcgcgtgctcgcgcatatggaagctaccggtgtcaaattagacgtggcgtatttggagaatctcagccttgaagttgctgcccacatgcgccgcttggaggaagaagtattccgtttagcaggccgttcctttcgccttaattctcgcgatcagttagaacgtgtgttgttcgatgaacttggtctccctcctatcggcaagacagagaagaccggtaaacgtagcacttcagcggcggttttagaagctcttcgcgaagtccatcccattgtggacaagatcttgcaataccgcgaactcgcgaaattgaaaggcacctatattgaccgtcttccggcattagtccacccgaaaacgggacgcctccatacccgcttcaaccaaacagccacggcgaccggtcgtttgtcctcctctgatccaaaccttcagaatattccagtacgtaccccattgggccagaagatccgccgtgcgtttgtagctgaggagggttggcgtttagtggccctcgattatagccaaattgaattacgtgtccttgcccatctttctggcgatgagaacctcatccgcgtgtttcaggaaggcaaagacattcacactcaaacggcaagctggatgtttggattatcagctgaagcgatcgatcctttgatgcgtcgtgcagcgaagaccatcaatttcggtgttctctacggtatgagtgcctttcgtttgtcgcaggaattaggcattccctatgaagaagctcaggcgttcattcagaaatactttcaaagctatcccaaagttaaagcatggatcgagaagactctcgaagaaggccgcacacgtggttacgtagagaccttatttggacgtcgccgctatgttcccgatttaaacgctcgcgtgaaaggcaagcgtgaagccgccgaacgcatggcgttcaacatgcctgtacagggcacggcagctgacctcatgaaacttgcaatggtgcgcctttttccacaattgcgtgaagttggtgcccgcatgctcttgcaggtccacgatgaactcttgttagaagcgccaaaagagcgtgcggaagaggtggcagccctcgcgaaagaagttatggaaggcgtgtggcccttagcggtgcctcttgaagtcgaagttggtattggcgaggattggctggctgccaaagga

SEQ ID NO: 3470 - protein, 841 aa, synthetic construct
  REGION 1..841: note = Variant of DNA polymerase I from Thermus sp. strain 2.9
MHHHHHHGGSRVLPVFEPKGRVLLVDGHHLAYRNFFALKGLTTSSGEPVQGVYGFAKSLLKALKEDGDVVIVVFDAKAPSFRHEAYEAYKAGRAPTPEDFPRQLALMKELVDLLGLERLEVPGFEADDVLATLAKKAEREGYEVQILTADRDLFQLLSPRISVLHPEGHRITPEWLWEKYGLRPEQWVDFRALAGDPSDNIPGVKGIGEKTALKLLKEWGSLENLLKNLDQVKPESVREKILAHLEDLKLSRELSRVRTDLPLEVDFQRRREPDWEGLKAFLERLEFGSLLHEFGLLESPLPAEEAPWPPPEGAFLGYRLSRPEPMWAELLALAASAQGRVYRAEDPHGALRGLFEVRGLLAKDLAVVALREGLDLPPTDDPMLLAYLLDPSNTTPEGVARRYGGEWTEDAAKRALLAERLHANLLGRLQGEERLLWLYEEVEKPLSRVLAHMEATGVKLDVAYLENLSLEVAAHMRRLEEEVFRLAGRSFRLNSRDQLERVLFDELGLPPIGKTEKTGKRSTSAAVLEALREVHPIVDKILQYRELAKLKGTYIDRLPALVHPKTGRLHTRFNQTATATGRLSSSDPNLQNIPVRTPLGQKIRRAFVAEEGWRLVALDYSQIELRVLAHLSGDENLIRVFQEGKDIHTQTASWMFGLSAEAIDPLMRRAAKTINFGVLYGMSAFRLSQELGIPYEEAQAFIQKYFQSYPKVKAWIEKTLEEGRTRGYVETLFGRRRYVPDLNARVKGKREAAERMAFNMPVQGTAADLMKLAMVRLFPQLREVGARMLLQVHDELLLEAPKERAEEVAALAKEVMEGVWPLAVPLEVEVGIGEDWLAAKG

SEQ ID NO: 3471 - DNA, 2523 bp, synthetic construct
  misc_feature 1..2523: note = Variant of DNA polymerase I from Thermus sp. strain 2.9
  source 1..2523: mol_type = other DNA
atgcaccatcatcatcatcatggcggtagcggcgtgttaccggtgttcgagcctaaaggtcgcgtgcttctggttgatggccatcatctcgcgtatcgtaacttctttgccctgaaaggattaaccaccagcagcggcgagccggtacagggtgtctacggctttgcaaagtcgctcctgaaagctctgaaagaagacggtgatgtggtgattgttgtctttgatgcgaaagcgccaagttttcgccacgaagcgtacgaagcttacaaagccgggcgtgctccaacgccggaagactttcctcgccaattggcgcttatgaaggaattagtggatttgcttggcctcgaacgcttggaagttcccggtttcgaggcagacgacgtattagcgactctcgcaaagaaagccgaacgtgagggctatgaagtccagatcttgacagcagatcgcgatcttttccagcttttatctccgcgcatctcggtgttacacccggaagggcatcgtatcaccccggaatggctctgggagaaatatggtttgcgtcccgaacaatgggtggattttcgcgccttagcaggcgatccgagcgacaatattccgggagttaaaggtatcggcgagaagacggcgctcaagctccttaaagaatgggggtcgttggagaacttgcttaagaatttagatcaggtcaaaccagagtcagtgcgtgagaagattcttgctcacctcgaagacctcaaattaagccgcgaattgtcccgtgtacgcaccgatttgccgctcgaagttgatttccaacgccgccgcgaacctgactgggagggtcttaaagcgtttttagagcgtcttgaatttggttcgctcttgcatgaattcggccttttagaaagcccgttaccagccgaagaagcaccttggccaccgcccgagggcgcgtttttaggttaccgtttgagtcgcccggaaccgatgtgggccgaattactggctcttgcagcgtctgcccagggacgtgtgtatcgcgcggaagaccctcatggtgcgctccgcggcctcttcgaagtccgtggactccttgccaaagacttagctgttgttgcattgcgcgaaggtcttgatttacctccgactgatgatccaatgcttcttgcgtacctcttggacccgtcaaacacgacgcccgaaggcgtagcccgtcgttacggcggcgagtggaccgaagatgcagcgaaacgcgcgttattggccgaacgtttgcacgccaatttattaggacgtttgcaaggcgaggaacgtctcctctggctttacgaagaagtggagaaaccattgagtcgcgtgctcgcgcatatggaagctaccggtgtcaaattagacgtggcgtatttggagaatctcagccttgaagttgctgcccacatgcgccgcttggaggaagaagtattccgtttagcaggccgttcctttcgccttaattctcgcgatcagttagaacgtgtgttgttcgatgaacttggtctccctcctatcggcaagacagagaagaccggtaaacgtagcacttcagcggcggttttagaagctcttcgcgaagtccatcccattgtggacaagatcttgcaataccgcgaactcgcgaaattgaaaggcacctatattgaccgtcttccggcattagtccacccgaggacgggacgcctccatacccgcttcaaccaaacagccacggcgaccggtcgtttgtcctcctctgatccaaaccttcagaatattccagtacgtaccccattgggccagaagatccgccgtgcgtttgtagctgaggagggttggcgtttagtggccctcgattatagccaaattgaattacgtgtccttgcccatctttctggcgatgagaacctcatccgcgtgtttcaggaaggcaaagacattcacactcaaacggcaagctggatgtttggattatcagctgaagcgatcgatcctttgatgcgtcgtgcagcgaagaccatcaatttcggtgttctctacggtatgagtgcctttcgtttgtcgcaggaattaggcattccctatgaagaagctcaggcgttcattcagaaatactttcaaagctatcccaaagttaaagcatggatcgagaagactctcgaagaaggccgcacacgtggttacgtagagaccttatttggacgtcgccgctatgttcccgatttaaacgctcgcgtgaaaggcaagcgtgaagccgccgaacgcatggcgttcaacatgcctgtacagggcacggcagctgacctcatgaaacttgcaatggtgcgcctttttccacaattgcgtgaagttggtgcccgcatgctcttgcaggtccacgatgaactcttgttagaagcgccaaaagagcgtgcggaagaggtggcagccctcgcgaaagaagttatggaaggcgtgtggcccttagcggtgcctcttgaagtcgaagttggtattggcgaggattggctggctgccaaagga

SEQ ID NO: 3472 - protein, 841 aa, synthetic construct; identical to SEQ ID NO: 3308
  REGION 1..841: note = Variant of DNA polymerase I from Thermus sp. strain 2.9

SEQ ID NO: 3473 - DNA, 2523 bp, synthetic construct
  misc_feature 1..2523: note = Variant of DNA polymerase I from Thermus sp. strain 2.9
  source 1..2523: mol_type = other DNA
atgcaccatcatcatcatcatggcggtagcggcgtgttaccggtgttcgagcctaaaggtcgcgtgcttctggttgatggccatcatctcgcgtatcgtaacttctttgccctgaaaggattaaccaccagcagcggcgagccggtacagggtgtctacggctttgcaaagtcgctcctgaaagctctgaaagaagacggtgatgtggtgattgttgtctttgatgcgaaagcgccaagttttcgccacgaagcgtacgaagcttacaaagccgggcgtgctccaacgccggaagactttcctcgccaattggcgcttatgaaggaattagtggatttgcttggcctcgaacgcttggaagttcccggtttcgaggcagacgacgtattagcgactctcgcaaagaaagccgaacgtgagggctatgaagtccagatcttgacagcagatcgcgatcttttccagcttttatctccgcgcatctcggtgttacacccggaagggcatcgtatcaccccggaatggctctgggagaaatatggtttgcgtcccgaacaatgggtggattttcgcgccttagcaggcgatccgagcgacaatattccgggagttaaaggtatcggcgagaagacggcgctcaagctccttaaagaatgggggtcgttggagaacttgcttaagaatttagatcaggtcaaaccagagtcagtgcgtgagaagattcttgctcacctcgaagacctcaaattaagccgcgaattgtcccgtgtacgcaccgatttgccgctcgaagttgatttccaacgccgccgcgaacctgactgggagggtcttaaagcgtttttagagcgtcttgaatttggttcgctcttgcatgaattcggccttttagaaagcccgttaccagccgaagaagcaccttggccaccgcccgagggcgcgtttttaggttaccgtttgagtcgcccggaaccgatgtgggccgaattactggctcttgcagcgtctgcccagggacgtgtgtatcgcgcggaagaccctcatggtgcgctccgcggcctcttcgaagtccgtggactccttgccaaagacttagctgttgttgcattgcgcgaaggtcttgatttacctccgactgatgatccaatgcttcttgcgtacctcttggacccgtcaaacacgacgcccgaaggcgtagcccgtcgttacggcggcgagtggaccgaagatgcagcgaaacgcgcgttattggccgaacgtttgcacgccaatttattaggacgtttgcaaggcgaggaacgtctcctctggctttacgaagaagtggagaaaccattgagtcgcgtgctcgcgcatatggaagctaccggtgtcaaattagacgtggcgtatttggagaatctcagccttgaagttgctgcccacatgcgccgcttggaggaagaagtattccgtttagcaggccgttcctttcgccttaattctcgcgatcagttagaacgtgtgttgttcgatgaacttggtctccctcctatcggcaggacagagaagaccggtaaacgtagcacttcagcggcggttttagaagctcttcgcgaagtccatcccattgtggacaagatcttgcaataccgcgaactcgcgaaattgaaaggcacctatattgaccgtcttccggcattagtccacccgaaaacgggacgcctccatacccgcttcaaccaaacagccacggcgaccggtcgtttgtcctcctctgatccaaaccttcagaatattccagtacgtaccccattgggccagaagatccgccgtgcgtttgtagctgaggagggttggcgtttagtggccctcgattatagccaaattgaattacgtgtccttgcccatctttctggcgatgagaacctcatccgcgtgtttcaggaaggcaaagacattcacactcaaacggcaagctggatgtttggattatcagctgaagcgatcgatcctttgatgcgtcgtgcagcgaagaccatcaatttcggtgttctctacggtatgagtgcctttcgtttgtcgcaggaattaggcattccctatgaagaagctcaggcgttcattcagaaatactttcaaagctatcccaaagttaaagcatggatcgagaagactctcgaagaaggccgcacacgtggttacgtagagaccttatttggacgtcgccgctatgttcccgatttaaacgctcgcgtgaaaggcaagcgtgaagccgccgaacgcatggcgttcaacatgcctgtacagggcacggcagctgacctcatgaaacttgcaatggtgcgcctttttccacaattgcgtgaagttggtgcccgcatgctcttgcaggtccacgatgaactcttgttagaagcgccaaaagagcgtgcggaagaggtggcagccctcgcgaaagaagttatggaaggcgtgtggcccttagcggtgcctcttgaagtcgaagttggtattggcgaggattggctggctgccaaagga

SEQ ID NO: 3474 - protein, 841 aa, synthetic construct
  REGION 1..841: note = Variant of DNA polymerase I from Thermus sp. strain 2.9
MHHHHHHGGSGVLPVFEPKGRVLLVDGHHLAYRNFFALKGLTTSSGEPVQGVYGFAKSLLKALKEDGDVVIVVFDAKAPSFRHEAYEAYKAGRAPTPEDFPRQLALMKELVDLLGLERLEVPGFEADDVLATLAKKAEREGYEVQILTADRDLFQLLSPRISVLHPEGHRITPEWLWEKYGLRPEQWVDFRALAGDPSDNIPGVKGIGEKTALKLLKEWGSLENLLKNLDQVKPESVREKILAHLEDLKLSRELSRVRTDLPLEVDFQRRREPDWEGLKAFLERLEFGSLLHEFGLLESPLPAEEAPWPPPEGAFLGYRLSRPEPMWAELLALAASAQGRVYRAEDPHGALRGLFEVRGLLAKDLAVVALREGLDLPPTDDPMLLAYLLDPSNTTPEGVARRYGGEWTEDAAKRALLAERLHANLLGRLQGEERLLWLYEEVEKPLSRVLAHMEATGVKLDVAYLENLSLEVAAHMRRLEEEVFRLAGRSFRLNSRDQLERVLFDELGLPPIGRTEKTGKRSTSAAVLEALREVHPIVDKILQYRELAKLKGTYIDRLPALVHPKTGRLHTRFNQTATATGRLSSSDPNLQNIPVRTPLGQKIRRAFVAEEGWRLVALDYSQIELRVLAHLSGDENLIRVFQEGKDIHTQTASWMFGLSAEAIDPLMRRAAKTINFGVLYGMSAFRLSQELGIPYEEAQAFIQKYFQSYPKVKAWIEKTLEEGRTRGYVETLFGRRRYVPDLNARVKGKREAAERMAFNMPVQGTAADLMKLAMVRLFPQLREVGARMLLQVHDELLLEAPKERAEEVAALAKEVMEGVWPLAVPLEVEVGIGEDWLAAKG

SEQ ID NO: 3475 - DNA, 2523 bp, synthetic construct
  misc_feature 1..2523: note = Variant of DNA polymerase I from Thermus sp. strain 2.9
  source 1..2523: mol_type = other DNA
atgcaccatcatcatcatcatggcggtagcggcgtgttaccggtgttcgagcctaaaggtcgcgtgcttctggttgatggccatcatctcgcgtatcgtaacttctttgccctgaaaggattaaccaccagcagcggcgagccggtacagggtgtctacggctttgcaaagtcgctcctgaaagctctgaaagaagacggtgatgtggtgattgttgtctttgatgcgaaagcgccaagttttcgccacgaagcgtacgaagcttacaaagccgggcgtgctccaacgccggaagactttcctcgccaattggcgcttatgaaggaattagtggatttgcttggcctcgaacgcttggaagttcccggtttcgaggcagacgacgtattagcgactctcgcaaagaaagccgaacgtgagggctatgaagtccagatcttgacagcagatcgcgatcttttccagcttttatctccgcgcatctcggtgttacacccggaagggcatcgtatcaccccggaatggctctgggagaaatatggtttgcgtcccgaacaatgggtggattttcgcgccttagcaggcgatccgagcgacaatattccgggagttaaaggtatcggcgagaagacggcgctcaagctccttaaagaatgggggtcgttggagaacttgcttaagaatttagatcaggtcaaaccagagtcagtgcgtgagaagattcttgctcacctcgaagacctcaaattaagccgcgaattgtcccgtgtacgcaccgatttgccgctcgaagttgatttccaacgccgccgcgaacctgactgggagggtcttaaagcgtttttagagcgtcttgaatttggttcgctcttgcatgaattcggccttttagaaagcccgttaccagccgaagaagcaccttggccaccgcccgagggcgcgtttttaggttaccgtttgagtcgcccggaaccgatgtgggccgaattactggctcttgcagcgtctgcccagggacgtgtgtatcgcgcggaagaccctcatggtgcgctccgcggcctcttcgaagtccgtggactccttgccaaagacttagctgttgttgcattgcgcgaaggtcttgatttacctccgactgatgatccaatgcttcttgcgtacctcttggacccgtcaaacacgacgcccgaaggcgtagcccgtcgttacggcggcgagtggaccgaagatgcagcgaaacgcgcgttattggccgaacgtttgcacgccaatttagggggacgtttgcaaggcgaggaacgtctcctctggctttacgaagaagtggagaaaccattgagtcgcgtgctcgcgcatatggaagctaccggtgtcaaattagacgtggcgtatttggagaatctcagccttgaagttgctgcccacatgcgccgcttggaggaagaagtattccgtttagcaggccgttcctttcgccttaattctcgcgatcagttagaacgtgtgttgttcgatgaacttggtctccctcctatcggcaagacagagaagaccggtaaacgtagcacttcagcggcggttttagaagctcttcgcgaagtccatcccattgtggacaagatcttgcaataccgcgaactcgcgaaattgaaaggcacctatattgaccgtcttccggcattagtccacccgaaaacgggacgcctccatacccgcttcaaccaaacagccacggcgaccggtcgtttgtcctcctctgatccaaaccttcagaatattccagtacgtaccccattgggccagaagatccgccgtgcgtttgtagctgaggagggttggcgtttagtggccctcgattatagccaaattgaattacgtgtccttgcccatctttctggcgatgagaacctcatccgcgtgtttcaggaaggcaaagacattcacactcaaacggcaagctggatgtttggattatcagctgaagcgatcgatcctttgatgcgtcgtgcagcgaagaccatcaatttcggtgttctctacggtatgagtgcctttcgtttgtcgcaggaattaggcattccctatgaagaagctcaggcgttcattcagaaatactttcaaagctatcccaaagttaaagcatggatcgagaagactctcgaagaaggccgcacacgtggttacgtagagaccttatttggacgtcgccgctatgttcccgatttaaacgctcgcgtgaaaggcaagcgtgaagccgccgaacgcatggcgttcaacatgcctgtacagggcacggcagctgacctcatgaaacttgcaatggtgcgcctttttccacaattgcgtgaagttggtgcccgcatgctcttgcaggtccacgatgaactcttgttagaagcgccaaaagagcgtgcggaagaggtggcagccctcgcgaaagaagttatggaaggcgtgtggcccttagcggtgcctcttgaagtcgaagttggtattggcgaggattggctggctgccaaagga

SEQ ID NO: 3476 - protein, 841 aa, synthetic construct
  REGION 1..841: note = Variant of DNA polymerase I from Thermus sp. strain 2.9
MHHHHHHGGSGVLPVFEPKGRVLLVDGHHLAYRNFFALKGLTTSSGEPVQGVYGFAKSLLKALKEDGDVVIVVFDAKAPSFRHEAYEAYKAGRAPTPEDFPRQLALMKELVDLLGLERLEVPGFEADDVLATLAKKAEREGYEVQILTADRDLFQLLSPRISVLHPEGHRITPEWLWEKYGLRPEQWVDFRALAGDPSDNIPGVKGIGEKTALKLLKEWGSLENLLKNLDQVKPESVREKILAHLEDLKLSRELSRVRTDLPLEVDFQRRREPDWEGLKAFLERLEFGSLLHEFGLLESPLPAEEAPWPPPEGAFLGYRLSRPEPMWAELLALAASAQGRVYRAEDPHGALRGLFEVRGLLAKDLAVVALREGLDLPPTDDPMLLAYLLDPSNTTPEGVARRYGGEWTEDAAKRALLAERLHANLGGRLQGEERLLWLYEEVEKPLSRVLAHMEATGVKLDVAYLENLSLEVAAHMRRLEEEVFRLAGRSFRLNSRDQLERVLFDELGLPPIGKTEKTGKRSTSAAVLEALREVHPIVDKILQYRELAKLKGTYIDRLPALVHPKTGRLHTRFNQTATATGRLSSSDPNLQNIPVRTPLGQKIRRAFVAEEGWRLVALDYSQIELRVLAHLSGDENLIRVFQEGKDIHTQTASWMFGLSAEAIDPLMRRAAKTINFGVLYGMSAFRLSQELGIPYEEAQAFIQKYFQSYPKVKAWIEKTLEEGRTRGYVETLFGRRRYVPDLNARVKGKREAAERMAFNMPVQGTAADLMKLAMVRLFPQLREVGARMLLQVHDELLLEAPKERAEEVAALAKEVMEGVWPLAVPLEVEVGIGEDWLAAKG

SEQ ID NO: 3477 - DNA, 2523 bp, synthetic construct
  misc_feature 1..2523: note = Variant of DNA polymerase I from Thermus sp. strain 2.9
  source 1..2523: mol_type = other DNA
atgcaccatcatcatcatcatggcggtagcggcgtgttaccggtgttcgagcctaaaggtcgcgtgcttctggttgatggccatcatctcgcgtatcgtaacttctttgccctgaaaggattaaccaccagcagcggcgagccggtacagggtgtctacggctttgcaaagtcgctcctgaaagctctgaaagaagacggtgatgtggtgattgttgtctttgatgcgatggcgccaagttttcgccacgaagcgtacgaagcttacaaagccgggcgtgctccaacgccggaagactttcctcgccaattggcgcttatgaaggaattagtggatttgcttggcctcgaacgcttggaagttcccggtttcgaggcagacgacgtattagcgactctcgcaaagaaagccgaacgtgagggctatgaagtccagatcttgacagcagatcgcgatcttttccagcttttatctccgcgcatctcggtgttacacccggaagggcatcgtatcaccccggaatggctctgggagaaatatggtttgcgtcccgaacaatgggtggattttcgcgccttagcaggcgatccgagcgacaatattccgggagttaaaggtatcggcgagaagacggcgctcaagctccttaaagaatgggggtcgttggagaacttgcttaagaatttagatcaggtcaaaccagagtcagtgcgtgagaagattcttgctcacctcgaagacctcaaattaagccgcgaattgtcccgtgtacgcaccgatttgccgctcgaagttgatttccaacgccgccgcgaacctgactgggagggtcttaaagcgtttttagagcgtcttgaatttggttcgctcttgcatgaattcggccttttagaaagcccgttaccagccgaagaagcaccttggccaccgcccgagggcgcgtttttaggttaccgtttgagtcgcccggaaccgatgtgggccgaattactggctcttgcagcgtctgcccagggacgtgtgtatcgcgcggaagaccctcatggtgcgctccgcggcctcttcgaagtccgtggactccttgccaaagacttagctgttgttgcattgcgcgaaggtcttgatttacctccgactgatgatccaatgcttcttgcgtacctcttggacccgtcaaacacgacgcccgaaggcgtagcccgtcgttacggcggcgagtggaccgaagatgcagcgaaacgcgcgttattggccgaacgtttgcacgccaatttattaggacgtttgcaaggcgaggaacgtctcctctggctttacgaagaagtggagaaaccattgagtcgcgtgctcgcgcatatggaagctaccggtgtcaaattagacgtggcgtatttggagaatctcagccttgaagttgctgcccacatgcgccgcttggaggaagaagtattccgtttagcaggccgttcctttcgccttaattctcgcgatcagttagaacgtgtgttgttcgatgaacttggtctccctcctatcggcaagacagagaagaccggtaaacgtagcacttcagcggcggttttagaagctcttcgcgaagtccatcccattgtggacaagatcttgcaataccgcgaactcgcgaaattgaaaggcacctatattgaccgtcttccggcattagtccacccgaaaacgggacgcctccatacccgcttcaaccaaacagccacggcgaccggtcgtttgtcctcctctgatccaaaccttcagaatattccagtacgtaccccattgggccagaagatccgccgtgcgtttgtagctgaggagggttggcgtttagtggccctcgattatagccaaattgaattacgtgtccttgcccatctttctggcgatgagaacctcatccgcgtgtttcaggaaggcaaagacattcacactcaaacggcaagctggatgtttggattatcagctgaagcgatcgatcctttgatgcgtcgtgcagcgaagaccatcaatttcggtgttctctacggtatgagtgcctttcgtttgtcgcaggaattaggcattccctatgaagaagctcaggcgttcattcagaaatactttcaaagctatcccaaagttaaagcatggatcgagaagactctcgaagaaggccgcacacgtggttacgtagagaccttatttggacgtcgccgctatgttcccgatttaaacgctcgcgtgaaaggcaagcgtgaagccgccgaacgcatggcgttcaacatgcctgtacagggcacggcagctgacctcatgaaacttgcaatggtgcgcctttttccacaattgcgtgaagttggtgcccgcatgctcttgcaggtccacgatgaactcttgttagaagcgccaaaagagcgtgcggaagaggtggcagccctcgcgaaagaagttatggaaggcgtgtggcccttagcggtgcctcttgaagtcgaagttggtattggcgaggattggctggctgccaaagga

SEQ ID NO: 3478 - protein, 841 aa, synthetic construct
  REGION 1..841: note = Variant of DNA polymerase I from Thermus sp. strain 2.9
MHHHHHHGGSGVLPVFEPKGRVLLVDGHHLAYRNFFALKGLTTSSGEPVQGVYGFAKSLLKALKEDGDVVIVVFDAMAPSFRHEAYEAYKAGRAPTPEDFPRQLALMKELVDLLGLERLEVPGFEADDVLATLAKKAEREGYEVQILTADRDLFQLLSPRISVLHPEGHRITPEWLWEKYGLRPEQWVDFRALAGDPSDNIPGVKGIGEKTALKLLKEWGSLENLLKNLDQVKPESVREKILAHLEDLKLSRELSRVRTDLPLEVDFQRRREPDWEGLKAFLERLEFGSLLHEFGLLESPLPAEEAPWPPPEGAFLGYRLSRPEPMWAELLALAASAQGRVYRAEDPHGALRGLFEVRGLLAKDLAVVALREGLDLPPTDDPMLLAYLLDPSNTTPEGVARRYGGEWTEDAAKRALLAERLHANLLGRLQGEERLLWLYEEVEKPLSRVLAHMEATGVKLDVAYLENLSLEVAAHMRRLEEEVFRLAGRSFRLNSRDQLERVLFDELGLPPIGKTEKTGKRSTSAAVLEALREVHPIVDKILQYRELAKLKGTYIDRLPALVHPKTGRLHTRFNQTATATGRLSSSDPNLQNIPVRTPLGQKIRRAFVAEEGWRLVALDYSQIELRVLAHLSGDENLIRVFQEGKDIHTQTASWMFGLSAEAIDPLMRRAAKTINFGVLYGMSAFRLSQELGIPYEEAQAFIQKYFQSYPKVKAWIEKTLEEGRTRGYVETLFGRRRYVPDLNARVKGKREAAERMAFNMPVQGTAADLMKLAMVRLFPQLREVGARMLLQVHDELLLEAPKERAEEVAALAKEVMEGVWPLAVPLEVEVGIGEDWLAAKG

SEQ ID NO: 3479 - DNA, 2523 bp, synthetic construct
  misc_feature 1..2523: note = Variant of DNA polymerase I from Thermus sp. strain 2.9
  source 1..2523: mol_type = other DNA
atgcaccatcatcatcatcatggcggtagcggcgtgttaccggtgttcgagcctaaaggtcgcgtgcttctggttgatggccatcatctcgcgtatcgtaacttctttgccctgaaaggattaaccaccagcagcggcgagccggtacagggtgtctacggctttgcaaagtcgctcctgaaagctctgaaagaagacggtgatgtggtgattgttgtctttgatgcgaaagcgccaagttttcgccacgaagcgtacgaagcttacaaagccgggcgtgctccaacgccggaagactttcctcgccaattggcgcttatgaaggaattagtggatttgcttggcctcgaacgcttggaagttcccggtttcgaggcagacgacgtattagcgactctcgcaaagaaagccgaacgtgagggctatgaagtccagatcttgacagcagatcgcgatcttttccagcttttatctccgcgcatctcggtgttacacccggaagggcatcgtatcaccccggaatggctctgggagaaatatggtttgcgtcccgaacaatgggtggattttcgcgccttagcaggcgatccgagcgacaatattccgggagttaaaggtatcggcgagaagacggcgctcaagctccttaaagaatgggggtcgttggagaacttgcttaagaatttagatcaggtcaaaccagagtcagtgcgtgagaagattcttgctcacctcgaagacctcaaattaagccgcgaattgtcccgtgtacgcaccgatttgccgctcgaagttgatttccaacgccgccgcgaacctgactgggagggtcttaaagcgtttttagagcgtcttgaatttggttcgctcttgcatgaattcggccttttagaaagcccgttaccagccgaagaagcaccttggccaccgcccgagggcgcgtttttaggttaccgtttgagtcgcccggaaccgatgtgggccgaattactggctcttgcagcgtctgcccagggacgtgtgtatcgcgcggaagaccctcatggtgcgctccgcggcctcttcgaagtccgtggactccttgccaaagacttagctgttgttgcattgcgcgaaggtcttgatttacctccgactgatgatccaatgcttcttgcgtacctcttggacccgtcaaacacgacgcccgaaggcgtagcccgtcgttacggcggcgagtggaccgaagatgcagcgaaacgcgcgttattggccgaacgtttgcacgccaatttattaggacgtttgcaaggcgaggaacgtctcctctggctttacgaagaagtggagaaaccattgagtcgcgtgctcgcgcatatggaagctaccggtgtcaaattagacgtggcgtatttggagaatctcagccttgaagttgctgcccacatgcgccgcttggaggaagaagtattccgtttagcaggccgttcctttcgccttaattctcgcgatcagttagaacgtgtgttgttcgatgaacttggtctccctcctatcggcaagacagagactaccggtaaacgtagcacttcagcggcggttttagaagctcttcgcgaagtccatcccattgtggacaagatcttgcaataccgcgaactcgcgaaattgaaaggcacctatattgaccgtcttccggcattagtccacccgaaaacgggacgcctccatacccgcttcaaccaaacagccacggcgaccggtcgtttgtcctcctctgatccaaaccttcagaatattccagtacgtaccccattgggccagaagatccgccgtgcgtttgtagctgaggagggttggcgtttagtggccctcgattatagccaaattgaattacgtgtccttgcccatctttctggcgatgagaacctcatccgcgtgtttcaggaaggcaaagacattcacactcaaacggcaagctggatgtttggattatcagctgaagcgatcgatcctttgatgcgtcgtgcagcgaagaccatcaatttcggtgttctctacggtatgagtgcctttcgtttgtcgcaggaattaggcattccctatgaagaagctcaggcgttcattcagaaatactttcaaagctatcccaaagttaaagcatggatcgagaagactctcgaagaaggccgcacacgtggttacgtagagaccttatttggacgtcgccgctatgttcccgatttaaacgctcgcgtgaaaggcaagcgtgaagccgccgaacgcatggcgttcaacatgcctgtacagggcacggcagctgacctcatgaaacttgcaatggtgcgcctttttccacaattgcgtgaagttggtgcccgcatgctcttgcaggtccacgatgaactcttgttagaagcgccaaaagagcgtgcggaagaggtggcagccctcgcgaaagaagttatggaaggcgtgtggcccttagcggtgcctcttgaagtcgaagttggtattggcgaggattggctggctgccaaagga

SEQ ID NO: 3480 - protein, 841 aa, synthetic construct
  REGION 1..841: note = Variant of DNA polymerase I from Thermus sp. strain 2.9
MHHHHHHGGSGVLPVFEPKGRVLLVDGHHLAYRNFFALKGLTTSSGEPVQGVYGFAKSLLKALKEDGDVVIVVFDAKAPSFRHEAYEAYKAGRAPTPEDFPRQLALMKELVDLLGLERLEVPGFEADDVLATLAKKAEREGYEVQILTADRDLFQLLSPRISVLHPEGHRITPEWLWEKYGLRPEQWVDFRALAGDPSDNIPGVKGIGEKTALKLLKEWGSLENLLKNLDQVKPESVREKILAHLEDLKLSRELSRVRTDLPLEVDFQRRREPDWEGLKAFLERLEFGSLLHEFGLLESPLPAEEAPWPPPEGAFLGYRLSRPEPMWAELLALAASAQGRVYRAEDPHGALRGLFEVRGLLAKDLAVVALREGLDLPPTDDPMLLAYLLDPSNTTPEGVARRYGGEWTEDAAKRALLAERLHANLLGRLQGEERLLWLYEEVEKPLSRVLAHMEATGVKLDVAYLENLSLEVAAHMRRLEEEVFRLAGRSFRLNSRDQLERVLFDELGLPPIGKTETTGKRSTSAAVLEALREVHPIVDKILQYRELAKLKGTYIDRLPALVHPKTGRLHTRFNQTATATGRLSSSDPNLQNIPVRTPLGQKIRRAFVAEEGWRLVALDYSQIELRVLAHLSGDENLIRVFQEGKDIHTQTASWMFGLSAEAIDPLMRRAAKTINFGVLYGMSAFRLSQELGIPYEEAQAFIQKYFQSYPKVKAWIEKTLEEGRTRGYVETLFGRRRYVPDLNARVKGKREAAERMAFNMPVQGTAADLMKLAMVRLFPQLREVGARMLLQVHDELLLEAPKERAEEVAALAKEVMEGVWPLAVPLEVEVGIGEDWLAAKG

SEQ ID NO: 3481 - DNA, 2523 bp, synthetic construct
  misc_feature 1..2523: note = Variant of DNA polymerase I from Thermus sp. strain 2.9
  source 1..2523: mol_type = other DNA
atgcaccatcatcatcatcatggcggtagcggcgtgttaccggtgttcgagcctaaaggtcgcgtgcttctggttgatggccatcatctcgcgtatcgtaacttctttgccctgaaaggattaaccaccagcagcggcgagccggtacagggtgtctacggctttgcaaagtcgctcctgaaagctctgaaagaagacggtgatgtggtgattgttgtctttgatgcgaaagcgccaagttttcgccacgaagcgtacgaagcttacaaagccgggcgtgctccaacgccggaagactttcctcgccaattggcgcttatgaaggaattagtggatttgcttggcctcgaacgcttggaagttcccggtttcgaggcagacgacgtattagcgactctcgcaaagaaagccgaacgtgagggctatgaagtccagatcttgacagcagatcgcgatcttttccagcttttatctccgcgcatctcggtgttacacccggaagggcatcgtatcaccccggaatggctctgggagaaatatggtttgcgtcccgaacaatgggtggattttcgcgccttagcaggcgatccgagcgacaatattccgggagttaaaggtatcggcgagaagacggcgctcaagctccttaaagaatgggggtcgttggagaacttgcttaagaatttagatcaggtcaaaccagagtcagtgcgtgagaagattcttgctcacctcgaagacctcaaattaagccgcgaattgtcccgtgtacgcaccgatttgccgctcgaagttgatttccaacgccgccgcgaacctgactgggagggtcttaaagcgtttttagagcgtcttgaatttggttcgctcttgcatgaattcggccttttagaaagcccgttaccagccgaagaagcaccttggccaccgcccgagggcgcgtttttaggttaccgtttgagtcgcccggaaccgatgtgggccgaattactggctcttgcagcgtctgcccagggacgtgtgtatcgcgcggaagaccctcatggtgcgctccgcggcctcttcgaagtccgtggactccttgccaaagacttagctgttgttgcattgcgcgaaggtcttgatttacctccgactgatgatccaatgcttcttgcgtacctcttggacccgtcaaacacgacgcccgaaggcgtagcccgtcgttacggcggcgagtggaccgaagatgcagcgaaacgcgcgttattggccgaacgtttgcacgccaatttattaggacgtttgcaaggcgaggaacgtctcctctggctttacgaagaagtggagaaaccattgagtcgcgtgctcgcgcatatggaagctaccggtgtcaaattagacgtggcgtatttggagaatctcagccttgaagttgctgcccacatgcgccgcttggaggaagaagtattccgtttagcaggccgttcctttcgccttaattctcgcgatcagttagaacgtgtgttgttcgatgaacttggtctccctcctatcggcaagacagagaagaccggtaaacgtagcacttcagcggcggttttagaagctcttcgcgaagtccatcccattgtggacaagatcttgcaataccgcgaactcgcgaaattgaaaggcacctatattgaccgtcttccggcattagtccacccgaaaacgggacgcctccatacccgcttcaaccaaacagccacggcgaccggtcgtttgtcctcctctgatccaaaccttcagaatattccagtacgtaccccattgggccagaagatccgccgtgcgtttgtagctgaggagggttggcgtttagtggccctcgattatagccaaattgaattacgtgtccttgcccatctttctggcgatgagaacctcatccgcgtgtttcaggaaggcaaagacattcacactcaaacggcaagctggatgtttggattatcagctgaagcgatcgatcctttgatgcgtcgtgcagcgaagaccatcaatttcggtgttctctacggtatgagtgcctttcgtttgtcgcaggaattaggcattccctatgaagaagctcaggcgttcattcagaaatactttcaaagctatcccaaagttaaagcatggatcgagaagactctcgaagaaggccgcacacgtggttacgtagagaccttatttggacgtcgccgctatgttcccgatttaaacgctcgcgtgaaaggcaagcgtgaagccgccgaacgcatggcgttcaacatgcctgtacagggcacggcagctgacctcatgaaacttgcaatggtgcgcctttttccacaattgcgtgaagttggtgcccgcatgctcttgcaggtccacgatgaactcttgttagaagcgccaaaagagcgtgcggaagaggtggcagatctcgcgaaagaagttatggaaggcgtgtggcccttagcggtgcctcttgaagtcgaagttggtattggcgaggattggctggctgccaaagga

SEQ ID NO: 3482 - protein, 841 aa, synthetic construct
  REGION 1..841: note = Variant of DNA polymerase I from Thermus sp. strain 2.9
MHHHHHHGGSGVLPVFEPKGRVLLVDGHHLAYRNFFALKGLTTSSGEPVQGVYGFAKSLLKALKEDGDVVIVVFDAKAPSFRHEAYEAYKAGRAPTPEDFPRQLALMKELVDLLGLERLEVPGFEADDVLATLAKKAEREGYEVQILTADRDLFQLLSPRISVLHPEGHRITPEWLWEKYGLRPEQWVDFRALAGDPSDNIPGVKGIGEKTALKLLKEWGSLENLLKNLDQVKPESVREKILAHLEDLKLSRELSRVRTDLPLEVDFQRRREPDWEGLKAFLERLEFGSLLHEFGLLESPLPAEEAPWPPPEGAFLGYRLSRPEPMWAELLALAASAQGRVYRAEDPHGALRGLFEVRGLLAKDLAVVALREGLDLPPTDDPMLLAYLLDPSNTTPEGVARRYGGEWTEDAAKRALLAERLHANLLGRLQGEERLLWLYEEVEKPLSRVLAHMEATGVKLDVAYLENLSLEVAAHMRRLEEEVFRLAGRSFRLNSRDQLERVLFDELGLPPIGKTEKTGKRSTSAAVLEALREVHPIVDKILQYRELAKLKGTYIDRLPALVHPKTGRLHTRFNQTATATGRLSSSDPNLQNIPVRTPLGQKIRRAFVAEEGWRLVALDYSQIELRVLAHLSGDENLIRVFQEGKDIHTQTASWMFGLSAEAIDPLMRRAAKTINFGVLYGMSAFRLSQELGIPYEEAQAFIQKYFQSYPKVKAWIEKTLEEGRTRGYVETLFGRRRYVPDLNARVKGKREAAERMAFNMPVQGTAADLMKLAMVRLFPQLREVGARMLLQVHDELLLEAPKERAEEVADLAKEVMEGVWPLAVPLEVEVGIGEDWLAAKG

SEQ ID NO: 3483 - DNA, 2523 bp, synthetic construct
  misc_feature 1..2523: note = Variant of DNA polymerase I from Thermus sp. strain 2.9
  source 1..2523: mol_type = other DNA
atgcaccatcatcatcatcatggcggtagcggcgtgttaccggtgttcgagcctaaaggtcgcgtgcttctggttgatggccatcatctcgcgtatcgtaacttctttgccctgaaaggattaaccaccagcagcggcgagccggtacagggtgtctacggctttgcaaagtcgctcctgaaagctctgaaagaagacggtgatgtggtgattgttgtctttgatgcgaaagcgccaagttttcgccacgaagcgtacgaagcttacaaagccgggcgtgctccaacgccggaagactttcctcgccaattggcgcttatgaaggaattagtggatttgcttggcctcgaacgcttggaagttcccggtttcgaggcagacgacgtattagcgactctcgcaaagaaagccgaacgtgagggctatgaagtccagatcttgacagcagatcgcgatcttttccagcttttatctccgcgcatctcggtgttacacccggaagggcatcgtatcaccccggaatggctctgggagaaatatggtttgcgtcccgaacaatgggtggattttcgcgccttagcaggcgatccgagcgacaatattccgggagttaaaggtatcggcgagaagacggcgctcaagctccttaaagaatgggggtcgttggagaacttgcttaagaatttagatcaggtcaaaccagagtcagtgcgtgagaagattcttgctcacctcgaagacctcaaattaagccgcgaattgtcccgtgtacgcaccgatttgccgctcgaagttgatttccaacgccgccgcgaacctgactgggagggtcttaaagcgtttttagagcgtcttgaatttggttcgctcttgcatgaattcggccttttagaaagcccgttaccagccgaagaagcaccttggccaccgcccgagggcgcgtttttaggttaccgtttgagtcgcccggaaccgatgtgggccgaattactggctcttgcagcgtctgcccagggacgtgtgtatcgcgcggaagaccctcatggtgcgctccgcggcctcttcgaagtccgtggactccttgccaaagacttagctgttgttgcattgcgcgaaggtcttgatttacctccgactgatgatccaatgcttcttgcgtacctcttggacccgtcaaacacgacgcccgaaggcgtagcccgtcgttacggcggcgagtggaccgaagatgcagcgaaacgcgcgttattggccgaacgtttgcacgccaatttattaggacgtttgcaaggcgaggaacgtctcctctggctttacgaagaagtggagaaaccattgagtcgcgtgctcgcgcatatggaagctaccggtgtcaaattagacgtggcgtatttggagaatctcagccttgaagttgctgcccacatgcgccgcttggaggaagaagtattccgtttagcaggccgttcctttcgccttaattctcgcgatcagttagaacgtgtgttgttcgatgaacttggtctccctcctatcggcaagacagagaagaccggtaaacgtagcacttcagcggcggttttagaagctcttcgcgaagtccatcccattgtggacaagatcttgcaataccgcgaactcgcgaaattgaaaggcacctatattgaccgtcttccggcattagtccacccgaaaacgggacgcctccatacccgcttcaaccaaacagccacggcgaccggtcgtttgtcctcctctgatccaaaccttcagaatattccagtacgtaccccattgggccagaagatccgccgtgcgtttgtagctgaggagggttggcgtttagtggccctcgattatagccaaattgaattacgtgtccttgcccatctttctggcgatgagaacctcatccgcgtgtttcaggaaggcaaagacattcacactcaaacggcaagctggatgtttggattaggggctgaagcgatcgatcctttgatgcgtcgtgcagcgaagaccatcaatttcggtgttctctacggtatgagtgcctttcgtttgtcgcaggaattaggcattccctatgaagaagctcaggcgttcattcagaaatactttcaaagctatcccaaagttaaagcatggatcgagaagactctcgaagaaggccgcacacgtggttacgtagagaccttatttggacgtcgccgctatgttcccgatttaaacgctcgcgtgaaaggcaagcgtgaagccgccgaacgcatggcgttcaacatgcctgtacagggcacggcagctgacctcatgaaacttgcaatggtgcgcctttttccacaattgcgtgaagttggtgcccgcatgctcttgcaggtccacgatgaactcttgttagaagcgccaaaagagcgtgcggaagaggtggcagccctcgcgaaagaagttatggaaggcgtgtggcccttagcggtgcctcttgaagtcgaagttggtattggcgaggattggctggctgccaaagga

SEQ ID NO: 3484 - protein, 841 aa, synthetic construct; identical to SEQ ID NO: 3458
  REGION 1..841: note = Variant of DNA polymerase I from Thermus sp. strain 2.9

SEQ ID NO: 3485 - DNA, 2523 bp, synthetic construct
  misc_feature 1..2523: note = Variant of DNA polymerase I from Thermus sp. strain 2.9
  source 1..2523: mol_type = other DNA
atgcaccatcatcatcatcatggcggtagcggcgtgttaccggtgttcgagcctaaaggtcgcgtgcttctggttgatggccatcatctcgcgtatcgtaacttctttgccctgaaaggattaaccaccagcagcggcgagccggtacagggtgtctacggctttgcaaagtcgctcctgaaagctctgaaagaagacggtgatgtggtgattgttgtctttgatgcgaaagcgccaagttttcgccacgaagcgtacgaagcttacaaagccgggcgtgctccaacgccggaagactttcctcgccaattggcgcttatgaaggaattagtggatttgcttggcctcgaacgcttggaagttcccggtttcgaggcagacgacgtattagcgactctcgcaaagaaagccgaacgtgagggctatgaagtccagatcttgacagcagatcgcgatcttttccagcttttatctccgcgcatctcggtgttacacccggaagggcatcgtatcaccccggaatggctctgggagaaatatggtttgcgtcccgaacaatgggtggattttcgcgccttagcaggcgatccgagcgacaatattccgggagttaaaggtatcggcgagaagacggcgctcaagctccttaaagaatgggggtcgttggagaacttgcttaagaatttagatcaggtcaaaccagagtcagtgcgtgagaagattcttgctcacctcgaagacctcaaattaagccgcgaattgtcccgtgtacgcaccgatttgccgctcgaagttgatttccaacgccgccgcgaacctgactgggagggtcttaaagcgtttttagagcgtcttgaatttggttcgctcttgcatgaattcggccttttagaaagcccgttaccagccgaagaagcaccttggccaccgcccgagggcgcgtttttaggttaccgtttgagtcgcccggaaccgatgtgggccgaattactggctcttgcagcgtctgcccagggacgtgtgtatcgcgcggaagaccctcatggtgcgctccgcggcctcttcgaagtccgtggactccttgccaaagacttagctgttgttgcattgcgcgaaggtcttgatttacctccgactgatgatccaatgcttcttgcgtacctcttggacccgtcaaacacgacgcccgaaggcgtagcccgtcgttacggcggcgagtggaccgaagatgcagcgaaacgcgcgttattggccgaacgtttgcacgccaatttattaggacgtttgcaaggcgaggaacgtctcctctggctttacgaagaagtggagaaaccattgagtcgcgtgctcgcgcatatggaagctaccggtgtcaaattagacgtggcgtatttggagaatctcagccttgaagttgctgcccacatgcgccgcttggaggaagaagtattccgtttagcaggccgttcctttcgccttaattctcgcgatcagttagaacgtgtgttgttcgatgaacttggtctccctcctatcggcaagacagagaagaccggtaaacgtagcacttcagcggcggttttagaagctcttcgcgaagtccatcccattgtggacaagatcttgcaataccgcgaactcgcgaaattgaaaggcacctatattgaccgtcttccggcattagtccacccgaaaacgggacgcctccatacccgcttcaaccaaacagccacggcgaccggtcgtttgtcctcctctgatccaaaccttcagaatattccagtacgtaccccattgggccagaagatccgccgtgcgtttgtagctgaggagggttggcgtttagtggccctcgattatagccaaattgaattacgtgtccttgcccatctttctggcgatgagaacctcatccgcgtgtttcaggaaggcaaagacattcacactcaaacggcaagctggatgtttggattatcagctgaagcgatcgatcctttgatgcgtcgtgcagcgaagaccatcaatttcggtgttctctacggtatgagtgcctttcgtttgtcgcaggaattaggcattccctatgaagaagctcaggcgttcattcagaaatactttcaaagctatcccaaagttaaagcatggatcgagaagactctcgaagaaggccgcacacgtggttacgtagagaccttatttggacgtcgccgctatgttcccgatttaaacgctcgcgtgaaaggcaagcgtgaagccgccgaacgcatggcgttcaacatgcctgtacagggcacggcagctgacctcatgaaacttgcaatggtgcgcctttttccacaattgcgtgaagttggtgcccgcatgctcttgcaggtccacgatgaactcttgttagaagcgacgaaagagcgtgcggaagaggtggcagccctcgcgaaagaagttatggaaggcgtgtggcccttagcggtgcctcttgaagtcgaagttggtattggcgaggattggctggctgccaaagga

SEQ ID NO: 3486 - protein, 841 aa, synthetic construct
  REGION 1..841: note = Variant of DNA polymerase I from Thermus sp. strain 2.9
MHHHHHHGGSGVLPVFEPKGRVLLVDGHHLAYRNFFALKGLTTSSGEPVQGVYGFAKSLLKALKEDGDVVIVVFDAKAPSFRHEAYEAYKAGRAPTPEDFPRQLALMKELVDLLGLERLEVPGFEADDVLATLAKKAEREGYEVQILTADRDLFQLLSPRISVLHPEGHRITPEWLWEKYGLRPEQWVDFRALAGDPSDNIPGVKGIGEKTALKLLKEWGSLENLLKNLDQVKPESVREKILAHLEDLKLSRELSRVRTDLPLEVDFQRRREPDWEGLKAFLERLEFGSLLHEFGLLESPLPAEEAPWPPPEGAFLGYRLSRPEPMWAELLALAASAQGRVYRAEDPHGALRGLFEVRGLLAKDLAVVALREGLDLPPTDDPMLLAYLLDPSNTTPEGVARRYGGEWTEDAAKRALLAERLHANLLGRLQGEERLLWLYEEVEKPLSRVLAHMEATGVKLDVAYLENLSLEVAAHMRRLEEEVFRLAGRSFRLNSRDQLERVLFDELGLPPIGKTEKTGKRSTSAAVLEALREVHPIVDKILQYRELAKLKGTYIDRLPALVHPKTGRLHTRFNQTATATGRLSSSDPNLQNIPVRTPLGQKIRRAFVAEEGWRLVALDYSQIELRVLAHLSGDENLIRVFQEGKDIHTQTASWMFGLSAEAIDPLMRRAAKTINFGVLYGMSAFRLSQELGIPYEEAQAFIQKYFQSYPKVKAWIEKTLEEGRTRGYVETLFGRRRYVPDLNARVKGKREAAERMAFNMPVQGTAADLMKLAMVRLFPQLREVGARMLLQVHDELLLEATKERAEEVAALAKEVMEGVWPLAVPLEVEVGIGEDWLAAKG

SEQ ID NO: 3487 - DNA, 2523 bp, synthetic construct
  misc_feature 1..2523: note = Variant of DNA polymerase I from Thermus sp. strain 2.9
  source 1..2523: mol_type = other DNA
atgcaccatcatcatcatcatggcggtagcggcgtgttaccggtgttcgagcctaaaggtcgcgtgcttctggttgatggccatcatctcgcgtatcgtaacttctttgccctgaaaggattaaccaccagcagcggcgagccggtacagggtgtctacggctttgcaaagtcgctcctgaaagctctgaaagaagacggtgatgtggtgattgttgtctttgatgcgaaagcgccaagttttcgccacgaagcgtacgaagcttacaaagccgggcgtgctccaacgccggaaagttttcctcgccaattggcgcttatgaaggaattagtggatttgcttggcctcgaacgcttggaagttcccggtttcgaggcagacgacgtattagcgactctcgcaaagaaagccgaacgtgagggctatgaagtccagatcttgacagcagatcgcgatcttttccagcttttatctccgcgcatctcggtgttacacccggaagggcatcgtatcaccccggaatggctctgggagaaatatggtttgcgtcccgaacaatgggtggattttcgcgccttagcaggcgatccgagcgacaatattccgggagttaaaggtatcggcgagaagacggcgctcaagctccttaaagaatgggggtcgttggagaacttgcttaagaatttagatcaggtcaaaccagagtcagtgcgtgagaagattcttgctcacctcgaagacctcaaattaagccgcgaattgtcccgtgtacgcaccgatttgccgctcgaagttgatttccaacgccgccgcgaacctgactgggagggtcttaaagcgtttttagagcgtcttgaatttggttcgctcttgcatgaattcggccttttagaaagcccgttaccagccgaagaagcaccttggccaccgcccgagggcgcgtttttaggttaccgtttgagtcgcccggaaccgatgtgggccgaattactggctcttgcagcgtctgcccagggacgtgtgtatcgcgcggaagaccctcatggtgcgctccgcggcctcttcgaagtccgtggactccttgccaaagacttagctgttgttgcattgcgcgaaggtcttgatttacctccgactgatgatccaatgcttcttgcgtacctcttggacccgtcaaacacgacgcccgaaggcgtagcccgtcgttacggcggcgagtggaccgaagatgcagcgaaacgcgcgttattggccgaacgtttgcacgccaatttattaggacgtttgcaaggcgaggaacgtctcctctggctttacgaagaagtggagaaaccattgagtcgcgtgctcgcgcatatggaagctaccggtgtcaaattagacgtggcgtatttggagaatctcagccttgaagttgctgcccacatgcgccgcttggaggaagaagtattccgtttagcaggccgttcctttcgccttaattctcgcgatcagttagaacgtgtgttgttcgatgaacttggtctccctcctatcggcaagacagagaagaccggtaaacgtagcacttcagcggcggttttagaagctcttcgcgaagtccatcccattgtggacaagatcttgcaataccgcgaactcgcgaaattgaaaggcacctatattgaccgtcttccggcattagtccacccgaaaacgggacgcctccatacccgcttcaaccaaacagccacggcgaccggtcgtttgtcctcctctgatccaaaccttcagaatattccagtacgtaccccattgggccagaagatccgccgtgcgtttgtagctgaggagggttggcgtttagtggccctcgattatagccaaattgaattacgtgtccttgcccatctttctggcgatgagaacctcatccgcgtgtttcaggaaggcaaagacattcacactcaaacggcaagctggatgtttggattatcagctgaagcgatcgatcctttgatgcgtcgtgcagcgaagaccatcaatttcggtgttctctacggtatgagtgcctttcgtttgtcgcaggaattaggcattccctatgaagaagctcaggcgttcattcagaaatactttcaaagctatcccaaagttaaagcatggatcgagaagactctcgaagaaggccgcacacgtggttacgtagagaccttatttggacgtcgccgctatgttcccgatttaaacgctcgcgtgaaaggcaagcgtgaagccgccgaacgcatggcgttcaacatgcctgtacagggcacggcagctgacctcatgaaacttgcaatggtgcgcctttttccacaattgcgtgaagttggtgcccgcatgctcttgcaggtccacgatgaactcttgttagaagcgccaaaagagcgtgcggaagaggtggcagccctcgcgaaagaagttatggaaggcgtgtggcccttagcggtgcctcttgaagtcgaagttggtattggcgaggattggctggctgccaaagga

SEQ ID NO: 3488 - protein, 841 aa, synthetic construct
  REGION 1..841: note = Variant of DNA polymerase I from Thermus sp. strain 2.9
MHHHHHHGGSGVLPVFEPKGRVLLVDGHHLAYRNFFALKGLTTSSGEPVQGVYGFAKSLLKALKEDGDVVIVVFDAKAPSFRHEAYEAYKAGRAPTPESFPRQLALMKELVDLLGLERLEVPGFEADDVLATLAKKAEREGYEVQILTADRDLFQLLSPRISVLHPEGHRITPEWLWEKYGLRPEQWVDFRALAGDPSDNIPGVKGIGEKTALKLLKEWGSLENLLKNLDQVKPESVREKILAHLEDLKLSRELSRVRTDLPLEVDFQRRREPDWEGLKAFLERLEFGSLLHEFGLLESPLPAEEAPWPPPEGAFLGYRLSRPEPMWAELLALAASAQGRVYRAEDPHGALRGLFEVRGLLAKDLAVVALREGLDLPPTDDPMLLAYLLDPSNTTPEGVARRYGGEWTEDAAKRALLAERLHANLLGRLQGEERLLWLYEEVEKPLSRVLAHMEATGVKLDVAYLENLSLEVAAHMRRLEEEVFRLAGRSFRLNSRDQLERVLFDELGLPPIGKTEKTGKRSTSAAVLEALREVHPIVDKILQYRELAKLKGTYIDRLPALVHPKTGRLHTRFNQTATATGRLSSSDPNLQNIPVRTPLGQKIRRAFVAEEGWRLVALDYSQIELRVLAHLSGDENLIRVFQEGKDIHTQTASWMFGLSAEAIDPLMRRAAKTINFGVLYGMSAFRLSQELGIPYEEAQAFIQKYFQSYPKVKAWIEKTLEEGRTRGYVETLFGRRRYVPDLNARVKGKREAAERMAFNMPVQGTAADLMKLAMVRLFPQLREVGARMLLQVHDELLLEAPKERAEEVAALAKEVMEGVWPLAVPLEVEVGIGEDWLAAKG

SEQ ID NO: 3489 - DNA, 2523 bp, synthetic construct
  misc_feature 1..2523: note = Variant of DNA polymerase I from Thermus sp. strain 2.9
  source 1..2523: mol_type = other DNA
atgcaccatcatcatcatcatggcggtagcggcgtgttaccggtgttcgagcctaaaggtcgcgtgcttctggttgatggccatcatctcgcgtatcgtaacttctttgccctgaaaggattaaccaccagcagcggcgagatggtacagggtgtctacggctttgcaaagtcgctcctgaaagctctgaaagaagacggtgatgtggtgattgttgtctttgatgcgaaagcgccaagttttcgccacgaagcgtacgaagcttacaaagccgggcgtgctccaacgccggaagactttcctcgccaattggcgcttatgaaggaattagtggatttgcttggcctcgaacgcttggaagttcccggtttcgaggcagacgacgtattagcgactctcgcaaagaaagccgaacgtgagggctatgaagtccagatcttgacagcagatcgcgatcttttccagcttttatctccgcgcatctcggtgttacacccggaagggcatcgtatcaccccggaatggctctgggagaaatatggtttgcgtcccgaacaatgggtggattttcgcgccttagcaggcgatccgagcgacaatattccgggagttaaaggtatcggcgagaagacggcgctcaagctccttaaagaatgggggtcgttggagaacttgcttaagaatttagatcaggtcaaaccagagtcagtgcgtgagaagattcttgctcacctcgaagacctcaaattaagccgcgaattgtcccgtgtacgcaccgatttgccgctcgaagttgatttccaacgccgccgcgaacctgactgggagggtcttaaagcgtttttagagcgtcttgaatttggttcgctcttgcatgaattcggccttttagaaagcccgttaccagccgaagaagcaccttggccaccgcccgagggcgcgtttttaggttaccgtttgagtcgcccggaaccgatgtgggccgaattactggctcttgcagcgtctgcccagggacgtgtgtatcgcgcggaagaccctcatggtgcgctccgcggcctcttcgaagtccgtggactccttgccaaagacttagctgttgttgcattgcgcgaaggtcttgatttacctccgactgatgatccaatgcttcttgcgtacctcttggacccgtcaaacacgacgcccgaaggcgtagcccgtcgttacggcggcgagtggaccgaagatgcagcgaaacgcgcgttattggccgaacgtttgcacgccaatttattaggacgtttgcaaggcgaggaacgtctcctctggctttacgaagaagtggagaaaccattgagtcgcgtgctcgcgcatatggaagctaccggtgtcaaattagacgtggcgtatttggagaatctcagccttgaagttgctgcccacatgcgccgcttggaggaagaagtattccgtttagcaggccgttcctttcgccttaattctcgcgatcagttagaacgtgtgttgttcgatgaacttggtctccctcctatcggcaagacagagaagaccggtaaacgtagcacttcagcggcggttttagaagctcttcgcgaagtccatcccattgtggacaagatcttgcaataccgcgaactcgcgaaattgaaaggcacctatattgaccgtcttccggcattagtccacccgaaaacgggacgcctccatacccgcttcaaccaaacagccacggcgaccggtcgtttgtcctcctctgatccaaaccttcagaatattccagtacgtaccccattgggccagaagatccgccgtgcgtttgtagctgaggagggttggcgtttagtggccctcgattatagccaaattgaattacgtgtccttgcccatctttctggcgatgagaacctcatccgcgtgtttcaggaaggcaaagacattcacactcaaacggcaagctggatgtttggattatcagctgaagcgatcgatcctttgatgcgtcgtgcagcgaagaccatcaatttcggtgttctctacggtatgagtgcctttcgtttgtcgcaggaattaggcattccctatgaagaagctcaggcgttcattcagaaatactttcaaagctatcccaaagttaaagcatggatcgagaagactctcgaagaaggccgcacacgtggttacgtagagaccttatttggacgtcgccgctatgttcccgatttaaacgctcgcgtgaaaggcaagcgtgaagccgccgaacgcatggcgttcaacatgcctgtacagggcacggcagctgacctcatgaaacttgcaatggtgcgcctttttccacaattgcgtgaagttggtgcccgcatgctcttgcaggtccacgatgaactcttgttagaagcgccaaaagagcgtgcggaagaggtggcagccctcgcgaaagaagttatggaaggcgtgtggcccttagcggtgcctcttgaagtcgaagttggtattggcgaggattggctggctgccaaagga

SEQ ID NO: 3490 - protein, 841 aa, synthetic construct
  REGION 1..841: note = Variant of DNA polymerase I from Thermus sp. strain 2.9
MHHHHHHGGSGVLPVFEPKGRVLLVDGHHLAYRNFFALKGLTTSSGEMVQGVYGFAKSLLKALKEDGDVVIVVFDAKAPSFRHEAYEAYKAGRAPTPEDFPRQLALMKELVDLLGLERLEVPGFEADDVLATLAKKAEREGYEVQILTADRDLFQLLSPRISVLHPEGHRITPEWLWEKYGLRPEQWVDFRALAGDPSDNIPGVKGIGEKTALKLLKEWGSLENLLKNLDQVKPESVREKILAHLEDLKLSRELSRVRTDLPLEVDFQRRREPDWEGLKAFLERLEFGSLLHEFGLLESPLPAEEAPWPPPEGAFLGYRLSRPEPMWAELLALAASAQGRVYRAEDPHGALRGLFEVRGLLAKDLAVVALREGLDLPPTDDPMLLAYLLDPSNTTPEGVARRYGGEWTEDAAKRALLAERLHANLLGRLQGEERLLWLYEEVEKPLSRVLAHMEATGVKLDVAYLENLSLEVAAHMRRLEEEVFRLAGRSFRLNSRDQLERVLFDELGLPPIGKTEKTGKRSTSAAVLEALREVHPIVDKILQYRELAKLKGTYIDRLPALVHPKTGRLHTRFNQTATATGRLSSSDPNLQNIPVRTPLGQKIRRAFVAEEGWRLVALDYSQIELRVLAHLSGDENLIRVFQEGKDIHTQTASWMFGLSAEAIDPLMRRAAKTINFGVLYGMSAFRLSQELGIPYEEAQAFIQKYFQSYPKVKAWIEKTLEEGRTRGYVETLFGRRRYVPDLNARVKGKREAAERMAFNMPVQGTAADLMKLAMVRLFPQLREVGARMLLQVHDELLLEAPKERAEEVAALAKEVMEGVWPLAVPLEVEVGIGEDWLAAKG

SEQ ID NO: 3491 - DNA, 2523 bp, synthetic construct
  misc_feature 1..2523: note = Variant of DNA polymerase I from Thermus sp. strain 2.9
  source 1..2523: mol_type = other DNA
atgcaccatcatcatcatcatggcggtagcggcgtgttaccggtgttcgagcctaaaggtcgcgtgcttctggttgatggccatcatctcgcgtatcgtaacttctttgccctgaaaggattaaccaccagcagcggcgagccggtacagggtgtctacggctttgcaaagtcgctcctgaaagctctgaaagaagacggtgatgtggtgattgttgtctttgatgcgaaagcgccaagttttcgccacgaagcgtacgaagcttacaaagccgggcgtgctccaacgccggaagactttcctcgccaattggcgcttatgaaggaattagtggatttgcttggcctcgaacgcttggaagttgggggtttcgaggcagacgacgtattagcgactctcgcaaagaaagccgaacgtgagggctatgaagtccagatcttgacagcagatcgcgatcttttccagcttttatctccgcgcatctcggtgttacacccggaagggcatcgtatcaccccggaatggctctgggagaaatatggtttgcgtcccgaacaatgggtggattttcgcgccttagcaggcgatccgagcgacaatattccgggagttaaaggtatcggcgagaagacggcgctcaagctccttaaagaatgggggtcgttggagaacttgcttaagaatttagatcaggtcaaaccagagtcagtgcgtgagaagattcttgctcacctcgaagacctcaaattaagccgcgaattgtcccgtgtacgcaccgatttgccgctcgaagttgatttccaacgccgccgcgaacctgactgggagggtcttaaagcgtttttagagcgtcttgaatttggttcgctcttgcatgaattcggccttttagaaagcccgttaccagccgaagaagcaccttggccaccgcccgagggcgcgtttttaggttaccgtttgagtcgcccggaaccgatgtgggccgaattactggctcttgcagcgtctgcccagggacgtgtgtatcgcgcggaagaccctcatggtgcgctccgcggcctcttcgaagtccgtggactccttgccaaagacttagctgttgttgcattgcgcgaaggtcttgatttacctccgactgatgatccaatgcttcttgcgtacctcttggacccgtcaaacacgacgcccgaaggcgtagcccgtcgttacggcggcgagtggaccgaagatgcagcgaaacgcgcgttattggccgaacgtttgcacgccaatttattaggacgtttgcaaggcgaggaacgtctcctctggctttacgaagaagtggagaaaccattgagtcgcgtgctcgcgcatatggaagctaccggtgtcaaattagacgtggcgtatttggagaatctcagccttgaagttgctgcccacatgcgccgcttggaggaagaagtattccgtttagcaggccgttcctttcgccttaattctcgcgatcagttagaacgtgtgttgttcgatgaacttggtctccctcctatcggcaagacagagaagaccggtaaacgtagcacttcagcggcggttttagaagctcttcgcgaagtccatcccattgtggacaagatcttgcaataccgcgaactcgcgaaattgaaaggcacctatattgaccgtcttccggcattagtccacccgaaaacgggacgcctccatacccgcttcaaccaaacagccacggcgaccggtcgtttgtcctcctctgatccaaaccttcagaatattccagtacgtaccccattgggccagaagatccgccgtgcgtttgtagctgaggagggttggcgtttagtggccctcgattatagccaaattgaattacgtgtccttgcccatctttctggcgatgagaacctcatccgcgtgtttcaggaaggcaaagacattcacactcaaacggcaagctggatgtttggattatcagctgaagcgatcgatcctttgatgcgtcgtgcagcgaagaccatcaatttcggtgttctctacggtatgagtgcctttcgtttgtcgcaggaattaggcattccctatgaagaagctcaggcgttcattcagaaatactttcaaagctatcccaaagttaaagcatggatcgagaagactctcgaagaaggccgcacacgtggttacgtagagaccttatttggacgtcgccgctatgttcccgatttaaacgctcgcgtgaaaggcaagcgtgaagccgccgaacgcatggcgttcaacatgcctgtacagggcacggcagctgacctcatgaaacttgcaatggtgcgcctttttccacaattgcgtgaagttggtgcccgcatgctcttgcaggtccacgatgaactcttgttagaagcgccaaaagagcgtgcggaagaggtggcagccctcgcgaaagaagttatggaaggcgtgtggcccttagcggtgcctcttgaagtcgaagttggtattggcgaggattggctggctgccaaagga

SEQ ID NO: 3492 - protein, 841 aa, synthetic construct
  REGION 1..841: note = Variant of DNA polymerase I from Thermus sp. strain 2.9
MHHHHHHGGSGVLPVFEPKGRVLLVDGHHLAYRNFFALKGLTTSSGEPVQGVYGFAKSLLKALKEDGDVVIVVFDAKAPSFRHEAYEAYKAGRAPTPEDFPRQLALMKELVDLLGLERLEVGGFEADDVLATLAKKAEREGYEVQILTADRDLFQLLSPRISVLHPEGHRITPEWLWEKYGLRPEQWVDFRALAGDPSDNIPGVKGIGEKTALKLLKEWGSLENLLKNLDQVKPESVREKILAHLEDLKLSRELSRVRTDLPLEVDFQRRREPDWEGLKAFLERLEFGSLLHEFGLLESPLPAEEAPWPPPEGAFLGYRLSRPEPMWAELLALAASAQGRVYRAEDPHGALRGLFEVRGLLAKDLAVVALREGLDLPPTDDPMLLAYLLDPSNTTPEGVARRYGGEWTEDAAKRALLAERLHANLLGRLQGEERLLWLYEEVEKPLSRVLAHMEATGVKLDVAYLENLSLEVAAHMRRLEEEVFRLAGRSFRLNSRDQLERVLFDELGLPPIGKTEKTGKRSTSAAVLEALREVHPIVDKILQYRELAKLKGTYIDRLPALVHPKTGRLHTRFNQTATATGRLSSSDPNLQNIPVRTPLGQKIRRAFVAEEGWRLVALDYSQIELRVLAHLSGDENLIRVFQEGKDIHTQTASWMFGLSAEAIDPLMRRAAKTINFGVLYGMSAFRLSQELGIPYEEAQAFIQKYFQSYPKVKAWIEKTLEEGRTRGYVETLFGRRRYVPDLNARVKGKREAAERMAFNMPVQGTAADLMKLAMVRLFPQLREVGARMLLQVHDELLLEAPKERAEEVAALAKEVMEGVWPLAVPLEVEVGIGEDWLAAKG

SEQ ID NO: 3493 - DNA, 2523 bp, synthetic construct
  misc_feature 1..2523: note = Variant of DNA polymerase I from Thermus sp. strain 2.9
  source 1..2523: mol_type = other DNA
atgcaccatcatcatcatcatggcggtagcggcgtgttaccggtgttcgagcctaaaggtcgcgtgcttctggttgatggccatcatctcgcgtatcgtaacttctttgccctgaaaggattaaccaccagcagcggcgagccggtacagggtgtctacggctttgcaaagtcgctcctgaaagctctgaaagaagacggtgatgtggtgattgttgtctttgatgcgaaagcgccaagttttcgccacgaagcgtacgaagcttacaaagccgggcgtgctccaacgccggaagactttcctcgccaattggcgcttatgaaggaattagtggatttgcttggcctcgaacgcttggaagttcccggtttcgaggcagacgacgtattagcgactctcgcaaagaaagccgaacgtgagggctatgaagtccagatcttgacagcagatcgcgatcttttccagcttttatctccgcgcatctcggtgttacacccggaagggcatcgtatcaccccggaatggctctgggagaaatatggtttgcgtcccgaacaatgggtggattttcgcgccttagcaggcgatccgagcgacaatattccgggagttaaaggtatcggcgagaagacggcgctcaagctccttaaagaatgggggtcgttggagaacttgcttaagaatttagatcaggtcaaaccagagtcagtgcgtgagaagattcttgctcacctcgaagacctcaaattaagccgcgaattgtcccgtgtacgcaccgatttgccgctcgaagttgatttccaacgccgccgcgaacctgactgggagggtcttaaagcgtttttagagcgtcttgaatttggttcgctcttgcatgaattcggccttttagaaagcccgttaccagccgaagaagcaccttggccaccgcccgagggcgcgtttttaggttaccgtttgagtcgcccggaaccgatgtgggccgaattactggctcttgcagcgtctgcccagggacgtgtgtatcgcgcggaagaccctcatggtgcgctccgcggcctcttcgaagtccgtggactccttgccaaagacttagctgttgttgcattgcgcgaaggtcttgatttacctccgactgatgatccaatgcttcttgcgtacctcttggacccgtcaaacacgacgcccgaaggcgtagcccgtcgttacggcggcgagtggaccgaagatgcagcgaaacgcgcgttattggccgaacgtttgcacgccaatttattatggcgtttgcaaggcgaggaacgtctcctctggctttacgaagaagtggagaaaccattgagtcgcgtgctcgcgcatatggaagctaccggtgtcaaattagacgtggcgtatttggagaatctcagccttgaagttgctgcccacatgcgccgcttggaggaagaagtattccgtttagcaggccgttcctttcgccttaattctcgcgatcagttagaacgtgtgttgttcgatgaacttggtctccctcctatcggcaagacagagaagaccggtaaacgtagcacttcagcggcggttttagaagctcttcgcgaagtccatcccattgtggacaagatcttgcaataccgcgaactcgcgaaattgaaaggcacctatattgaccgtcttccggcattagtccacccgaaaacgggacgcctccatacccgcttcaaccaaacagccacggcgaccggtcgtttgtcctcctctgatccaaaccttcagaatattccagtacgtaccccattgggccagaagatccgccgtgcgtttgtagctgaggagggttggcgtttagtggccctcgattatagccaaattgaattacgtgtccttgcccatctttctggcgatgagaacctcatccgcgtgtttcaggaaggcaaagacattcacactcaaacggcaagctggatgtttggattatcagctgaagcgatcgatcctttgatgcgtcgtgcagcgaagaccatcaatttcggtgttctctacggtatgagtgcctttcgtttgtcgcaggaattaggcattccctatgaagaagctcaggcgttcattcagaaatactttcaaagctatcccaaagttaaagcatggatcgagaagactctcgaagaaggccgcacacgtggttacgtagagaccttatttggacgtcgccgctatgttcccgatttaaacgctcgcgtgaaaggcaagcgtgaagccgccgaacgcatggcgttcaacatgcctgtacagggcacggcagctgacctcatgaaacttgcaatggtgcgcctttttccacaattgcgtgaagttggtgcccgcatgctcttgcaggtccacgatgaactcttgttagaagcgccaaaagagcgtgcggaagaggtggcagccctcgcgaaagaagttatggaaggcgtgtggcccttagcggtgcctcttgaagtcgaagttggtattggcgaggattggctggctgccaaagga

SEQ ID NO: 3494 - protein, 841 aa, synthetic construct
  REGION 1..841: note = Variant of DNA polymerase I from Thermus sp. strain 2.9
MHHHHHHGGSGVLPVFEPKGRVLLVDGHHLAYRNFFALKGLTTSSGEPVQGVYGFAKSLLKALKEDGDVVIVVFDAKAPSFRHEAYEAYKAGRAPTPEDFPRQLALMKELVDLLGLERLEVPGFEADDVLATLAKKAEREGYEVQILTADRDLFQLLSPRISVLHPEGHRITPEWLWEKYGLRPEQWVDFRALAGDPSDNIPGVKGIGEKTALKLLKEWGSLENLLKNLDQVKPESVREKILAHLEDLKLSRELSRVRTDLPLEVDFQRRREPDWEGLKAFLERLEFGSLLHEFGLLESPLPAEEAPWPPPEGAFLGYRLSRPEPMWAELLALAASAQGRVYRAEDPHGALRGLFEVRGLLAKDLAVVALREGLDLPPTDDPMLLAYLLDPSNTTPEGVARRYGGEWTEDAAKRALLAERLHANLLWRLQGEERLLWLYEEVEKPLSRVLAHMEATGVKLDVAYLENLSLEVAAHMRRLEEEVFRLAGRSFRLNSRDQLERVLFDELGLPPIGKTEKTGKRSTSAAVLEALREVHPIVDKILQYRELAKLKGTYIDRLPALVHPKTGRLHTRFNQTATATGRLSSSDPNLQNIPVRTPLGQKIRRAFVAEEGWRLVALDYSQIELRVLAHLSGDENLIRVFQEGKDIHTQTASWMFGLSAEAIDPLMRRAAKTINFGVLYGMSAFRLSQELGIPYEEAQAFIQKYFQSYPKVKAWIEKTLEEGRTRGYVETLFGRRRYVPDLNARVKGKREAAERMAFNMPVQGTAADLMKLAMVRLFPQLREVGARMLLQVHDELLLEAPKERAEEVAALAKEVMEGVWPLAVPLEVEVGIGEDWLAAKG

SEQ ID NO: 3495 - DNA, 2523 bp, synthetic construct
  misc_feature 1..2523: note = Variant of DNA polymerase I from Thermus sp. strain 2.9
  source 1..2523: mol_type = other DNA
atgcaccatcatcatcatcatggcggtagcggcgtgttaccggtgttcgagcctaaaggtcgcgtgcttctggttgatggccatcatctcgcgtatcgtaacttctttgccctgaaaggattaaccaccagcagcggcgagccggtacagggtgtctacggctttgcaaagtcgctcctgaaagctctgaaagaagacggtgatgtggtgattgttgtctttgatgcgaaagcgccaagttttcgccacgaagcgtacgaagcttacaaagccgggcgtgctccaacgccggaagactttcctcgccaattggcgcttatgaaggaattagtggatttgcttggcctcgaacgcttggaagttcccggtttcgaggcagacgacgtattagcgactctcgcaaagaaagccgaacgtgagggctatgaagtccagatcttgacagcagatcgcgatcttttccagcttttatctccgcgcatctcggtgttacacccggaagggcatcgtatcaccccggaatggctctgggagaaatatggtttgcgtcccgaacaatgggtggattttcgcgccttagcaggcgatccgagcgacaatattccgggagttaaaggtatcggcgagaagacggcgctcaagctccttaaagaatgggggtcgttggagaacttgcttaagaatttagatcaggtcaaaccagagtcagtgcgtgagaagattcttgctcacctcgaagacctcaaattaagccgcgaattgtcccgtgtacgcaccgatttgccgctcgaagttgatttccaacgccgccgcgaacctgactgggagggtcttaaagcgtttttagagcgtcttgaatttggttcgctcttgcatgaattcggccttttagaaagcccgttaccagccgaagaagcaccttggccaccgcccgagggcgcgtttttaggttaccgtttgagtcgcccggaaccgatgtgggccgaattactggctcttgcagcgtctgcccagggacgtgtgtatcgcgcggaagaccctcatggtgcgctccgcggcctcttcgaagtccgtggactccttgccaaagacttagctgttgttgcattgcgcgaaggtcttgatttacctccgactgatgatccaatgcttcttgcgtacctcttggacccgtcaaacacgacgcccgaaggcgtagcccgtcgttacggcggcgagtggaccgaagatgcagcgaaacgcgcgttattggccgaacgtttgcacgccaatttattaatgcgtttgcaaggcgaggaacgtctcctctggctttacgaagaagtggagaaaccattgagtcgcgtgctcgcgcatatggaagctaccggtgtcaaattagacgtggcgtatttggagaatctcagccttgaagttgctgcccacatgcgccgcttggaggaagaagtattccgtttagcaggccgttcctttcgccttaattctcgcgatcagttagaacgtgtgttgttcgatgaacttggtctccctcctatcggcaagacagagaagaccggtaaacgtagcacttcagcggcggttttagaagctcttcgcgaagtccatcccattgtggacaagatcttgcaataccgcgaactcgcgaaattgaaaggcacctatattgaccgtcttccggcattagtccacccgaaaacgggacgcctccatacccgcttcaaccaaacagccacggcgaccggtcgtttgtcctcctctgatccaaaccttcagaatattccagtacgtaccccattgggccagaagatccgccgtgcgtttgtagctgaggagggttggcgtttagtggccctcgattatagccaaattgaattacgtgtccttgcccatctttctggcgatgagaacctcatccgcgtgtttcaggaaggcaaagacattcacactcaaacggcaagctggatgtttggattatcagctgaagcgatcgatcctttgatgcgtcgtgcagcgaagaccatcaatttcggtgttctctacggtatgagtgcctttcgtttgtcgcaggaattaggcattccctatgaagaagctcaggcgttcattcagaaatactttcaaagctatcccaaagttaaagcatggatcgagaagactctcgaagaaggccgcacacgtggttacgtagagaccttatttggacgtcgccgctatgttcccgatttaaacgctcgcgtgaaaggcaagcgtgaagccgccgaacgcatggcgttcaacatgcctgtacagggcacggcagctgacctcatgaaacttgcaatggtgcgcctttttccacaattgcgtgaagttggtgcccgcatgctcttgcaggtccacgatgaactcttgttagaagcgccaaaagagcgtgcggaagaggtggcagccctcgcgaaagaagttatggaaggcgtgtggcccttagcggtgcctcttgaagtcgaagttggtattggcgaggattggctggctgccaaagga

SEQ ID NO: 3496 - protein, 841 aa, synthetic construct
  REGION 1..841: note = Variant of DNA polymerase I from Thermus sp. strain 2.9
MHHHHHHGGSGVLPVFEPKGRVLLVDGHHLAYRNFFALKGLTTSSGEPVQGVYGFAKSLLKALKEDGDVVIVVFDAKAPSFRHEAYEAYKAGRAPTPEDFPRQLALMKELVDLLGLERLEVPGFEADDVLATLAKKAEREGYEVQILTADRDLFQLLSPRISVLHPEGHRITPEWLWEKYGLRPEQWVDFRALAGDPSDNIPGVKGIGEKTALKLLKEWGSLENLLKNLDQVKPESVREKILAHLEDLKLSRELSRVRTDLPLEVDFQRRREPDWEGLKAFLERLEFGSLLHEFGLLESPLPAEEAPWPPPEGAFLGYRLSRPEPMWAELLALAASAQGRVYRAEDPHGALRGLFEVRGLLAKDLAVVALREGLDLPPTDDPMLLAYLLDPSNTTPEGVARRYGGEWTEDAAKRALLAERLHANLLMRLQGEERLLWLYEEVEKPLSRVLAHMEATGVKLDVAYLENLSLEVAAHMRRLEEEVFRLAGRSFRLNSRDQLERVLFDELGLPPIGKTEKTGKRSTSAAVLEALREVHPIVDKILQYRELAKLKGTYIDRLPALVHPKTGRLHTRFNQTATATGRLSSSDPNLQNIPVRTPLGQKIRRAFVAEEGWRLVALDYSQIELRVLAHLSGDENLIRVFQEGKDIHTQTASWMFGLSAEAIDPLMRRAAKTINFGVLYGMSAFRLSQELGIPYEEAQAFIQKYFQSYPKVKAWIEKTLEEGRTRGYVETLFGRRRYVPDLNARVKGKREAAERMAFNMPVQGTAADLMKLAMVRLFPQLREVGARMLLQVHDELLLEAPKERAEEVAALAKEVMEGVWPLAVPLEVEVGIGEDWLAAKG

SEQ ID NO: 3497 - DNA, 2523 bp, synthetic construct
  misc_feature 1..2523: note = Variant of DNA polymerase I from Thermus sp. strain 2.9
  source 1..2523: mol_type = other DNA
atgcaccatcatcatcatcatggcggtagcggcgtgttaccggtgttcgagcctaaaggtcgcgtgcttctggttgatggccatcatctcgcgtatcgtaacttctttgccctgaaaggattaaccaccagcagcggcgagccggtacagggtgtctacggctttgcaaagtcgctcctgaaagctctgaaagaagacggtgatgtggtgattgttgtctttgatgcgaaagcgccaagttttcgccacgaagcgtacgaagcttacaaagccgggcgtgctccaacgccggaagactttcctcgccaattggcgcttatgaaggaattagtggatttgcttggcctcgaacgcttggaagttcccggtttcgaggcagacgacgtattagcgactctcgcaaagaaagccgaacgtgagggctatgaagtccagatcttgacagcagatcgcgatcttttccagcttttatctccgcgcatctcggtgttacacccggaagggcatcgtatcaccccggaatggctctgggagaaatatggtttgcgtcccgaacaatgggtggattttcgcgccttagcaggcgatccgagcgacaatattccgggagttaaaggtatcggcgagaagacggcgctcaagctccttaaagaatgggggtcgttggagaacttgcttaagaatttagatcaggtcaaaccagagtcagtgcgtgagaagattcttgctcacctcgaagacctcaaattaagccgcgaattgtcccgtgtacgcaccgatttgccgctcgaagttgatttccaacgccgccgcgaacctgactgggagggtcttaaagcgtttttagagcgtcttgaatttggttcgctcttgcatgaattcggccttttagaaagcccgttaccagccgaagaagcaccttggccaccgcccgagggcgcgtttttaggttaccgtttgagtcgcccggaaccgatgtgggccgaattactggctcttgcagcgtctgcccagggacgtgtgtatcgcgcggaagaccctcatggtgcgctccgcggcctcttcgaagtccgtggactccttgccaaagacttagctgttgttgcattgcgcgaaggtcttgatttacctccgactgatgatccaatgcttcttgcgtacctcttggacccgtcaaacacgacgcccgaaggcgtagcccgtcgttacggcggcgagtggaccgaagatgcagcgaaacgcgcgttattggccgaacgtttgcacgccaatttattaggacgtttgcaaggcgaggaacgtctcctctggctttacgaagaagtggagaaaccattgagtcgcgtgctcgcgcatatggaagctaccggtgtcaaattagacgtggcgtatttggagaatctcagccttgaagttgctgcccacatgcgccgcttggaggaagaagtattccgtttagcaggccgttcctttcgccttaattctcgcgatcagttagaacgtgtgttgttcgatgaacttggtctccctcctatcggcaagacagagaagaccggtaaacgtagcacttcagcggcggttttagaagctcttcgcgaagtccatcccattgtggacaagatcttgcaataccgcgaactcgcgaaattgaaaggcacctatattgaccgtcttccggcattagtccacccgaaaacgggacgcctccatacccgcttcaaccaaacagccacggcgaccggtcgtttgtcctcctctgatccaaaccttcagaatattccagtacgtaccccattgggccagaagatccgccgtgcgtttgtagctgaggagggttggcgtttagtggccctcgattatagccaaattgaattacgtgtccttgcccatctttctggcgatgagaacctcatccgcgtgtttcaggaaggcaaagacattcacactcaaacggcaagctggatgtttggattatcagctgaagcgatcgatcctttgatgcgtcgtgcagcgaagaccatcaatttcggtgttctctacggtatgagtgcctttcgtttgtcgcaggaattaggcattccctatgaagaagctcaggcgttcattcagaaatactttcaaagctatcccaaagttaaagcatggatcgagaagactctcgaagaaggccgcacacgtggttacgtagagaccttatttggacgtcgccgctatgttcccgatttaaacgctcgcgtgaaaggcaagcgtgaagccgccgaacgcatggcgttcaacatgcctgtacagggcacggcagctgacctcatgaaacttgcaatggtgcgcctttttccacaattgcgtgaagttggtgcccgcatgctcttgcaggtccacgatgaactcttgttagaagcgccaaaagagcgtgcggaagaggtggcatttctcgcgaaagaagttatggaaggcgtgtggcccttagcggtgcctcttgaagtcgaagttggtattggcgaggattggctggctgccaaagga

SEQ ID NO: 3498 - protein, 841 aa, synthetic construct
  REGION 1..841: note = Variant of DNA polymerase I from Thermus sp. strain 2.9
MHHHHHHGGSGVLPVFEPKGRVLLVDGHHLAYRNFFALKGLTTSSGEPVQGVYGFAKSLLKALKEDGDVVIVVFDAKAPSFRHEAYEAYKAGRAPTPEDFPRQLALMKELVDLLGLERLEVPGFEADDVLATLAKKAEREGYEVQILTADRDLFQLLSPRISVLHPEGHRITPEWLWEKYGLRPEQWVDFRALAGDPSDNIPGVKGIGEKTALKLLKEWGSLENLLKNLDQVKPESVREKILAHLEDLKLSRELSRVRTDLPLEVDFQRRREPDWEGLKAFLERLEFGSLLHEFGLLESPLPAEEAPWPPPEGAFLGYRLSRPEPMWAELLALAASAQGRVYRAEDPHGALRGLFEVRGLLAKDLAVVALREGLDLPPTDDPMLLAYLLDPSNTTPEGVARRYGGEWTEDAAKRALLAERLHANLLGRLQGEERLLWLYEEVEKPLSRVLAHMEATGVKLDVAYLENLSLEVAAHMRRLEEEVFRLAGRSFRLNSRDQLERVLFDELGLPPIGKTEKTGKRSTSAAVLEALREVHPIVDKILQYRELAKLKGTYIDRLPALVHPKTGRLHTRFNQTATATGRLSSSDPNLQNIPVRTPLGQKIRRAFVAEEGWRLVALDYSQIELRVLAHLSGDENLIRVFQEGKDIHTQTASWMFGLSAEAIDPLMRRAAKTINFGVLYGMSAFRLSQELGIPYEEAQAFIQKYFQSYPKVKAWIEKTLEEGRTRGYVETLFGRRRYVPDLNARVKGKREAAERMAFNMPVQGTAADLMKLAMVRLFPQLREVGARMLLQVHDELLLEAPKERAEEVAFLAKEVMEGVWPLAVPLEVEVGIGEDWLAAKG

SEQ ID NO: 3499 - DNA, 2523 bp, synthetic construct
  misc_feature 1..2523: note = Variant of DNA polymerase I from Thermus sp. strain 2.9
  source 1..2523: mol_type = other DNA
atgcaccatcatcatcatcatggcggtagcggcgtgttagaggtgttcgagcctaaaggtcgcgtgcttctggttgatggccatcatctcgcgtatcgtaacttctttgccctgaaaggattaaccaccagcagcggcgagccggtacagggtgtctacggctttgcaaagtcgctcctgaaagctctgaaagaagacggtgatgtggtgattgttgtctttgatgcgaaagcgccaagttttcgccacgaagcgtacgaagcttacaaagccgggcgtgctccaacgccggaagactttcctcgccaattggcgcttatgaaggaattagtggatttgcttggcctcgaacgcttggaagttcccggtttcgaggcagacgacgtattagcgactctcgcaaagaaagccgaacgcgagggctatgaagtccagatcttgacagcagatcgcgatcttttccagcttttatctccgcgcatctcggtgttacacccggatgggcatcgtatcaccccggaatggctctgggagaaatatggtttgcgtcccgaacaatgggtggattttcgcgccttagcaggcgataaaagcgacaatattccgggagttaaaggtatcggcgagaagacggcgctcaagctccttaaagaatgggggtcgttggagaacttgcttaagaatttagatcaggtcaaaccagagtcagtgcgtgagaagattcttgctcacctcgaagacctcaagttaagccgcgaattgtcccgtgtacgcaccgatttgccgctcgaagttgatttccaacgccgccgcgaacctgactgggagggtcttaaagcgtttttagagcgtcttgaatttggttcgctcttgcatgaattcggccttttagaaagcccgttaccagccgaagaagcaccttggccaccgcccgagggcgcgtttttaggttaccgtttgagtcgcccggaaccgatgtgggccgaattactggctcttgcagcgtctgcccagggacgtgtgtatcgcgcggaagaccctcatggtgcgctccgcggcctcttcgaagtccgtggactccttgccaaagacttagctgttgttgcattgcgcgaaggtcttgatttacctccgactgatgatccaatgcttcttgcgtacctcttggacccgtcaaacacgacgcccgaaggcgtagcccgtcgttacggcggcgagtggaccgaagatgcagcgaaacgcgcgttattggccgaacgtttgcacgccaatttattaggacgtttgcaaggcgagaagcgtctcctctggctttacgaagaagtggagaaaccattgagtcgcgtgctcgcgcatatggaagctaccggtgtcaaattagacgtggcgtatttggagaatctcagccttgaagttgctgcccacatgcgccgcttggaggaagaagtattccgtttagcaggccgttcctttcgccttaattctcgcgatcagttagaacgtgtgttgttcgatgaacttggtctccctcctatcggcaagacagagaagaccggtaaacgtagcacttcagcggcggttttagaagctcttcgcgaagtccatcccattgtggacaagatcttgcaataccgcgaactcgcgaaattgaaaggcacctatattgaccgtcttccggcattagtccacccgaaaacgggacgcctccatacccgcttcaaccaaacagccacggcgaccggtcgtttgtcctcctctgatccaaaccttcagaatattccagtacgtaccccgttgggccagaagatccgccgtgcgtttgtagctgaggagggttggcgtttagtggccctcgattatagccaaattgaattacgtgtccttgcccatctttctggcgatgagaacctcatccgcgtgtttcaggaaggcaaagacattcacactcaaacggcaagctggatgtttggattatcagctgaagcgatcgatcctttgatgcgtcgtgcagcgaagaccatcaatttcggtgttctctacggtatgagtgcctttcgtttgtcgcaggaattaggcattccctacgaagaagctcaggcgttcattcagaaatactttcaaagctatcccaaagttaaagcatggatcgagaagactctcgaagaaggccgcacccgtggttacgtagagaccttatttggacgtcgccgctatgttcccgatttaaacgctcgcgtgaaaggcaagcgtgaagccgccgaacgcatggcgttcaacatgcctgtacagggcacggcagctgacctcatgaaacttgcaatggtgcgcctttttccacaattgcgtgaagttggtgcccgcatgctcttgcaggtccacgatgaactcttgttagaagcgccaaaagagcgtgcggaagaggtggcagccctcgcgaaagaagttatggaaggcgtgtggcccttagcggtgcctcttgaagtcgaagttggtattggcgaggattggctggctgccaaagga

SEQ ID NO: 3500 - protein, 841 aa, synthetic construct
  REGION 1..841: note = Variant of DNA polymerase I from Thermus sp. strain 2.9
MHHHHHHGGSGVLEVFEPKGRVLLVDGHHLAYRNFFALKGLTTSSGEPVQGVYGFAKSLLKALKEDGDVVIVVFDAKAPSFRHEAYEAYKAGRAPTPEDFPRQLALMKELVDLLGLERLEVPGFEADDVLATLAKKAEREGYEVQILTADRDLFQLLSPRISVLHPDGHRITPEWLWEKYGLRPEQWVDFRALAGDKSDNIPGVKGIGEKTALKLLKEWGSLENLLKNLDQVKPESVREKILAHLEDLKLSRELSRVRTDLPLEVDFQRRREPDWEGLKAFLERLEFGSLLHEFGLLESPLPAEEAPWPPPEGAFLGYRLSRPEPMWAELLALAASAQGRVYRAEDPHGALRGLFEVRGLLAKDLAVVALREGLDLPPTDDPMLLAYLLDPSNTTPEGVARRYGGEWTEDAAKRALLAERLHANLLGRLQGEKRLLWLYEEVEKPLSRVLAHMEATGVKLDVAYLENLSLEVAAHMRRLEEEVFRLAGRSFRLNSRDQLERVLFDELGLPPIGKTEKTGKRSTSAAVLEALREVHPIVDKILQYRELAKLKGTYIDRLPALVHPKTGRLHTRFNQTATATGRLSSSDPNLQNIPVRTPLGQKIRRAFVAEEGWRLVALDYSQIELRVLAHLSGDENLIRVFQEGKDIHTQTASWMFGLSAEAIDPLMRRAAKTINFGVLYGMSAFRLSQELGIPYEEAQAFIQKYFQSYPKVKAWIEKTLEEGRTRGYVETLFGRRRYVPDLNARVKGKREAAERMAFNMPVQGTAADLMKLAMVRLFPQLREVGARMLLQVHDELLLEAPKERAEEVAALAKEVMEGVWPLAVPLEVEVGIGEDWLAAKG

SEQ ID NO: 3501 - DNA, 2523 bp, synthetic construct
  misc_feature 1..2523: note = Variant of DNA polymerase I from Thermus sp. strain 2.9
  source 1..2523: mol_type = other DNA
atgcaccatcatcatcatcatggcggtagcggcgtgttaccggtgttcgagcctaaaggtcgcgtgcttctggttgatggccatcatctcgcgtatcgtaacttctttgccctgaaaggattaaccaccagcagcggcgagccggtacagggtgtctacggctttgcaaagtcgctcctgaaagctctgaaagaagacggtgatgtggtgattgttgtctttgatgcgaaagcgccaagttttcgccacgaagcgtacgaagcttacaaagccgggcgtgctccaacgccggaagactttcctcgccaattggcgcttatgaaggaattagtggatttgcttggcctcgaacgcttggaagttcccggtttcgaggcagacgacgtattagcgactctcgcaaagaaagccgaacgtgagggctatgaagtccagatcttgacagcagatcgcgatcttttccagcttttatctccgcgcatctcggtgttacacccggaagggcatcgtatcaccccggaatggctctgggagaaatatggtttgcgtcccgaacaatgggtggattttcgcgccttagcaggcgatccgagcgacaatattccgggagttaaaggtatcggcgagaagacggcgctcaagctccttaaagaatgggggtcgttggagaacttgcttaagaatttagatcaggtcaaaccagagtcagtgcgtgagaagattcttgctcacctcgaagacctcaaattaagccgcgaattgtcccgtgtacgcaccgatttgccgctcgaagttgatttccaacgccgccgcgaacctgactgggagggtcttaaagcgtttttagagcgtcttgaatttggttcgctcttgcatgaattcggccttttagaaagcccgttaccagccgaagaagcaccttggccaccgcccgagggcgcgtttttaggttaccgtttgagtcgcccggaaccgatgtgggccgaattactggctcttgcagcgtctgcccagggacgtgtgtatcgcgcggaagaccctcatggtgcgctccgcggcctcttcgaagtccgtggactccttgccaaagacttagctgttgttgcattgcgcgaaggtcttgatttacctccgactgatgatccaatgcttcttgcgtacctcttggacccgtcaaacacgacgcccgaaggcgtagcccgtcgttacggcggcgagtggaccgaagatgcagcgaaacgcgcgttattggccgaacgtttgcacgccaatttattaggacgtttgcaaggcgaggaacgtctcctctggctttacgaagaagtggagaaaccattgagtcgcgtgctcgcgcatatggaagctaccggtgtcaaattagacgtggcgtatttggagaatctcagccttgaagttgctgcccacatgcgccgcttggaggaagaagtattccgtttagcaggccgttcctttcgccttaattctcgcgatcagttagaacgtgtgttgttcgatgaacttggtctccctcctatcggcaagacagagaagaccggtaaacgtagcacttcagcggcggttttagaagctcttcgcgaagtccatcccattgtggacaagatcttgcaataccgcgaactcgcgaaattgaaaggcacctatattgaccgtcttccggcattagtccacccgaaaacgggacgcctccatacccgcttcaaccaaacagccacggcgaccggtcgtttgtcctcctctgatccaaaccttcagaatattccagtacgtaccccattgggccagaagatccgccgtgcgtttgtagctgaggagggttggcgtttagtggccctcgattatagccaaattgaattacgtgtccttgcccatctttctggcgatgagaacctcatccgcgtgtttcaggaaggcaaagacattcacactcaaacggcaagctggatgtttggattaacggctgaagcgatcgatcctttgatgcgtcgtgcagcgaagaccatcaatttcggtgttctctacggtatgagtgcctttcgtttgtcgcaggaattaggcattccctatgaagaagctcaggcgttcattcagaaatactttcaaagctatcccaaagttaaagcatggatcgagaagactctcgaagaaggccgcacacgtggttacgtagagaccttatttggacgtcgccgctatgttcccgatttaaacgctcgcgtgaaaggcaagcgtgaagccgccgaacgcatggcgttcaacatgcctgtacagggcacggcagctgacctcatgaaacttgcaatggtgcgcctttttccacaattgcgtgaagttggtgcccgcatgctcttgcaggtccacgatgaactcttgttagaagcgccaaaagagcgtgcggaagaggtggcagccctcgcgaaagaagttatggaaggcgtgtggcccttagcggtgcctcttgaagtcgaagttggtattggcgaggattggctggctgccaaagga

SEQ ID NO: 3502 - protein, 841 aa, synthetic construct
  REGION 1..841: note = Variant of DNA polymerase I from Thermus sp. strain 2.9
MHHHHHHGGSGVLPVFEPKGRVLLVDGHHLAYRNFFALKGLTTSSGEPVQGVYGFAKSLLKALKEDGDVVIVVFDAKAPSFRHEAYEAYKAGRAPTPEDFPRQLALMKELVDLLGLERLEVPGFEADDVLATLAKKAEREGYEVQILTADRDLFQLLSPRISVLHPEGHRITPEWLWEKYGLRPEQWVDFRALAGDPSDNIPGVKGIGEKTALKLLKEWGSLENLLKNLDQVKPESVREKILAHLEDLKLSRELSRVRTDLPLEVDFQRRREPDWEGLKAFLERLEFGSLLHEFGLLESPLPAEEAPWPPPEGAFLGYRLSRPEPMWAELLALAASAQGRVYRAEDPHGALRGLFEVRGLLAKDLAVVALREGLDLPPTDDPMLLAYLLDPSNTTPEGVARRYGGEWTEDAAKRALLAERLHANLLGRLQGEERLLWLYEEVEKPLSRVLAHMEATGVKLDVAYLENLSLEVAAHMRRLEEEVFRLAGRSFRLNSRDQLERVLFDELGLPPIGKTEKTGKRSTSAAVLEALREVHPIVDKILQYRELAKLKGTYIDRLPALVHPKTGRLHTRFNQTATATGRLSSSDPNLQNIPVRTPLGQKIRRAFVAEEGWRLVALDYSQIELRVLAHLSGDENLIRVFQEGKDIHTQTASWMFGLTAEAIDPLMRRAAKTINFGVLYGMSAFRLSQELGIPYEEAQAFIQKYFQSYPKVKAWIEKTLEEGRTRGYVETLFGRRRYVPDLNARVKGKREAAERMAFNMPVQGTAADLMKLAMVRLFPQLREVGARMLLQVHDELLLEAPKERAEEVAALAKEVMEGVWPLAVPLEVEVGIGEDWLAAKG

SEQ ID NO: 3503 - DNA, 2523 bp, synthetic construct
  misc_feature 1..2523: note = Variant of DNA polymerase I from Thermus sp. strain 2.9
  source 1..2523: mol_type = other DNA
atgcaccatcatcatcatcatggcggtagcggcgtgttaccggtgttcgagcctaaaggtcgcgtgcttctggttgatggccatcatctcgcgtatcgtaacttctttgccctgaaaggattaaccaccagcagcggcgagccggtacagggtgtctacggctttgcaaagtcgctcctgaaagctctgaaagaagacggtgatgtggtgattgttgtctttgatgcgaaagcgccaagttttcgccacgaagcgtacgaagcttacaaagccgggcgtgctccaacgccggaagactttcctcgccaattggcgcttatgaaggaattagtggatttgcttggcctcgaacgcttggaagttcccggtttcgaggcagacgacgtattagcgactctcgcaaagaaagccgaacgtgagggctatgaagtccagatcttgacagcagatcgcgatcttttccagcttttatctccgcgcatctcggtgttacacccggaagggcatcgtatcaccccggaatggctctgggagaaatatggtttgcgtcccgaacaatgggtggattttcgcgccttagcaggcgatccgagcgacaatattccgggagttaaaggtatcggcgagaagacggcgctcaagctccttaaagaatgggggtcgttggagaacttgcttaagaatttagatcaggtcaaaccagagtcagtgcgtgagaagattcttgctcacctcgaagacctcaaattaagccgcgaattgtcccgtgtacgcaccgatttgccgctcgaagttgatttccaacgccgccgcgaacctgactgggagggtcttaaagcgtttttagagcgtcttgaatttggttcgctcttgcatgaattcggccttttagaaagcccgttaccagccgaagaagcaccttggccaccgcccgagggcgcgtttttaggttaccgtttgagtcgcccggaaccgatgtgggccgaattactggctcttgcagcgtctgcccagggacgtgtgtatcgcgcggaagaccctcatggtgcgctccgcggcctcttcgaagtccgtggactccttgccaaagacttagctgttgttgcattgcgcgaaggtcttgatttacctccgactgatgatccaatgcttcttgcgtacctcttggacccgtcaaacacgacgcccgaaggcgtagcccgtcgttacggcggcgagtggaccgaagatgcagcgaaacgcgcgttattggccgaacgtttgcacgccaatttattaggacgtttgcaaggcgaggaacgtctcagttggctttacgaagaagtggagaaaccattgagtcgcgtgctcgcgcatatggaagctaccggtgtcaaattagacgtggcgtatttggagaatctcagccttgaagttgctgcccacatgcgccgcttggaggaagaagtattccgtttagcaggccgttcctttcgccttaattctcgcgatcagttagaacgtgtgttgttcgatgaacttggtctccctcctatcggcaagacagagaagaccggtaaacgtagcacttcagcggcggttttagaagctcttcgcgaagtccatcccattgtggacaagatcttgcaataccgcgaactcgcgaaattgaaaggcacctatattgaccgtcttccggcattagtccacccgaaaacgggacgcctccatacccgcttcaaccaaacagccacggcgaccggtcgtttgtcctcctctgatccaaaccttcagaatattccagtacgtaccccattgggccagaagatccgccgtgcgtttgtagctgaggagggttggcgtttagtggccctcgattatagccaaattgaattacgtgtccttgcccatctttctggcgatgagaacctcatccgcgtgtttcaggaaggcaaagacattcacactcaaacggcaagctggatgtttggattatcagctgaagcgatcgatcctttgatgcgtcgtgcagcgaagaccatcaatttcggtgttctctacggtatgagtgcctttcgtttgtcgcaggaattaggcattccctatgaagaagctcaggcgttcattcagaaatactttcaaagctatcccaaagttaaagcatggatcgagaagactctcgaagaaggccgcacacgtggttacgtagagaccttatttggacgtcgccgctatgttcccgatttaaacgctcgcgtgaaaggcaagcgtgaagccgccgaacgcatggcgttcaacatgcctgtacagggcacggcagctgacctcatgaaacttgcaatggtgcgcctttttccacaattgcgtgaagttggtgcccgcatgctcttgcaggtccacgatgaactcttgttagaagcgccaaaagagcgtgcggaagaggtggcagccctcgcgaaagaagttatggaaggcgtgtggcccttagcggtgcctcttgaagtcgaagttggtattggcgaggattggctggctgccaaagga

SEQ ID NO: 3504 - protein, 841 aa, synthetic construct
  REGION 1..841: note = Variant of DNA polymerase I from Thermus sp. strain 2.9
MHHHHHHGGSGVLPVFEPKGRVLLVDGHHLAYRNFFALKGLTTSSGEPVQGVYGFAKSLLKALKEDGDVVIVVFDAKAPSFRHEAYEAYKAGRAPTPEDFPRQLALMKELVDLLGLERLEVPGFEADDVLATLAKKAEREGYEVQILTADRDLFQLLSPRISVLHPEGHRITPEWLWEKYGLRPEQWVDFRALAGDPSDNIPGVKGIGEKTALKLLKEWGSLENLLKNLDQVKPESVREKILAHLEDLKLSRELSRVRTDLPLEVDFQRRREPDWEGLKAFLERLEFGSLLHEFGLLESPLPAEEAPWPPPEGAFLGYRLSRPEPMWAELLALAASAQGRVYRAEDPHGALRGLFEVRGLLAKDLAVVALREGLDLPPTDDPMLLAYLLDPSNTTPEGVARRYGGEWTEDAAKRALLAERLHANLLGRLQGEERLSWLYEEVEKPLSRVLAHMEATGVKLDVAYLENLSLEVAAHMRRLEEEVFRLAGRSFRLNSRDQLERVLFDELGLPPIGKTEKTGKRSTSAAVLEALREVHPIVDKILQYRELAKLKGTYIDRLPALVHPKTGRLHTRFNQTATATGRLSSSDPNLQNIPVRTPLGQKIRRAFVAEEGWRLVALDYSQIELRVLAHLSGDENLIRVFQEGKDIHTQTASWMFGLSAEAIDPLMRRAAKTINFGVLYGMSAFRLSQELGIPYEEAQAFIQKYFQSYPKVKAWIEKTLEEGRTRGYVETLFGRRRYVPDLNARVKGKREAAERMAFNMPVQGTAADLMKLAMVRLFPQLREVGARMLLQVHDELLLEAPKERAEEVAALAKEVMEGVWPLAVPLEVEVGIGEDWLAAKG

SEQ ID NO: 3505 - DNA, 2523 bp, synthetic construct
  misc_feature 1..2523: note = Variant of DNA polymerase I from Thermus sp. strain 2.9
  source 1..2523: mol_type = other DNA
atgcaccatcatcatcatcatggcggtagcggcgtgttaccggtgttcgagcctaaaggtcgcgtgcttctggttgatggccatcatctcgcgtatcgtaacttctttgccctgaaaggattaaccaccagcagcggcgagccggtacagggtgtctacggctttgcaaagtcgctcctgaaagctctgaaagaagacggtgatgtggtgattgttgtctttgatgcgaaagcgccaagttttcgccacgaagcgtacgaagcttacaaagccgggcgtgctccaacgccggaagactttcctcgccaattggcgcttatgaaggaattagtggatttgcttggcctcgaacgcttggaagttcccggtttcgaggcagacgacgtattagcgactctcgcaaagaaagccgaacgtgagggctatgaagtccagatcttgacagcagatcgcgatcttttccagcttttatctccgcgcatctcggtgttacacccggaagggcatcgtatcaccccggaatggctctgggagaaatatggtttgcgtcccgaacaatgggtggattttcgcgccttagcaggcgatccgagcgacaatattccgggagttaaaggtatcggcgagaagacggcgctcaagctccttaaagaatgggggtcgttggagaacttgcttaagaatttagatcaggtcaaaccagagtcagtgcgtgagaagattcttgctcacctcgaagacctcaaattaagccgcgaattgtcccgtgtacgcaccgatttgccgctcgaagttgatttccaacgccgccgcgaacctgactgggagggtcttaaagcgtttttagagcgtcttgaatttggttcgctcttgcatgaattcggccttttagaaagcccgttaccagccgaagaagcaccttggccaccgcccgagggcgcgtttttaggttaccgtttgagtcgcccggaaccgatgtgggccgaattactggctcttgcagcgtctgcccagggacgtgtgtatcgcgcggaagaccctcatggtgcgctccgcggcctcttcgaagtccgtggactccttgccaaagacttagctgttgttgcattgcgcgaaggtcttgatttacctccgactgatgatccaatgcttcttgcgtacctcttggacccgtcaaacacgacgcccgaaggcgtagcccgtcgttacggcggcgagtggaccgaagatgcagcgaaacgcgcgttattggccgaacgtttgcacgccaatttattaggacgtttgcaaggcgaggaacgtctcctctggctttacgaagaagtggagaaaccattgagtcgcgtgctcgcgcatatggaagctaccggtgtcaaattagacgtggcgtatttggagaatctcagccttgaagttgctgcccacatgcgccgcttggaggaagaagtattccgtttagcaggccgttcctttcgccttaattctcgcgatcagttagaacgtgtgttgttcgatgaacttggtctccctcctatcggcaagacagagaagaccggtaaacgtagcacttcagcggcggttttagaagctcttcgcgaagtccatcccattgtggacaagatcttgcaataccgcgaactcgcgaaattgaaaggcacctatattgaccgtcttccggcattagtccacccgaaaacgggacgcctccatacccgcttcaaccaaacagccacggcgaccggtcgtttgtcctcctctgatccaaaccttcagaatattccagtacgtaccccattgggccagaagatccgccgtgcgtttgtagctgaggagggttggcgtttagtggccctcgattatagccaaattgaattacgtgtccttgcccatctttctggcgatgagaacctcatccgcgtgtttcaggaaggcaaagacattcacactcaaacggcaagctggatgtttggattatcagctgaagcgatcgatcctttgatgcgtcgtgcagcgaagaccatcaatttcggtgttctctacggtatgagtgcctttcgtttgtcgcaggaattaggcattccctatgaagaagctcaggcgttcattcagaaatactttcaaagctatcccaaagttaaagcatggatcgagaagactctcgaagaaggccgcacacgtggttacgtagagaccttatttggacgtcgccgctatgttcccgatttaaacgctcgcgtgaaaggcaagcgtgaagccgccgaacgcatggcgttcaacatgcctgtacagggcacggcagctgacctcatgaaacttgcaatggtgcgcctttttccacaattgcgtgaagttggtgcccgcatgctcttgcaggtccacgatgaactcttgttagaagcgccaaaagagcgtgcggaagaggtggcagccctcgcgaaagaagttatggaatttgtgtggcccttagcggtgcctcttgaagtcgaagttggtattggcgaggattggctggctgccaaagga

SEQ ID NO: 3506 - protein, 841 aa, synthetic construct
  REGION 1..841: note = Variant of DNA polymerase I from Thermus sp. strain 2.9
MHHHHHHGGSGVLPVFEPKGRVLLVDGHHLAYRNFFALKGLTTSSGEPVQGVYGFAKSLLKALKEDGDVVIVVFDAKAPSFRHEAYEAYKAGRAPTPEDFPRQLALMKELVDLLGLERLEVPGFEADDVLATLAKKAEREGYEVQILTADRDLFQLLSPRISVLHPEGHRITPEWLWEKYGLRPEQWVDFRALAGDPSDNIPGVKGIGEKTALKLLKEWGSLENLLKNLDQVKPESVREKILAHLEDLKLSRELSRVRTDLPLEVDFQRRREPDWEGLKAFLERLEFGSLLHEFGLLESPLPAEEAPWPPPEGAFLGYRLSRPEPMWAELLALAASAQGRVYRAEDPHGALRGLFEVRGLLAKDLAVVALREGLDLPPTDDPMLLAYLLDPSNTTPEGVARRYGGEWTEDAAKRALLAERLHANLLGRLQGEERLLWLYEEVEKPLSRVLAHMEATGVKLDVAYLENLSLEVAAHMRRLEEEVFRLAGRSFRLNSRDQLERVLFDELGLPPIGKTEKTGKRSTSAAVLEALREVHPIVDKILQYRELAKLKGTYIDRLPALVHPKTGRLHTRFNQTATATGRLSSSDPNLQNIPVRTPLGQKIRRAFVAEEGWRLVALDYSQIELRVLAHLSGDENLIRVFQEGKDIHTQTASWMFGLSAEAIDPLMRRAAKTINFGVLYGMSAFRLSQELGIPYEEAQAFIQKYFQSYPKVKAWIEKTLEEGRTRGYVETLFGRRRYVPDLNARVKGKREAAERMAFNMPVQGTAADLMKLAMVRLFPQLREVGARMLLQVHDELLLEAPKERAEEVAALAKEVMEFVWPLAVPLEVEVGIGEDWLAAKG

SEQ ID NO: 3507 - DNA, 2523 bp, synthetic construct
  misc_feature 1..2523: note = Variant of DNA polymerase I from Thermus sp. strain 2.9
  source 1..2523: mol_type = other DNA
atgcaccatcatcatcatcatggcggtagcggcgtgttagaggtgttcgagcctaaaggtcgcgtgcttctggttgatggccatcatctcgcgtatcgtaacttctttgccctgaaaggattaaccaccagcagcggcgagccggtacagggtgtctacggctttgcaaagtcgctcctgaaagctctgaaagaagacggtgatgtggtgattgttgtctttgatgcgaaagcgccaagttttcgccacgaagcgtacgaagcttacaaagccgggcgtgctccaacgccggaagactttcctcgccaattggcgcttatgaaggaattagtggatttgcttggcctcgaacgcttggaagttcccggtttcgaggcagacgacgtattagcgactctcgcaaagaaagccgaacgtgagggctatgaagtccagatcttgacagcagatcgcgatcttttccagcttttatctccgcgcatctcggtgttacacccggaagggcatcgtatcaccccggaatggctctgggagaaatatggtttgcgtcccgaacaatgggtggattttcgcgccttagcaggcgatccgagcgacaatattccgggagttaaaggtatcggcgagaagacggcgctcaagctccttaaagaatgggggtcgttggagaacttgcttaagaatttagatcaggtcaaaccagagtcagtgcgtgagaagattcttgctcacctcgaagacctcaaattaagccgcgaattgtcccgtgtacgcaccgatttgccgctcgaagttgatttccaacgccgccgcgaacctgactgggagggtcttaaagcgtttttagagcgtcttgaatttggttcgctcttgcatgaattcggccttttagaaagcccgttaccagccgaagaagcaccttggccaccgcccgagggcgcgtttttaggttaccgtttgagtcgcccggaaccgatgtgggccgaattactggctcttgcagcgtctgcccagggacgtgtgtatcgcgcggaagaccctcatggtgcgctccgcggcctcttcgaagtccgtggactccttgccaaagacttagctgttgttgcattgcgcgaaggtcttgatttacctccgactgatgatccaatgcttcttgcgtacctcttggacccgtcaaacacgacgcccgaaggcgtagcccgtcgttacggcggcgagtggaccgaagatgcagcgaaacgcgcgttattggccgaacgtttgcacgccaatttattaggacgtttgcaaggcgaggagcgtctcctctggctttacgaagaagtggagaaaccattgagtcgcgtgctcgcgcatatggaagctaccggtgtcaaattagacgtggcgtatttggagaatctcagccttgaagttgctgcccacatgcgccgcttggaggaagaagtattccgtttagcaggccgttcctttcgccttaattctcgcgatcagttagaacgtgtgttgttcgatgaacttggtctccctcctatcggcaagacagagaagaccggtaaacgtagcacttcagcggcggttttagaagctcttcgcgaagtccatcccattgtggacaagatcttgcaataccgcgaactcgcgaaattgaaaggcacctatattgaccgtcttccggcattagtccacccgaaaacgggacgcctccatacccgcttcaaccaaacagccacggcgaccggtcgtttgtcctcctctgatccaaaccttcagaatattccagtacgtaccccgttgggccagaagatccgccgtgcgtttgtagctgaggagggttggcgtttagtggccctcgattatagccaaattgaattacgtgtccttgcccatctttctggcgatgagaacctcatccgcgtgtttcaggaaggcaaagacattcacactcaaacggcaagctggatgtttggattatcagctgaagcgatcgatcctttgatgcgtcgtgcagcgaagaccatcaatttcggtgttctctacggtatgagtgcctttcgtttgtcgcaggaattaggcattccctatgaagaagctcaggcgttcattcagaaatactttcaaagctatcccaaagttaaagcatggatcgagaagactctcgaagaaggccgcacacgtggttacgtagagaccttatttggacgtcgccgctatgttcccgatttaaacgctcgcgtgaaaggcaagcgtgaagccgccgaacgcatggcgttcaacatgcctgtacagggcacggcagctgacctcatgaaacttgcaatggtgcgcctttttccacaattgcgtgaagttggtgcccgcatgctcttgcaggtccacgatgaactcttgttagaagcgccaaaagagcgtgcggaagaggtggcagccctcgcgaaagaagttatggaaggcgtgtggcccttagcggtgcctcttgaagtcgaagttggtattggcgaggattggctggctgccaaagga

SEQ ID NO: 3508 - protein, 841 aa, synthetic construct
  REGION 1..841: note = Variant of DNA polymerase I from Thermus sp. strain 2.9
MHHHHHHGGSGVLEVFEPKGRVLLVDGHHLAYRNFFALKGLTTSSGEPVQGVYGFAKSLLKALKEDGDVVIVVFDAKAPSFRHEAYEAYKAGRAPTPEDFPRQLALMKELVDLLGLERLEVPGFEADDVLATLAKKAEREGYEVQILTADRDLFQLLSPRISVLHPEGHRITPEWLWEKYGLRPEQWVDFRALAGDPSDNIPGVKGIGEKTALKLLKEWGSLENLLKNLDQVKPESVREKILAHLEDLKLSRELSRVRTDLPLEVDFQRRREPDWEGLKAFLERLEFGSLLHEFGLLESPLPAEEAPWPPPEGAFLGYRLSRPEPMWAELLALAASAQGRVYRAEDPHGALRGLFEVRGLLAKDLAVVALREGLDLPPTDDPMLLAYLLDPSNTTPEGVARRYGGEWTEDAAKRALLAERLHANLLGRLQGEERLLWLYEEVEKPLSRVLAHMEATGVKLDVAYLENLSLEVAAHMRRLEEEVFRLAGRSFRLNSRDQLERVLFDELGLPPIGKTEKTGKRSTSAAVLEALREVHPIVDKILQYRELAKLKGTYIDRLPALVHPKTGRLHTRFNQTATATGRLSSSDPNLQNIPVRTPLGQKIRRAFVAEEGWRLVALDYSQIELRVLAHLSGDENLIRVFQEGKDIHTQTASWMFGLSAEAIDPLMRRAAKTINFGVLYGMSAFRLSQELGIPYEEAQAFIQKYFQSYPKVKAWIEKTLEEGRTRGYVETLFGRRRYVPDLNARVKGKREAAERMAFNMPVQGTAADLMKLAMVRLFPQLREVGARMLLQVHDELLLEAPKERAEEVAALAKEVMEGVWPLAVPLEVEVGIGEDWLAAKG

SEQ ID NO: 3509 - DNA, 2523 bp, synthetic construct
  misc_feature 1..2523: note = Variant of DNA polymerase I from Thermus sp. strain 2.9
  source 1..2523: mol_type = other DNA
atgcaccatcatcatcatcatggcggtagcggcgtgttagaggtgttcgagcctaaaggtcgcgtgcttctggttgatggccatcatctcgcgtatcgtaacttctttgccctgaaaggattaaccaccagcagcggcgagccggtacagggtgtctacggctttgcaaagtcgctcctgaaagctctgaaagaagacggtgatgtggtgattgttgtctttgatgcgaaagcgccaagttttcgccacgaagcgtacgaagcttacaaagccgggcgtgctccaacgccggaagactttcctcgccaattggcgcttatgaaggaattagtggatttgcttggcctcgaacgcttggaagttcccggtttcgaggcagacgacgtattagcgactctcgcaaagaaagccgaacgtgagggctatgaagtccagatcttgacagcagatcgcgatcttttccagcttttatctccgcgcatctcggtgttacacccggaagggcatcgtatcaccccggaatggctctgggagaaatatggtttgcgtcccgaacaatgggtggattttcgcgccttagcaggcgatccgagcgacaatattccgggagttaaaggtatcggcgagaagacggcgctcaagctccttaaagaatgggggtcgttggagaacttgcttaagaatttagatcaggtcaaaccagagtcagtgcgtgagaagattcttgctcacctcgaagacctcaaattaagccgcgaattgtcccgtgtacgcaccgatttgccgctcgaagttgatttccaacgccgccgcgaacctgactgggagggtcttaaagcgtttttagagcgtcttgaatttggttcgctcttgcatgaattcggccttttagaaagcccgttaccagccgaagaagcaccttggccaccgcccgagggcgcgtttttaggttaccgtttgagtcgcccggaaccgatgtgggccgaattactggctcttgcagcgtctgcccagggacgtgtgtatcgcgcggaagaccctcatggtgcgctccgcggcctcttcgaagtccgtggactccttgccaaagacttagctgttgttgcattgcgcgaaggtcttgatttacctccgactgatgatccaatgcttcttgcgtacctcttggacccgtcaaacacgacgcctgaaggcgtagcccgtcgttacggcggcgagtggaccgaagatgcagcgaaacgcgcgttattggccgaacgtttgcacgccaatttattaggacgtttgcaaggcgaggaacgtctcctctggctttacgaagaagtggagaaaccattgagtcgcgtgctcgcgcatatggaagctaccggtgtcaaattagacgtggcgtatttggagaatctcagccttgaagttgctgcccacatgcgccgcttggaggaagaagtattccgtttagcaggccgttcctttcgccttaattctcgcgatcagttagaacgtgtgttgttcgatgaacttggtctccctcctatcggcaagacagagaagaccggtaaacgtagcacttcagcggcggttttagaagctcttcgcgaagtccatcccattgtggacaagatcttgcaataccgcgaactcgcgaaattgaaaggcacctatattgaccgtcttccggcattagtccacccgaaaacgggacgcctccatacccgcttcaaccaaacagccacggcgaccggtcgtttgtcctcctctgatccaaaccttcagaatattccagtacgtaccccattgggccagaagatccgccgtgcgtttgtagctgaggagggttggcgtttagtggccctcgattatagccaaattgaattacgtgtccttgcccatctttctggcgatgagaacctcatccgcgtgtttcaggaaggcaaagacattcacactcaaacggcaagctggatgtttggattatcagctgaagcgatcgatcctttgatgcgtcgtgcagcgaagaccatcaatttcggtgttctctacggtatgagtgcctttcgtttgtcgcaggaattaggcattccctatgaagaagctcaggcgttcattcagaaatactttcaaagctatcccaaagttaaagcatggatcgagaagactctcgaagaaggccgcacccgtggttacgtagagaccttatttggacgtcgccgctatgttcccgatttaaacgctcgcgtgaaaggcaagcgtgaagccgccgaacgcatggcgttcaacatgcctgtacagggcacggcagctgacctcatgaaacttgcaatggtgcgcctttttccacaattgcgtgaagttggtgcccgcatgctcttgcaggtccacgatgaactcttgttagaagcgccaaaagagcgtgcggaagaggtggcagccctcgcgaaagaagttatggaaggcgtgtggcccttagcggtgcctcttgaagtcgaagttggtattggcgaggattggctggctgccaaagga

SEQ ID NO: 3510 - protein, 841 aa, synthetic construct; identical to SEQ ID NO: 3508
  REGION 1..841: note = Variant of DNA polymerase I from Thermus sp. strain 2.9

SEQ ID NO: 3511 - DNA, 2523 bp, synthetic construct
  misc_feature 1..2523: note = Variant of DNA polymerase I from Thermus sp. strain 2.9
  source 1..2523: mol_type = other DNA
atgcaccatcatcatcatcatggcggtagcggcgtgttacctgtgttcgagcctaaaggtcgcgtgcttctggttgatggccatcatctcgcgtatcgtaacttctttgccctgaaaggattaaccaccagcagcggcgagccggtacagggtgtctacggctttgcaaagtcgctcctgaaagctctgaaagaagacggtgatgtggtgattgttgtctttgatgcgaaagcgccaagttttcgccacgaagcgtacgaagcttacaaagccgggcgtgctcctacgccggaagactttcctcgccaattggcgcttatgaaggaattagtggatttgcttggcctcgaacgcttggaagttcccggtttcgaggcagacgacgtattagcgactctcgcaaagaaagccgaacgcgagggctatgaagtccagatcttgacagcagatcgcgatcttttccagcttttatctccgcgcatctcggtgttacacccggaagggcatcgtatcaccccggaatggctctgggagaaatatggtttgcgtcccgaacaatgggtggattttcgcgccttagcaggcgatccgagcgacaatattccgggagttaaaggtatcggcgagaagacggcgctcaagctccttaaagaatgggggtcgttggagaacttgcttaagaatttagatcaggtcaaaccagagtcagtgcgtgagaagattcttgctcacctcgaagacctcaaattaagccgcgaattgtcccgtgtacgcaccgatttgccgctcgaagttgatttccaacgccgccgcgaacctgactgggagggtcttaaagcgtttttagagcgtcttgaatttggttcgctcttgcatgaattcggccttttagaaagcccgttaccagccgaagaagcaccttggccaccgcccgagggcgcgtttttaggttaccgtttgagtcgcccggaaccgatgtgggccgaattactggctcttgcagcgtctgcccagggacgtgtgtatcgcgcggaagaccctcatggtgcgctccgcggcctcttcgaagtccgtggactccttgccaaagacttagctgttgttgcattgcgcgaaggtcttgatttacctccgactgatgatccaatgcttcttgcgtacctcttggacccgtcaaacacgacgcccgaaggcgtagcccgtcgttacggcggcgagtggaccgaagatgcagcgaaacgcgcgttattggccgaacgtttgcacgccaatttattaggacgtttgcaaggcgaggaacgtctcctctggctttacgaagaagtggagaaaccattgagtcgcgtgctcgcgcatatggaagctaccggtgtcaaattagacgtggcgtatttggagaatctcagccttgaagttgctgcccacatgcgccgcttggaggaagaagtattccgtttagcaggccgttcctttcgccttaattctcgcgatcagttagaacgtgtgttgttcgatgaacttggtctccctcctatcggcaagacagagaagaccggtaaacgtagcacttcagcggcggttttagaagctcttcgcgaagtccatcccattgtggacaagatcttgcaataccgcgaactcgcgaaattgaaaggcacctatattgaccgtcttccggcattagtccacccgaaaacgggacgcctccatacccgcttcaaccaaacagccacggcgaccggtcgtttgtcctcctctgatccaaaccttcagaatattccagtacgtaccccattgggccagaagatccgccgtgcgtttgtagctgaggagggttggcgtttagtggccctcgattatagccaaattgaattacgtgtccttgcccatctttctggcgatgagaacctcatccgcgtgtttcaggaaggcaaagacattcacactcaaacggcaagctggatgtttggattatcagctgaagcgatcgatcctttgatgcgtcgtgcagcgaagaccatcaatttcggtgttctctacggtatgagtgcctttcgtttgtcgcaggaattaggcattccctatgaagaagctcaggcgttcattcagaaatactttcaaagctatcccaaagttaaagcatggatcgagaagactctcgaagaaggccgccaccgtggttacgtagagaccttatttggacgtcgccgctatgttcccgatttaaacgctcgcgtgaaaggcaagcgtgaagccgccgaacgcatggcgttcaacatgcctgtacagggcacggcagctgacctcatgaaacttgcaatggtgcgcctttttccacaattgcgtgaagttggtgcccgcatgctcttgcaggtccacgatgaactcttgttagaagcgccaaaagagcgtgcggaagaggtggcagccctcgcgaaagaagttatggaaggcgtgtggcccttagcggtgcctcttgaagtcgaagttggtattggcgaggattggctggctgccaaagga

SEQ ID NO: 3512 - protein, 841 aa, synthetic construct
  REGION 1..841: note = Variant of DNA polymerase I from Thermus sp. strain 2.9
MHHHHHHGGSGVLPVFEPKGRVLLVDGHHLAYRNFFALKGLTTSSGEPVQGVYGFAKSLLKALKEDGDVVIVVFDAKAPSFRHEAYEAYKAGRAPTPEDFPRQLALMKELVDLLGLERLEVPGFEADDVLATLAKKAEREGYEVQILTADRDLFQLLSPRISVLHPEGHRITPEWLWEKYGLRPEQWVDFRALAGDPSDNIPGVKGIGEKTALKLLKEWGSLENLLKNLDQVKPESVREKILAHLEDLKLSRELSRVRTDLPLEVDFQRRREPDWEGLKAFLERLEFGSLLHEFGLLESPLPAEEAPWPPPEGAFLGYRLSRPEPMWAELLALAASAQGRVYRAEDPHGALRGLFEVRGLLAKDLAVVALREGLDLPPTDDPMLLAYLLDPSNTTPEGVARRYGGEWTEDAAKRALLAERLHANLLGRLQGEERLLWLYEEVEKPLSRVLAHMEATGVKLDVAYLENLSLEVAAHMRRLEEEVFRLAGRSFRLNSRDQLERVLFDELGLPPIGKTEKTGKRSTSAAVLEALREVHPIVDKILQYRELAKLKGTYIDRLPALVHPKTGRLHTRFNQTATATGRLSSSDPNLQNIPVRTPLGQKIRRAFVAEEGWRLVALDYSQIELRVLAHLSGDENLIRVFQEGKDIHTQTASWMFGLSAEAIDPLMRRAAKTINFGVLYGMSAFRLSQELGIPYEEAQAFIQKYFQSYPKVKAWIEKTLEEGRHRGYVETLFGRRRYVPDLNARVKGKREAAERMAFNMPVQGTAADLMKLAMVRLFPQLREVGARMLLQVHDELLLEAPKERAEEVAALAKEVMEGVWPLAVPLEVEVGIGEDWLAAKG

SEQ ID NO: 3513 - DNA, 2523 bp, synthetic construct
  misc_feature 1..2523: note = Variant of DNA polymerase I from Thermus sp. strain 2.9
  source 1..2523: mol_type = other DNA
atgcaccatcatcatcatcatggcggtagcggcgtgttaccggtgttcgagcctaaaggtcgcgtgcttctggttgatggccatcatctcgcgtatcgtaacttctttgccctgaaaggattaaccaccagcagcggcgagccggtacagggtgtctacggctttgcaaagtcgctcctgaaagctctgaaagaagacggtgatgtggtgattgttgtctttgatgcgaaagcgccaagttttcgccacgaagcgtacgaagcttacaaagccgggcgtgctccaacgccggaagactttcctcgccaattggcgcttatgaaggaattagtggatttgcttggcctcgaacgcttggaagttcccggtttcgaggcagacgacgtattagcgactctcgcaaagaaagccgaacgtgagggctatgaagtccagatcttgacagcagatcgcgatcttttccagcttttatctccgcgcatctcggtgttacacccggaagggcatcgtatcaccccggaatggctctgggagaaatatggtttgcgtcccgaacaatgggtggattttcgcgccttagcaggcgatccgagcgacaatattccgggagttaaaggtatcggcgagaagacggcgctcaagctccttaaagaatgggggtcgttggagaacttgcttaagaatttagatcaggtcaaaccagagtcagtgcgtgagaagattcttgctcacctcgaagacctcaaattaagccgcgaattgtcccgtgtacgcaccgatttgccgctcgaagttgatttccaacgccgccgcgaacctgactgggagggtcttaaagcgtttttagagcgtcttgaatttggttcgctcttgcatgaattcggccttttagaaagcccgttaccagccgaagaagcaccttggccaccgcccgagggcgcgtttttaggttaccgtttgagtcgcccggaaccgatgtgggccgaattactggctcttgcagcgtctgcccagggacgtgtgtatcgcgcggaagaccctcatggtgcgctccgcggcctcttcgaagtccgtggactcggggccaaagacttagctgttgttgcattgcgcgaaggtcttgatttacctccgactgatgatccaatgcttcttgcgtacctcttggacccgtcaaacacgacgcccgaaggcgtagcccgtcgttacggcggcgagtggaccgaagatgcagcgaaacgcgcgttattggccgaacgtttgcacgccaatttattaggacgtttgcaaggcgaggaacgtctcctctggctttacgaagaagtggagaaaccattgagtcgcgtgctcgcgcatatggaagctaccggtgtcaaattagacgtggcgtatttggagaatctcagccttgaagttgctgcccacatgcgccgcttggaggaagaagtattccgtttagcaggccgttcctttcgccttaattctcgcgatcagttagaacgtgtgttgttcgatgaacttggtctccctcctatcggcaagacagagaagaccggtaaacgtagcacttcagcggcggttttagaagctcttcgcgaagtccatcccattgtggacaagatcttgcaataccgcgaactcgcgaaattgaaaggcacctatattgaccgtcttccggcattagtccacccgaaaacgggacgcctccatacccgcttcaaccaaacagccacggcgaccggtcgtttgtcctcctctgatccaaaccttcagaatattccagtacgtaccccattgggccagaagatccgccgtgcgtttgtagctgaggagggttggcgtttagtggccctcgattatagccaaattgaattacgtgtccttgcccatctttctggcgatgagaacctcatccgcgtgtttcaggaaggcaaagacattcacactcaaacggcaagctggatgtttggattatcagctgaagcgatcgatcctttgatgcgtcgtgcagcgaagaccatcaatttcggtgttctctacggtatgagtgcctttcgtttgtcgcaggaattaggcattccctatgaagaagctcaggcgttcattcagaaatactttcaaagctatcccaaagttaaagcatggatcgagaagactctcgaagaaggccgcacacgtggttacgtagagaccttatttggacgtcgccgctatgttcccgatttaaacgctcgcgtgaaaggcaagcgtgaagccgccgaacgcatggcgttcaacatgcctgtacagggcacggcagctgacctcatgaaacttgcaatggtgcgcctttttccacaattgcgtgaagttggtgcccgcatgctcttgcaggtccacgatgaactcttgttagaagcgccaaaagagcgtgcggaagaggtggcagccctcgcgaaagaagttatggaaggcgtgtggcccttagcggtgcctcttgaagtcgaagttggtattggcgaggattggctggctgccaaagga

SEQ ID NO: 3514 - protein, 841 aa, synthetic construct
  REGION 1..841: note = Variant of DNA polymerase I from Thermus sp. strain 2.9
MHHHHHHGGSGVLPVFEPKGRVLLVDGHHLAYRNFFALKGLTTSSGEPVQGVYGFAKSLLKALKEDGDVVIVVFDAKAPSFRHEAYEAYKAGRAPTPEDFPRQLALMKELVDLLGLERLEVPGFEADDVLATLAKKAEREGYEVQILTADRDLFQLLSPRISVLHPEGHRITPEWLWEKYGLRPEQWVDFRALAGDPSDNIPGVKGIGEKTALKLLKEWGSLENLLKNLDQVKPESVREKILAHLEDLKLSRELSRVRTDLPLEVDFQRRREPDWEGLKAFLERLEFGSLLHEFGLLESPLPAEEAPWPPPEGAFLGYRLSRPEPMWAELLALAASAQGRVYRAEDPHGALRGLFEVRGLGAKDLAVVALREGLDLPPTDDPMLLAYLLDPSNTTPEGVARRYGGEWTEDAAKRALLAERLHANLLGRLQGEERLLWLYEEVEKPLSRVLAHMEATGVKLDVAYLENLSLEVAAHMRRLEEEVFRLAGRSFRLNSRDQLERVLFDELGLPPIGKTEKTGKRSTSAAVLEALREVHPIVDKILQYRELAKLKGTYIDRLPALVHPKTGRLHTRFNQTATATGRLSSSDPNLQNIPVRTPLGQKIRRAFVAEEGWRLVALDYSQIELRVLAHLSGDENLIRVFQEGKDIHTQTASWMFGLSAEAIDPLMRRAAKTINFGVLYGMSAFRLSQELGIPYEEAQAFIQKYFQSYPKVKAWIEKTLEEGRTRGYVETLFGRRRYVPDLNARVKGKREAAERMAFNMPVQGTAADLMKLAMVRLFPQLREVGARMLLQVHDELLLEAPKERAEEVAALAKEVMEGVWPLAVPLEVEVGIGEDWLAAKG

SEQ ID NO: 3515 - DNA, 2523 bp, synthetic construct
  misc_feature 1..2523: note = Variant of DNA polymerase I from Thermus sp. strain 2.9
  source 1..2523: mol_type = other DNA
atgcaccatcatcatcatcatggcggtagcggcgtgttagaggtgttcgagcctaaaggtcgcgtgcttctggttgatggccatcatctcgcgtatcgtaacttctttgccctgaaaggattaaccaccagcagcggcgagccggtacagggtgtctacggctttgcaaagtcgctcctgaaagctctgaaagaagacggtgatgtggtgattgttgtctttgatgcgaaagcgccaagttttcgccacgaagcgtacgaagcttacaaagccgggcgtgctccaacgccggaagactttcctcgccaattggcgcttatgaaggaattagtggatttgcttggcctcgaacgcttggaagttcccggtttcgaggcagacgacgtattagcgactctcgcaaagaaagccgaacgtgagggctatgaagtccagatcttgacagcagatcgcgatcttttccagcttttatctccgcgcatctcggtgttacacccggaagggcatcgtatcaccccggaatggctctgggagaaatatggtttgcgtcccgaacaatgggtggattttcgcgccttagcaggcgatccgagcgacaatattccgggagttaaaggtatcggcgagaagacggcgctcaagctccttaaagaatgggggtcgttggagaacttgcttaagaatttagatcaggtcaaaccagagtcagtgcgtgagaagattcttgctcacctcgaagacctcaaattaagccgcgaattgtcccgtgtacgcaccgatttgccgctcgaagttgatttccaacgccgccgcgaacctgactgggagggtcttaaagcgtttttagagcgtcttgaatttggttcgctcttgcatgaattcggccttttagaaagcccgttaccagccgaagaagcaccttggccaccgcccgagggcgcgtttttaggttaccgtttgagtcgcccggaaccgatgtgggccgaattactggctcttgcagcgtctgcccagggacgtgtgtatcgcgcggaagaccctcatggtgcgctccgcggcctcttcgaagtccgtggactccttgccaaagacttagctgttgttgcattgcgcgaaggtcttgatttacctccgactgatgatccaatgcttcttgcgtacctcttggacccgtcaaacacgacgcccgaaggcgtagcccgtcgttacggcggcgagtggaccgaagatgcagcgaaacgcgcgttattggccgaacgtttgcacgccaatttattaggacgtttgcaaggcgaggaacgtctcctctggctttacgaagaagtggagaaaccattgagtcgcgtgctcgcgcatatggaagctaccggtgtcaaattagacgtggcgtatttggagaatctcagccttgaagttgctgcccacatgcgccgcttggaggaagaagtattccgtttagcaggccgttcctttcgccttaattctcgcgatcagttagaacgtgtgttgttcgatgaacttggtctccctcctatcggcaagacagagaagaccggtaaacgtagcacttcagcggcggttttagaagctcttcgcgaagtccatcccattgtggacaagatcttgcaataccgcgaactcgcgaaattgaaaggcacctatattgaccgtcttccggcattagtccacccgaaaacgggacgcctccatacccgcttcaaccaaacagccacggcgaccggtcgtttgtcctcctctgatccaaaccttcagaatattccagtacgtaccaaattgggccagaagatccgccgtgcgtttgtagctgaggagggttggcgtttagtggccctcgattatagccaaattgaattacgtgtccttgcccatctttctggcgatgagaacctcatccgcgtgtttcaggaaggcaaagacattcacactcaaacggcaagctggatgtttggattatcagctgaagcgatcgatcctttgatgcgtcgtgcagcgaagaccatcaatttcggtgttctctacggtatgagtgcctttcgtttgtcgcaggaattaggcattccctatgaagaagctcaggcgttcattcagaaatactttcaaagctatcccaaagttaaagcatggatcgagaagactctcgaagaaggccgcacacgtggttacgtagagaccttatttggacgtcgccgctatgttcccgatttaaacgctcgcgtgaaaggcaagcgtgaagccgccgaacgcatggcgttcaacatgcctgtacagggcacggcagctgacctcatgaaacttgcaatggtgcgcctttttccacaattgcgtgaagttggtgcccgcatgctcttgcaggtccacgatgaactcttgttagaagcgccaaaagagcgtgcggaagaggtggcagccctcgcgaaagaagttatggaaggcgtgtggcccttagcggtgcctcttgaagtcgaagttggtattggcgaggattggctggctgccaaagga

SEQ ID NO: 3516 - protein, 841 aa, synthetic construct
  REGION 1..841: note = Variant of DNA polymerase I from Thermus sp. strain 2.9
MHHHHHHGGSGVLEVFEPKGRVLLVDGHHLAYRNFFALKGLTTSSGEPVQGVYGFAKSLLKALKEDGDVVIVVFDAKAPSFRHEAYEAYKAGRAPTPEDFPRQLALMKELVDLLGLERLEVPGFEADDVLATLAKKAEREGYEVQILTADRDLFQLLSPRISVLHPEGHRITPEWLWEKYGLRPEQWVDFRALAGDPSDNIPGVKGIGEKTALKLLKEWGSLENLLKNLDQVKPESVREKILAHLEDLKLSRELSRVRTDLPLEVDFQRRREPDWEGLKAFLERLEFGSLLHEFGLLESPLPAEEAPWPPPEGAFLGYRLSRPEPMWAELLALAASAQGRVYRAEDPHGALRGLFEVRGLLAKDLAVVALREGLDLPPTDDPMLLAYLLDPSNTTPEGVARRYGGEWTEDAAKRALLAERLHANLLGRLQGEERLLWLYEEVEKPLSRVLAHMEATGVKLDVAYLENLSLEVAAHMRRLEEEVFRLAGRSFRLNSRDQLERVLFDELGLPPIGKTEKTGKRSTSAAVLEALREVHPIVDKILQYRELAKLKGTYIDRLPALVHPKTGRLHTRFNQTATATGRLSSSDPNLQNIPVRTKLGQKIRRAFVAEEGWRLVALDYSQIELRVLAHLSGDENLIRVFQEGKDIHTQTASWMFGLSAEAIDPLMRRAAKTINFGVLYGMSAFRLSQELGIPYEEAQAFIQKYFQSYPKVKAWIEKTLEEGRTRGYVETLFGRRRYVPDLNARVKGKREAAERMAFNMPVQGTAADLMKLAMVRLFPQLREVGARMLLQVHDELLLEAPKERAEEVAALAKEVMEGVWPLAVPLEVEVGIGEDWLAAKG

SEQ ID NO: 3517 - DNA, 2523 bp, synthetic construct
  misc_feature 1..2523: note = Variant of DNA polymerase I from Thermus sp. strain 2.9
  source 1..2523: mol_type = other DNA
atgcaccatcatcatcatcatggcggtagcggcgtgttacctgtgttcgagcctaaaggtcgcgtgcttctggttgatggccatcatctcgcgtatcgtaacttctttgccctgaaaggattaaccaccagcagcggcgagccggtacagggtgtctacggctttgcaaagtcgctcctgaaagctctgaaagaagacggtgatgtggtgattgttgtctttgatgcgaaagcgccaagttttcgccacgaagcgtacgaagcttacaaagccgggcgtgctccaacgccggaagactttcctcgccaattggcgcttatgaaggaattagtggatttgcttggcctcgaacgcttggaagttcccggtttcgaggcagacgacgtattagcgactctcgcaaagaaagccgaacgtgagggctatgaagtccagatcttgacagcagatcgcgatcttttccagcttttatctccgcgcatctcggtgttacacccggatgggcatcgtatcaccccggaatggctctgggagaaatatggtttgcgtcccgaacaatgggtggattttcgcgccttagcaggcgatccgagcgacaatattccgggagttaaaggtatcggcgagaagacggcgctcaagctccttaaagaatgggggtcgttggagaacttgcttaagaatttagatcaggtcaaaccagagtcagtgcgtgagaagattcttgctcacctcgaagacctcaaattaagccgcgaattgtcccgtgtacgcaccgatttgccgctcgaagttgatttccaacgccgccgcgaacctgactgggagggtcttaaagcgtttttagagcgtcttgaatttggttcgctcttgcatgaattcggccttttagaaagcccgttaccagccgaagaagcaccttggccaccgcccgagggcgcgtttttaggttaccgtttgagtcgcccggaaccgatgtgggccgaattactggctcttgcagcgtctgcccagggacgtgtgtatcgcgcggaagaccctcatggtgcgctccgcggcctcttcgaagtccgtggactccttgccaaagacttagctgttgttgcattgcgcgaaggtcttgatttacctccgactgatgatccaatgcttcttgcgtacctcttggacccgtcaaacacgacgcctgaaggcgtagcccgtcgttacggcggcgagtggaccgaagatgcagcgaaacgcgcgttattggccgaacgtttgcacgccaatttattaggacgtttgcaaggcgaggaacgtctcctctggctttacgaagaagtggagaaaccattgagtcgcgtgctcgcgcatatggaagctaccggtgtcaaattagacgtggcgtatttggagaatctcagccttgaagttgctgcccacatgcgccgcttggaggaagaagtattccgtttagcaggccgttcctttcgccttaattctcgcgatcagttagaacgtgtgttgttcgatgaacttggtctccctcctatcggcaagacagagaagaccggtaaacgtagcacttcagcggcggttttagaagctcttcgcgaagtccatcccattgtggacaagatcttgcaataccgcgaactcgcgaaattgaaaggcacctatattgaccgtcttccggcattagtccacccgaaaacgggacgcctccatacccgcttcaaccaaacagccacggcgaccggtcgtttgtcctcctctgatccaaaccttcagaatattccagtacgtaccccgttgggccagaagatccgccgtgcgtttgtagctgaggagggttggcgtttagtggccctcgattatagccaaattgaattacgtgtccttgcccatctttctggcgatgagaacctcatccgcgtgtttcaggaaggcaaagacattcacactcaaacggcaagctggatgtttggattatcagctgaagcgatcgatcctttgatgcgtcgtgcagcgaagaccatcaatttcggtgttctctacggtatgagtgcctttcgtttgtcgcaggaattaggcattccctatgaagaagctcaggcgttcattcagaaatactttcaaagctatcccaaagttaaagcatggatcgagaagactctcgaagaaggccgcacacgtggttacgtagagaccttatttggacgtcgccgctatgttcccgatttaaacgctcgcgtgaaaggcaagcgtgaagccgccgaacgcatggcgttcaacatgcctgtacagggcacggcagctgacctcatgaaacttgcaatggtgcgcctttttccacaattgcgtgaagttggtgcccgcatgctcttgcaggtccacgatgaactcttgttagaagcgccaaaagagcgtgcggaagaggtggcagccctcgcgaaagaagttatggaaggcgtgtggcccttagcggtgcctcttgaagtcgaagttggtattggcgaggattggctggctgccaaagga

SEQ ID NO: 3518 - protein, 841 aa, synthetic construct; identical to SEQ ID NO: 3370
  REGION 1..841: note = Variant of DNA polymerase I from Thermus sp. strain 2.9

SEQ ID NO: 3519 - DNA, 2523 bp, synthetic construct
  misc_feature 1..2523: note = Variant of DNA polymerase I from Thermus sp. strain 2.9
  source 1..2523: mol_type = other DNA
atgcaccatcatcatcatcatggcggtagcggcgtgttaccggtgttcgagcctaaaggtcgcgtgcttctggttgatggccatcatctcgcgtatcgtaacttctttgccctgaaaggattaaccaccagcagcggcgagccggtacagggtgtctacggctttgcaaagtcgctcctgaaagctctgaaagaagacggtgatgtggtgattgttgtctttgatgcgaaagcgccaagttttcgccacgaagcgtacgaagcttacaaagccgggcgtgctccaacgccggaagactttcctcgccaattggcgcttatgaaggaattagtggatttgcttggcctcgaacgcttggaagttcccggtttcgaggcagacgacgtattagcgactctcgcaaagaaagccgaacgtgagggctatgaagtccagatcttgacagcagatcgcgatcttttccagcttttatctccgcgcatctcggtgttacacccggaagggcatcgtatcaccccggaatggctctgggagaaatatggtttgcgtcccgaacaatgggtggattttcgcgccttagcaggcgatccgagcgacaatattccgggagttaaaggtatcggcgagaagacggcgctcaagctccttaaagaatgggggtcgttggagaacttgcttaagaatttagatcaggtcaaaccagagtcagtgcgtgagaagattcttgctcacctcgaagacctcaaattaagccgcgaattgtcccgtgtacgcaccgatttgccgctcgaagttgatttccaacgccgccgcgaacctgactgggagggtcttaaagcgtttttagagcgtcttgaatttggttcgctcttgcatgaattcggccttttagaatttccgttaccagccgaagaagcaccttggccaccgcccgagggcgcgtttttaggttaccgtttgagtcgcccggaaccgatgtgggccgaattactggctcttgcagcgtctgcccagggacgtgtgtatcgcgcggaagaccctcatggtgcgctccgcggcctcttcgaagtccgtggactccttgccaaagacttagctgttgttgcattgcgcgaaggtcttgatttacctccgactgatgatccaatgcttcttgcgtacctcttggacccgtcaaacacgacgcccgaaggcgtagcccgtcgttacggcggcgagtggaccgaagatgcagcgaaacgcgcgttattggccgaacgtttgcacgccaatttattaggacgtttgcaaggcgaggaacgtctcctctggctttacgaagaagtggagaaaccattgagtcgcgtgctcgcgcatatggaagctaccggtgtcaaattagacgtggcgtatttggagaatctcagccttgaagttgctgcccacatgcgccgcttggaggaagaagtattccgtttagcaggccgttcctttcgccttaattctcgcgatcagttagaacgtgtgttgttcgatgaacttggtctccctcctatcggcaagacagagaagaccggtaaacgtagcacttcagcggcggttttagaagctcttcgcgaagtccatcccattgtggacaagatcttgcaataccgcgaactcgcgaaattgaaaggcacctatattgaccgtcttccggcattagtccacccgaaaacgggacgcctccatacccgcttcaaccaaacagccacggcgaccggtcgtttgtcctcctctgatccaaaccttcagaatattccagtacgtaccccattgggccagaagatccgccgtgcgtttgtagctgaggagggttggcgtttagtggccctcgattatagccaaattgaattacgtgtccttgcccatctttctggcgatgagaacctcatccgcgtgtttcaggaaggcaaagacattcacactcaaacggcaagctggatgtttggattatcagctgaagcgatcgatcctttgatgcgtcgtgcagcgaagaccatcaatttcggtgttctctacggtatgagtgcctttcgtttgtcgcaggaattaggcattccctatgaagaagctcaggcgttcattcagaaatactttcaaagctatcccaaagttaaagcatggatcgagaagactctcgaagaaggccgcacacgtggttacgtagagaccttatttggacgtcgccgctatgttcccgatttaaacgctcgcgtgaaaggcaagcgtgaagccgccgaacgcatggcgttcaacatgcctgtacagggcacggcagctgacctcatgaaacttgcaatggtgcgcctttttccacaattgcgtgaagttggtgcccgcatgctcttgcaggtccacgatgaactcttgttagaagcgccaaaagagcgtgcggaagaggtggcagccctcgcgaaagaagttatggaaggcgtgtggcccttagcggtgcctcttgaagtcgaagttggtattggcgaggattggctggctgccaaagga

SEQ ID NO: 3520 - protein, 841 aa, synthetic construct
  REGION 1..841: note = Variant of DNA polymerase I from Thermus sp. strain 2.9
MHHHHHHGGSGVLPVFEPKGRVLLVDGHHLAYRNFFALKGLTTSSGEPVQGVYGFAKSLLKALKEDGDVVIVVFDAKAPSFRHEAYEAYKAGRAPTPEDFPRQLALMKELVDLLGLERLEVPGFEADDVLATLAKKAEREGYEVQILTADRDLFQLLSPRISVLHPEGHRITPEWLWEKYGLRPEQWVDFRALAGDPSDNIPGVKGIGEKTALKLLKEWGSLENLLKNLDQVKPESVREKILAHLEDLKLSRELSRVRTDLPLEVDFQRRREPDWEGLKAFLERLEFGSLLHEFGLLEFPLPAEEAPWPPPEGAFLGYRLSRPEPMWAELLALAASAQGRVYRAEDPHGALRGLFEVRGLLAKDLAVVALREGLDLPPTDDPMLLAYLLDPSNTTPEGVARRYGGEWTEDAAKRALLAERLHANLLGRLQGEERLLWLYEEVEKPLSRVLAHMEATGVKLDVAYLENLSLEVAAHMRRLEEEVFRLAGRSFRLNSRDQLERVLFDELGLPPIGKTEKTGKRSTSAAVLEALREVHPIVDKILQYRELAKLKGTYIDRLPALVHPKTGRLHTRFNQTATATGRLSSSDPNLQNIPVRTPLGQKIRRAFVAEEGWRLVALDYSQIELRVLAHLSGDENLIRVFQEGKDIHTQTASWMFGLSAEAIDPLMRRAAKTINFGVLYGMSAFRLSQELGIPYEEAQAFIQKYFQSYPKVKAWIEKTLEEGRTRGYVETLFGRRRYVPDLNARVKGKREAAERMAFNMPVQGTAADLMKLAMVRLFPQLREVGARMLLQVHDELLLEAPKERAEEVAALAKEVMEGVWPLAVPLEVEVGIGEDWLAAKG

SEQ ID NO: 3521 - DNA, 2523 bp, synthetic construct
  misc_feature 1..2523: note = Variant of DNA polymerase I from Thermus sp. strain 2.9
  source 1..2523: mol_type = other DNA
atgcaccatcatcatcatcatggcggtagcggcgtgttaccggtgttcgagcctaaaggtcgcgtgcttctggttgatggccatcatctcgcgtatcgtaacttctttgccctgaaaggattaaccaccagcagcggcgagccggtacagggtgtctacggctttgcaaagtcgctcctgaaagctctgaaagaagacggtgatgtggtgattgttgtctttgatgcgaaagcgccaagttttcgccacgaagcgtacgaagcttacaaagccgggcgtgctccaacgccggaagactttcctcgccaattggcgcttatgaaggaattagtggatttgcttggcctcgaacgcttggaagttcccggtttcgaggcagacgacgtattagcgactctcgcaaagaaagccgaacgtgagggctatgaagtccagatcttgacagcagatcgcgatcttttccagcttttatctccgcgcatctcggtgttacacccggaagggcatcgtatcaccccggaatggctctgggagaaatatggtttgcgtcccgaacaatgggtggattttcgcgccttagcaggcgatccgagcgacaatattccgggagttaaaggtatcggcgagaagacggcgctcaagctccttaaagaatgggggtcgttggagaacttgcttaagaatttagatcaggtcaaaccagagtcagtgcgtgagaagattcttgctcacctcgaagacctcaaattaagccgcgaattgtcccgtgtacgcaccgatttgccgctcgaagttgatttccaacgccgccgcgaacctgactgggagggtcttaaagcgtttttagagcgtcttgaatttggttcgctcttgcatgaattcggccttttagaaagcccgttaccagccgaagaagcaccttggccaccgcccgagggcgcgtttttaggttaccgtttgagtcgcccggaaccgatgtgggccgaattactggctcttgcagcgtctgcccagggacgtgtgtatcgcgcggaagaccctcatggtgcgctccgcggcctcttcgaagtccgtggactccttgccaaagacttagctgttgttgcattgcgcgaaggtcttgatttacctccgactgatgatccaatgcttcttgcgtacctcttggacccgtcaaacacgacgcccgaaggcgtagcccgtcgttacggcggcgagtggaccgaagatgcagcgaaacgcgcgttattggccgaacgtttgcacgccaatttattaggacgtttgcaaggcgaggaacgtctcctctggctttacgaagaagtggagaaaccattgagtcgcgtgctcgcgcatatggaagctaccggtgtcaaattagacgtggcgtatttggagaatctcagccttgaagttgctgcccacatgcgccgcttggaggaagaagtattccgtttagcaggccgttcctttcgccttaattctcgcgatcagttagaacgtgtgttgttcgatgaacttggtctccctcctatcggcaagacagagaagaccggtaaacgtagcacttcagcggcggttttagaagctcttcgcgaagtccatcccattgtggacaagatcttgcaataccgcgaactcgcgaaattgaaaggcacctatattgaccgtcttccggcattagtccacccgaaaacgggacgcctccatacccgcttcaaccaaacagccacggcgaccggtcgtttgtcctcctctgatccaaaccttcagaatattccagtacgtaccccattgggccagaagatccgccgtgcgtttgtagctgaggagggttggcgtttagtggccctcgattatagccaaattgaattacgtgtccttgcccatctttctggcgatgagaacctcatccgcgtgtttcaggaaggcaaagacattcacactcaaacggcaagctggatgtttggattatcagctgaagcgatcgatcctttgatgcgtcgtgcagcgaagaccatcaatttcggtgttctctacggtatgagtgcctttcgtttgtcgcaggaattaggcattccctatgaagaagctcaggcgttcattcagaaatactttcaaagctatcccaaagttaaagcatggatcgagaagactctcgaagaaggccgcacacgtggttacgtagagaccttatttggacgtcgccgctatgttcccgatttaaactgtcgcgtgaaaggcaagcgtgaagccgccgaacgcatggcgttcaacatgcctgtacagggcacggcagctgacctcatgaaacttgcaatggtgcgcctttttccacaattgcgtgaagttggtgcccgcatgctcttgcaggtccacgatgaactcttgttagaagcgccaaaagagcgtgcggaagaggtggcagccctcgcgaaagaagttatggaaggcgtgtggcccttagcggtgcctcttgaagtcgaagttggtattggcgaggattggctggctgccaaagga

SEQ ID NO: 3522 - protein, 841 aa, synthetic construct
  REGION 1..841: note = Variant of DNA polymerase I from Thermus sp. strain 2.9
MHHHHHHGGSGVLPVFEPKGRVLLVDGHHLAYRNFFALKGLTTSSGEPVQGVYGFAKSLLKALKEDGDVVIVVFDAKAPSFRHEAYEAYKAGRAPTPEDFPRQLALMKELVDLLGLERLEVPGFEADDVLATLAKKAEREGYEVQILTADRDLFQLLSPRISVLHPEGHRITPEWLWEKYGLRPEQWVDFRALAGDPSDNIPGVKGIGEKTALKLLKEWGSLENLLKNLDQVKPESVREKILAHLEDLKLSRELSRVRTDLPLEVDFQRRREPDWEGLKAFLERLEFGSLLHEFGLLESPLPAEEAPWPPPEGAFLGYRLSRPEPMWAELLALAASAQGRVYRAEDPHGALRGLFEVRGLLAKDLAVVALREGLDLPPTDDPMLLAYLLDPSNTTPEGVARRYGGEWTEDAAKRALLAERLHANLLGRLQGEERLLWLYEEVEKPLSRVLAHMEATGVKLDVAYLENLSLEVAAHMRRLEEEVFRLAGRSFRLNSRDQLERVLFDELGLPPIGKTEKTGKRSTSAAVLEALREVHPIVDKILQYRELAKLKGTYIDRLPALVHPKTGRLHTRFNQTATATGRLSSSDPNLQNIPVRTPLGQKIRRAFVAEEGWRLVALDYSQIELRVLAHLSGDENLIRVFQEGKDIHTQTASWMFGLSAEAIDPLMRRAAKTINFGVLYGMSAFRLSQELGIPYEEAQAFIQKYFQSYPKVKAWIEKTLEEGRTRGYVETLFGRRRYVPDLNCRVKGKREAAERMAFNMPVQGTAADLMKLAMVRLFPQLREVGARMLLQVHDELLLEAPKERAEEVAALAKEVMEGVWPLAVPLEVEVGIGEDWLAAKG

SEQ ID NO: 3523 - DNA, 2523 bp, synthetic construct
  misc_feature 1..2523: note = Variant of DNA polymerase I from Thermus sp. strain 2.9
  source 1..2523: mol_type = other DNA
atgcaccatcatcatcatcatggcggtagcggcgtgttaccggtgttcgagcctaaaggtcgcgtgcttctggttgatggccatcatctcgcgtatcgtaacttctttgccctgaaaggattaaccaccagcagcggcgagccggtacagggtgtctacggctttgcaaagtcgctcctgaaagctctgaaagaagacggtgatgtggtgattgttgtctttgatgcgaaagcgccaagttttcgccacgaagcgtacgaagcttacaaagccgggcgtgctccaacgccggaagactttcctcgccaattggcgcttatgaaggaattagtggatttgcttggcctcgaacgcttggaagttcccggtttcgaggcagacgacgtattagcgactctcgcaaagaaagccgaacgtgagggctatgaagtccagatcttgacagcagatcgcgatcttttccagcttttatctccgcgcatctcggtgttacacccggaagggcatcgtatcaccccggaatggctctgggagaaatatggtttgcgtcccgaacaatgggtggattttcgcgccttagcaggcgatccgagcgacaatattccgggagttaaaggtatcggcgagaagacggcgctcaagctccttaaagaatgggggtcgttggagaacttgcttaagaatttagatcaggtcaaaccagagtcagtgcgtgagaagattcttgctcacctcgaagacctcaaattaagccgcgaattgtcccgtgtacgcaccgatttgccgctcgaagttgatttccaacgccgccgcgaacctgactgggagggtcttaaagcgtttttagagcgtcttgaatttggttcgctcttgcatgaattcggccttttagaaagcccgttaccagccgaagaagcaccttggccaccgcccgagggcgcgtttttaggttaccgtttgagtcgcccggaaccgatgtgggccgaattactggctcttgcagcgtctgcccagggacgtgtgtatcgcgcggaagaccctcatggtgcgctccgcggcctcttcgaagtccgtggactccttgccaaagacttagctgttgttgcattgcgcgaaggtcttgatttacctccgactgatgatccaatgcttcttgcgtacctcttggacccgtcaaacacgacgcccgaaggcgtagcccgtcgttacggcggcgagtggaccgaagatgcagcgaaacgcgcgttattggccgaacgtttgcacgccaatttattaggacgtttgcaaggcgaggaacgtctcctctggctttacgaagaagtggagaaaccattgagtcgcgtgctcgcgcatatggaagctaccggtgtcaaattagacgtggcgtatttggagaatctcagccttgaagttgctgcccacatgcgccgcttggaggaagaagtattccgtttagcaggcagttcctttcgccttaattctcgcgatcagttagaacgtgtgttgttcgatgaacttggtctccctcctatcggcaagacagagaagaccggtaaacgtagcacttcagcggcggttttagaagctcttcgcgaagtccatcccattgtggacaagatcttgcaataccgcgaactcgcgaaattgaaaggcacctatattgaccgtcttccggcattagtccacccgaaaacgggacgcctccatacccgcttcaaccaaacagccacggcgaccggtcgtttgtcctcctctgatccaaaccttcagaatattccagtacgtaccccattgggccagaagatccgccgtgcgtttgtagctgaggagggttggcgtttagtggccctcgattatagccaaattgaattacgtgtccttgcccatctttctggcgatgagaacctcatccgcgtgtttcaggaaggcaaagacattcacactcaaacggcaagctggatgtttggattatcagctgaagcgatcgatcctttgatgcgtcgtgcagcgaagaccatcaatttcggtgttctctacggtatgagtgcctttcgtttgtcgcaggaattaggcattccctatgaagaagctcaggcgttcattcagaaatactttcaaagctatcccaaagttaaagcatggatcgagaagactctcgaagaaggccgcacacgtggttacgtagagaccttatttggacgtcgccgctatgttcccgatttaaacgctcgcgtgaaaggcaagcgtgaagccgccgaacgcatggcgttcaacatgcctgtacagggcacggcagctgacctcatgaaacttgcaatggtgcgcctttttccacaattgcgtgaagttggtgcccgcatgctcttgcaggtccacgatgaactcttgttagaagcgccaaaagagcgtgcggaagaggtggcagccctcgcgaaagaagttatggaaggcgtgtggcccttagcggtgcctcttgaagtcgaagttggtattggcgaggattggctggctgccaaagga

SEQ ID NO: 3524 - protein, 841 aa, synthetic construct
  REGION 1..841: note = Variant of DNA polymerase I from Thermus sp. strain 2.9
MHHHHHHGGSGVLPVFEPKGRVLLVDGHHLAYRNFFALKGLTTSSGEPVQGVYGFAKSLLKALKEDGDVVIVVFDAKAPSFRHEAYEAYKAGRAPTPEDFPRQLALMKELVDLLGLERLEVPGFEADDVLATLAKKAEREGYEVQILTADRDLFQLLSPRISVLHPEGHRITPEWLWEKYGLRPEQWVDFRALAGDPSDNIPGVKGIGEKTALKLLKEWGSLENLLKNLDQVKPESVREKILAHLEDLKLSRELSRVRTDLPLEVDFQRRREPDWEGLKAFLERLEFGSLLHEFGLLESPLPAEEAPWPPPEGAFLGYRLSRPEPMWAELLALAASAQGRVYRAEDPHGALRGLFEVRGLLAKDLAVVALREGLDLPPTDDPMLLAYLLDPSNTTPEGVARRYGGEWTEDAAKRALLAERLHANLLGRLQGEERLLWLYEEVEKPLSRVLAHMEATGVKLDVAYLENLSLEVAAHMRRLEEEVFRLAGSSFRLNSRDQLERVLFDELGLPPIGKTEKTGKRSTSAAVLEALREVHPIVDKILQYRELAKLKGTYIDRLPALVHPKTGRLHTRFNQTATATGRLSSSDPNLQNIPVRTPLGQKIRRAFVAEEGWRLVALDYSQIELRVLAHLSGDENLIRVFQEGKDIHTQTASWMFGLSAEAIDPLMRRAAKTINFGVLYGMSAFRLSQELGIPYEEAQAFIQKYFQSYPKVKAWIEKTLEEGRTRGYVETLFGRRRYVPDLNARVKGKREAAERMAFNMPVQGTAADLMKLAMVRLFPQLREVGARMLLQVHDELLLEAPKERAEEVAALAKEVMEGVWPLAVPLEVEVGIGEDWLAAKG

SEQ ID NO: 3525 - DNA, 2523 bp, synthetic construct
  misc_feature 1..2523: note = Variant of DNA polymerase I from Thermus sp. strain 2.9
  source 1..2523: mol_type = other DNA
atgcaccatcatcatcatcatggcggtagcggcgtgttacctgtgttcgagcctaaaggtcgcgtgcttctggttgatggccatcatctcgcgtatcgtaacttctttgccctgaaaggattaaccaccagcagcggcgagccggtacagggtgtctacggctttgcaaagtcgctcctgaaagctctgaaagaagacggtgatgtggtgattgttgtctttgatgcgaaagcgccaagttttcgccacgaagcgtacgaagcttacaaagccgggcgtgctccaacgccggaagactttcctcgccaattggcgcttatgaaggaattagtggatttgcttggcctcgaacgcttggaagttcccggtttcgaggcagacgacgtattagcgactctcgcaaagaaagccgaacgtgagggctatgaagtccagatcttgacagcagatcgcgatcttttccagcttttatctccgcgcatctcggtgttacacccggaagggcatcgtatcaccccggaatggctctgggagaaatatggtttgcgtcccgaacaatgggtggattttcgcgccttagcaggcgatccgagcgacaatattccgggagttaaaggtatcggcgagaagacggcgctcaagctccttaaagaatgggggtcgttggagaacttgcttaagaatttagatcaggtcaaaccagagtcagtgcgtgagaagattcttgctcacctcgaagacctcaaattaagccgcgaattgtcccgtgtacgcaccgatttgccgctcgaagttgatttccaacgccgccgcgaacctgactgggagggtcttaaagcgtttttagagcgtcttgaatttggttcgctcttgcatgaattcggccttttagaaagcccgttaccagccgaagaagcaccttggccaccgcccgagggcgcgtttttaggttaccgtttgagtcgcccggaaccgatgtgggccgaattactggctcttgcagcgtctgcccagggacgtgtgtatcgcgcggaagaccctcatggtgcgctccgcggcctcttcgaagtccgtggactccttgccaaagacttagctgttgttgcattgcgcgaaggtcttgatttacctccgactgatgatccaatgcttcttgcgtacctcttggacccgtcaaacacgacgcccgaaggcgtagcccgtcgttacggcggcgagtggaccgaagatgcagcgaaacgcgcgttattggccgaacgtttgcacgccaatttattaggacgtttgcaaggcgagaagcgtctcctctggctttacgaagaagtggagaaaccattgagtcgcgtgctcgcgcatatggaagctaccggtgtcaaattagacgtggcgtatttggagaatctcagccttgaagttgctgcccacatgcgccgcttggaggaagaagtattccgtttagcaggccgttcctttcgccttaattctcgcgatcagttagaaaaggtgttgttcgatgaacttggtctccctcctatcggcaagacagagaagaccggtaaacgtagcacttcagcggcggttttagaagctcttcgcgaagtccatcccattgtggacaagatcttgcaataccgcgaactcgcgaaattgaaaggcacctatattgaccgtcttccggcattagtccacccgaaaacgggacgcctccatacccgcttcaaccaaacagccacggcgaccggtcgtttgtcctcctctgatccaaaccttcagaatattccagtacgtaccccattgggccagaagatccgccgtgcgtttgtagctgaggagggttggcgtttagtggccctcgattatagccaaattgaattacgtgtccttgcccatctttctggcgatgagaacctcatccgcgtgtttcaggaaggcaaagacattcacactcaaacggcaagctggatgtttggattatcagctgaagcgatcgatcctttgatgcgtcgtgcagcgaagaccatcaatttcggtgttctctacggtatgagtgcctttcgtttgtcgcaggaattaggcattccctatgaagaagctcaggcgttcattcagaaatactttcaaagctatcccaaagttaaagcatggatcgagaagactctcgaagaaggccgccaccgtggttacgtagagaccttatttggacgtcgccgctatgttcccgatttaaacgctcgcgtgaaaggcaagcgtgaagccgccgaacgcatggcgttcaacatgcctgtacagggcacggcagctgacctcatgaaacttgcaatggtgcgcctttttccacaattgcgtgaagttggtgcccgcatgctcttgcaggtccacgatgaactcttgttagaagcgccaaaagagcgtgcggaagaggtggcagccctcgcgaaagaagttatggaaggcgtgtggcccttagcggtgcctcttgaagtcgaagttggtattggcgaggattggctggctgccaaagga

SEQ ID NO: 3526 - protein, 841 aa, synthetic construct
  REGION 1..841: note = Variant of DNA polymerase I from Thermus sp. strain 2.9
MHHHHHHGGSGVLPVFEPKGRVLLVDGHHLAYRNFFALKGLTTSSGEPVQGVYGFAKSLLKALKEDGDVVIVVFDAKAPSFRHEAYEAYKAGRAPTPEDFPRQLALMKELVDLLGLERLEVPGFEADDVLATLAKKAEREGYEVQILTADRDLFQLLSPRISVLHPEGHRITPEWLWEKYGLRPEQWVDFRALAGDPSDNIPGVKGIGEKTALKLLKEWGSLENLLKNLDQVKPESVREKILAHLEDLKLSRELSRVRTDLPLEVDFQRRREPDWEGLKAFLERLEFGSLLHEFGLLESPLPAEEAPWPPPEGAFLGYRLSRPEPMWAELLALAASAQGRVYRAEDPHGALRGLFEVRGLLAKDLAVVALREGLDLPPTDDPMLLAYLLDPSNTTPEGVARRYGGEWTEDAAKRALLAERLHANLLGRLQGEKRLLWLYEEVEKPLSRVLAHMEATGVKLDVAYLENLSLEVAAHMRRLEEEVFRLAGRSFRLNSRDQLEKVLFDELGLPPIGKTEKTGKRSTSAAVLEALREVHPIVDKILQYRELAKLKGTYIDRLPALVHPKTGRLHTRFNQTATATGRLSSSDPNLQNIPVRTPLGQKIRRAFVAEEGWRLVALDYSQIELRVLAHLSGDENLIRVFQEGKDIHTQTASWMFGLSAEAIDPLMRRAAKTINFGVLYGMSAFRLSQELGIPYEEAQAFIQKYFQSYPKVKAWIEKTLEEGRHRGYVETLFGRRRYVPDLNARVKGKREAAERMAFNMPVQGTAADLMKLAMVRLFPQLREVGARMLLQVHDELLLEAPKERAEEVAALAKEVMEGVWPLAVPLEVEVGIGEDWLAAKG

SEQ ID NO: 3527 - DNA, 2523 bp, synthetic construct
  misc_feature 1..2523: note = Variant of DNA polymerase I from Thermus sp. strain 2.9
  source 1..2523: mol_type = other DNA
atgcaccatcatcatcatcatggcggtagcggcgtgttaccggtgttcgagcctaaaggtcgcgtgcttctggttgatggccatcatctcgcgtatcgtaacttctttgccctgaaaggattaaccaccagcagcggcgagccggtacagggtgtctacggctttgcaaagtcgctcctgaaagctctgaaagaagacggtgatgtggtgattgttgtctttgatgcgaaagcgccaagttttcgccacgaagcgtacgaagcttacaaagccgggcgtgctccaacgccggaagactttcctcgccaattggcgcttatgaaggaattagtggatttgcttggcctcgaacgcttggaagttcccggtttcgaggcagacgacgtattagcgactctcgcaaagaaagccgaacgtgagggctatgaagtccagatcttgacagcagatcgcgatcttttccagcttttatctccgcgcatctcggtgttacacccggaagggcatcgtatcaccccggaatggctctgggagaaatatggtttgcgtcccgaacaatgggtggattttcgcgccttagcaggcgatccgagcgacaatattccgggagttaaaggtatcggcgagaagacggcgctcaagctccttaaagaatgggggtcgttggagaacttgcttaagaatttagatcaggtcaaaccagagtcagtgcgtgagaagattcttgctcacctcgaagacctcaaattaagccgcgaattgtcccgtgtacgcaccgatttgccgctcgaagttgatttccaacgccgccgcgaacctgactgggagggtcttaaagcgtttttagagcgtcttgaatttggttcgctcttgcatgaattcggccttttagaaagcccgttaccagccgaagaagcaccttggccaccgcccgagggcgcgtttttaggttaccgtttgagtcgcccggaaccgatgtgggccgaattactggctcttgcagcgtctgcccagggacgtgtgtatcgcgcggaagaccctcatggtgcgctccgcggcctcttcgaagtccgtggactccttgccaaagacttagctgttgttgcattgcgcgaaggtcttgatttacctccgactgatgatccaatgcttcttgcgtacctcttggacccgtcaaacacgacgcccgaaggcgtagcccgtcgttacggcggcgagtggaccgaagatgcagcgaaacgcgcgttattggccgaacgtttgcacgccaatttattaggacgtttgcaaggcgaggaacgtctcctctggctttacgaagaagtggagaaaccattgagtcgcgtgctcgcgcatatggaagctaccggtgtcaaattagacgtggcgtatttggagaatctcagccttgaagttgctgcccacatgcgccgcttggaggaagaagtattccgtttagcaggccgttcctttcgccttaattctcgcgatcagttagaacgtgtgttgttcgatgaacttggtctccctcctatcggcaagacagagaagaccggtaaacgtagcacttcagcggcggttttagaagctcttcgcgaagtccatcccattgtggacaagatcttgcaataccgcgaactcgcgaaattgaaaggcacctatattgaccgtcttccggcattagtccacccgaaaacgggacgcctccatacccgcttcaaccaaacagccacggcgaccggtcgtttgtcctcctctgatccaaaccttcagaatattccagtacgtaccccattgggccagaagatccgccgtgcgtttgtagctgaggagggttggcgtttagtggccctcgattatagccaaattgaattacgtgtccttgcccatctttctggcgatgagaacctcatccgcgtgtttcaggaaggcaaagacattcacactcaaacggcaagctggatgtttggattatcagctgaagcgatcgatcctttgatgcgtcgtgcagcgaagaccatcaatttcggtgttctctacggtatgagtgcctttcgtttgtcgcaggaattaggcattccctatgaagaagctcaggcgttcattcagaaatactttcaaagctatcccaaagttaaagcatggatcgagaagactctcgaagaaggccgcacacgtggttacgtagagaccttatttggacgtcgccgctatgttcccgatttaaacgctcgcgtgaaaggcaagcgtgaagccgccgaacgcatggcgttcaacatgcctgtacagggcacggcagctgacctcatgaaacttgcaatggtgcgcctttttccacaattgcgtgaagttggtgcccgcatgctcttgcaggtccacgatgaactcttgttagaagcgccaaaagagcgtgcggaagaggtggcagccctcgcgaaagaagttatggaaggcgtgtggcccttagcggtgcctcttgaagtcgaaatgggtattggcgaggattggctggctgccaaagga

SEQ ID NO: 3528 - protein, 841 aa, synthetic construct
  REGION 1..841: note = Variant of DNA polymerase I from Thermus sp. strain 2.9
MHHHHHHGGSGVLPVFEPKGRVLLVDGHHLAYRNFFALKGLTTSSGEPVQGVYGFAKSLLKALKEDGDVVIVVFDAKAPSFRHEAYEAYKAGRAPTPEDFPRQLALMKELVDLLGLERLEVPGFEADDVLATLAKKAEREGYEVQILTADRDLFQLLSPRISVLHPEGHRITPEWLWEKYGLRPEQWVDFRALAGDPSDNIPGVKGIGEKTALKLLKEWGSLENLLKNLDQVKPESVREKILAHLEDLKLSRELSRVRTDLPLEVDFQRRREPDWEGLKAFLERLEFGSLLHEFGLLESPLPAEEAPWPPPEGAFLGYRLSRPEPMWAELLALAASAQGRVYRAEDPHGALRGLFEVRGLLAKDLAVVALREGLDLPPTDDPMLLAYLLDPSNTTPEGVARRYGGEWTEDAAKRALLAERLHANLLGRLQGEERLLWLYEEVEKPLSRVLAHMEATGVKLDVAYLENLSLEVAAHMRRLEEEVFRLAGRSFRLNSRDQLERVLFDELGLPPIGKTEKTGKRSTSAAVLEALREVHPIVDKILQYRELAKLKGTYIDRLPALVHPKTGRLHTRFNQTATATGRLSSSDPNLQNIPVRTPLGQKIRRAFVAEEGWRLVALDYSQIELRVLAHLSGDENLIRVFQEGKDIHTQTASWMFGLSAEAIDPLMRRAAKTINFGVLYGMSAFRLSQELGIPYEEAQAFIQKYFQSYPKVKAWIEKTLEEGRTRGYVETLFGRRRYVPDLNARVKGKREAAERMAFNMPVQGTAADLMKLAMVRLFPQLREVGARMLLQVHDELLLEAPKERAEEVAALAKEVMEGVWPLAVPLEVEMGIGEDWLAAKG

SEQ ID NO: 3529 - DNA, 2523 bp, synthetic construct; identical to SEQ ID NO: 3321
  misc_feature 1..2523: note = Variant of DNA polymerase I from Thermus sp. strain 2.9
  source 1..2523: mol_type = other DNA

SEQ ID NO: 3530 - protein, 841 aa, synthetic construct; identical to SEQ ID NO: 3322
  REGION 1..841: note = Variant of DNA polymerase I from Thermus sp. strain 2.9

SEQ ID NO: 3531 - DNA, 2523 bp, synthetic construct
  misc_feature 1..2523: note = Variant of DNA polymerase I from Thermus sp. strain 2.9
  source 1..2523: mol_type = other DNA
atgcaccatcatcatcatcatggcggtagcggcgtgttaccggtgttcgagcctaaaggtcgcgtgcttctggttgatggccatcatctcgcgtatcgtaacttctttgccctgaaaggattaaccaccagcagcggcgagccggtacagggtgtctacggctttgcaaagtcgctcctgaaagctctgaaagaagacggtgatgtggtgattgttgtctttgatgcgaaagcgccaagttttcgccacgaagcgtacgaagcttacaaagccgggcgtgctccaacgccggaagactttcctcgccaattggcgcttatgaaggaattagtggatttgcttggcctcgaacgcttggaagttcccggtttcgaggcagacgacgtattagcgactctcgcaaagaaagccgaacgtgagggctatgaagtccagatcttgacagcagatcgcgatcttttccagcttttatctccgcgcatctcggtgttacacccggaagggcatcgtatcaccccggaatggctctgggagaaatatggtttgcgtcccgaacaatgggtggattttcgcgccttagcaggcgatccgagcgacaatattccgggagttaaaggtatcggcgagaagacggcgctcaagctccttaaagaatgggggtcgttggagaacttgcttaagaatttagatcaggtcaaaccagagtcagtgcgtgagaagattcttgctcacctcgaagacctcaaattaagccgcgaattgtcccgtgtacgcaccgatttgccgctcgaagttgatttccaacgccgccgcgaacctgactgggagggtcttaaagcgtttttagagcgtcttgaatttggttcgctcttgcatgaattcggccttttagaaagcccgttaccagccgaagaagcaccttggccaccgcccgagggcgcgtttttaggttaccgtttgagtcgcccggaaccgatgtgggccgaattactggctcttgcagcgtctgcccagggacgtgtgtatcgcgcggaagaccctcatggtgcgctccgcggcctcttcgaagtccgtggactccttgccaaagacttagctgttgttgcattgcgcgaaggtcttgatttacctccgactgatgatccaatgcttcttgcgtacctcttggacccgtcaaacacgacgcccgaaggcgtagcccgtcgttacggcggcgagtggaccgaagatgcagcgaaacgcgcgttattggccgaacgtttgcacgccaatttattaaggcgtttgcaaggcgaggaacgtctcctctggctttacgaagaagtggagaaaccattgagtcgcgtgctcgcgcatatggaagctaccggtgtcaaattagacgtggcgtatttggagaatctcagccttgaagttgctgcccacatgcgccgcttggaggaagaagtattccgtttagcaggccgttcctttcgccttaattctcgcgatcagttagaacgtgtgttgttcgatgaacttggtctccctcctatcggcaagacagagaagaccggtaaacgtagcacttcagcggcggttttagaagctcttcgcgaagtccatcccattgtggacaagatcttgcaataccgcgaactcgcgaaattgaaaggcacctatattgaccgtcttccggcattagtccacccgaaaacgggacgcctccatacccgcttcaaccaaacagccacggcgaccggtcgtttgtcctcctctgatccaaaccttcagaatattccagtacgtaccccattgggccagaagatccgccgtgcgtttgtagctgaggagggttggcgtttagtggccctcgattatagccaaattgaattacgtgtccttgcccatctttctggcgatgagaacctcatccgcgtgtttcaggaaggcaaagacattcacactcaaacggcaagctggatgtttggattatcagctgaagcgatcgatcctttgatgcgtcgtgcagcgaagaccatcaatttcggtgttctctacggtatgagtgcctttcgtttgtcgcaggaattaggcattccctatgaagaagctcaggcgttcattcagaaatactttcaaagctatcccaaagttaaagcatggatcgagaagactctcgaagaaggccgcacacgtggttacgtagagaccttatttggacgtcgccgctatgttcccgatttaaacgctcgcgtgaaaggcaagcgtgaagccgccgaacgcatggcgttcaacatgcctgtacagggcacggcagctgacctcatgaaacttgcaatggtgcgcctttttccacaattgcgtgaagttggtgcccgcatgctcttgcaggtccacgatgaactcttgttagaagcgccaaaagagcgtgcggaagaggtggcagccctcgcgaaagaagttatggaaggcgtgtggcccttagcggtgcctcttgaagtcgaagttggtattggcgaggattggctggctgccaaagga

SEQ ID NO: 3532 - protein, 841 aa, synthetic construct; identical to SEQ ID NO: 3418
  REGION 1..841: note = Variant of DNA polymerase I from Thermus sp. strain 2.9

SEQ ID NO: 3533 - DNA, 2523 bp, synthetic construct
  misc_feature 1..2523: note = Variant of DNA polymerase I from Thermus sp. strain 2.9
  source 1..2523: mol_type = other DNA
atgcaccatcatcatcatcatggcggtagcggcgtgttaccggtgttcgagcctaaaggtcgcgtgcttctggttgatggccatcatctcgcgtatcgtaacttctttgccctgaaaggattaaccaccagcagcggcgagccggtacagggtgtctacggctttgcaaagtcgctcctgaaagctctgaaagaagacggtgatgtggtgattgttgtctttgatgcgaaagcgccaagttttcgccacgaagcgtacgaagcttacaaagccgggcgtgctccaacgccggaagactttcctcgccaattggcgcttatgaaggaattagtggatttgcttggcctcgaacgcttggaagttcccggtttcgaggcagacgacgtattagcgactctcgcaaagaaagccgaacgtgagggctatgaagtccagatcttgacagcagatcgcgatcttttccagcttttatctccgcgcatctcggtgttacacccggaagggcatcgtatcaccccggaatggctctgggagaaatatggtttgcgtcccgaacaatgggtggattttcgcgccttagcaggcgatccgagcgacaatattccgggagttaaaggtatcggcgagaagacggcgctcaagctccttaaagaatgggggtcgttggagaacttgcttaagaatttagatcaggtcaaaccagagtcagtgcgtgagaagattcttgctcacctcgaagacctcaaattaagccgcgaattgtcccgtgtacgcaccgatttgccgctcgaagttgatttccaacgccgccgcgaacctgactgggagggtcttaaagcgtttttagagcgtcttgaatttggttcgctcttgcatgaattcggccttttagaaagcccgttaccagccgaagaagcaccttggccaccgcccgagggcgcgtttttaggttaccgtttgagtcgcccggaaccgatgtgggccgaattactggctcttgcagcgtctgcccagggacgtgtgtatcgcgcggaagaccctcatggtgcgctccgcggcctcttcgaagtccgtggactccttgccaaagacttagctgttgttgcattgcgcgaaggtcttgatttacctccgactgatgatccaatgcttcttgcgtacctcttggacccgtcaaacacgacgcccgaaggcgtagcccgtcgttacggcggcgagtggaccgaagatgcagcgaaacgcgcgttattggccgaacgtttgcacgccaatttattaggacgtttgcaaggcgaggaacgtctcctctggctttacgaagaagtggagaaaccattgagtcgcgtgctcgcgcatatggaagctaccggtgtcaaattagacgtggcgtatttggagaatctcagccttgaagttgctgcccacatgcgccgcttggaggaagaagtagtccgtttagcaggccgttcctttcgccttaattctcgcgatcagttagaacgtgtgttgttcgatgaacttggtctccctcctatcggcaagacagagaagaccggtaaacgtagcacttcagcggcggttttagaagctcttcgcgaagtccatcccattgtggacaagatcttgcaataccgcgaactcgcgaaattgaaaggcacctatattgaccgtcttccggcattagtccacccgaaaacgggacgcctccatacccgcttcaaccaaacagccacggcgaccggtcgtttgtcctcctctgatccaaaccttcagaatattccagtacgtaccccattgggccagaagatccgccgtgcgtttgtagctgaggagggttggcgtttagtggccctcgattatagccaaattgaattacgtgtccttgcccatctttctggcgatgagaacctcatccgcgtgtttcaggaaggcaaagacattcacactcaaacggcaagctggatgtttggattatcagctgaagcgatcgatcctttgatgcgtcgtgcagcgaagaccatcaatttcggtgttctctacggtatgagtccgtttcgtttgtcgcaggaattaggcattccctatgaagaagctcaggcgttcattcagaaatactttcaaagctatcccaaagttaaagcatggatcgagaagactctcgaagaaggccgcacacgtggttacgtagagaccttatttggacgtcgccgctatgttcccgatttaaacgctcgcgtgaaaggcaagcgtgaagccgccgaacgcatggcgttcaacatgcctgtacagggcacggcagctgacctcatgaaacttgcaatggtgcgcctttttccacaattgcgtgaagttggtgcccgcatgctcttgcaggtccacgatgaactcttgttagaagcgccaaaagagcgtgcggaagaggtggcagccctcgcgaaagaagttatggaaggcgtgtggcccttagcggtgcctcttgaagtcgaagttggtattggcgaggattggctggctgccaaagga

SEQ ID NO: 3534 - protein, 841 aa, synthetic construct
  REGION 1..841: note = Variant of DNA polymerase I from Thermus sp. strain 2.9
MHHHHHHGGSGVLPVFEPKGRVLLVDGHHLAYRNFFALKGLTTSSGEPVQGVYGFAKSLLKALKEDGDVVIVVFDAKAPSFRHEAYEAYKAGRAPTPEDFPRQLALMKELVDLLGLERLEVPGFEADDVLATLAKKAEREGYEVQILTADRDLFQLLSPRISVLHPEGHRITPEWLWEKYGLRPEQWVDFRALAGDPSDNIPGVKGIGEKTALKLLKEWGSLENLLKNLDQVKPESVREKILAHLEDLKLSRELSRVRTDLPLEVDFQRRREPDWEGLKAFLERLEFGSLLHEFGLLESPLPAEEAPWPPPEGAFLGYRLSRPEPMWAELLALAASAQGRVYRAEDPHGALRGLFEVRGLLAKDLAVVALREGLDLPPTDDPMLLAYLLDPSNTTPEGVARRYGGEWTEDAAKRALLAERLHANLLGRLQGEERLLWLYEEVEKPLSRVLAHMEATGVKLDVAYLENLSLEVAAHMRRLEEEVVRLAGRSFRLNSRDQLERVLFDELGLPPIGKTEKTGKRSTSAAVLEALREVHPIVDKILQYRELAKLKGTYIDRLPALVHPKTGRLHTRFNQTATATGRLSSSDPNLQNIPVRTPLGQKIRRAFVAEEGWRLVALDYSQIELRVLAHLSGDENLIRVFQEGKDIHTQTASWMFGLSAEAIDPLMRRAAKTINFGVLYGMSPFRLSQELGIPYEEAQAFIQKYFQSYPKVKAWIEKTLEEGRTRGYVETLFGRRRYVPDLNARVKGKREAAERMAFNMPVQGTAADLMKLAMVRLFPQLREVGARMLLQVHDELLLEAPKERAEEVAALAKEVMEGVWPLAVPLEVEVGIGEDWLAAKG

SEQ ID NO: 3535 - DNA, 2523 bp, synthetic construct
  misc_feature 1..2523: note = Variant of DNA polymerase I from Thermus sp. strain 2.9
  source 1..2523: mol_type = other DNA
atgcaccatcatcatcatcatggcggtagcggcgtgttaccggtgttcgagcctaaaggtcgcgtgcttctggttgatggccatcatctcgcgtatcgtaacttctttgccctgaaaggattaaccaccagcagcggcgagccggtacagggtgtctacggctttgcaaagtcgctcctgaaagctctgaaagaagacggtgatgtggtgattgttgtctttgatgcgaaagcgccaagttttcgccacgaagcgtacgaagcttacaaagccgggcgtgctccaacgccggaagactttcctcgccaattggcgcttatgaaggaattagtggatttgcttggcctcgaacgcttggaagttcccggtttcgaggcagacgacgtattagcgactctcgcaaagaaagccgaacgtgagggctatgaagtccagatcttgacagcagatcgcgatcttttccagcttttatctccgcgcatctcggtgttacacccggaagggcatcgtatcaccccggaatggctctgggagaaatatggtttgcgtcccgaacaatgggtggattttcgcgccttagcaggcgatccgagcgacaatattccgggagttaaaggtatcggcgagaagacggcgctcaagctccttaaagaatgggggtcgttggagaacttgcttaagaatttagatcaggtcaaaccagagtcagtgcgtgagaagattcttgctcacctcgaagacctcaaattaagccgcgaattgtcccgtgtacgcaccgatttgccgctcgaagttgatttccaacgccgccgcgaacctgactgggagggtcttaaagcgtttttagagcgtcttgaatttggttcgctcttgcatgaattcggccttttagaaagcccgttaccagccgaagaagcaccttggccaccgcccgagggcgcgtttttaggttaccgtttgagtcgcccggaaccgatgtgggccgaattactggctcttgcagcgtctgcccagggacgtgtgtatcgcgcggaagaccctcatggtgcgctccgcggcctcttcgaagtccgtggactccttgccaaagacttagctgttgttgcattgcgcgaaggtcttgatttacctccgactgatgatccaatgcttcttgcgtacctcttggacccgtcaaacacgacgcccgaaggcgtagcccgtcgttacggcggcgagtggaccgaagatgcagcgaaacgcgcgttattggccgaacgtttgcacgccaatttattaggacgtttgcaaggcgaggaacgtctcctctggctttacggtgaagtggagaaaccattgagtcgcgtgctcgcgcatatggaagctaccggtgtcaaattagacgtggcgtatttggagaatctcagccttgaagttgctgcccacatgcgccgcttggaggaagaagtattccgtttagcaggccgttcctttcgccttaattctcgcgatcagttagaacgtgtgttgttcgatgaacttggtctccctcctatcggcaagacagagaagaccggtaaacgtagcacttcagcggcggttttagaagctcttcgcgaagtccatcccattgtggacaagatcttgcaataccgcgaactcgcgaaattgaaaggcacctatattgaccgtcttccggcattagtccacccgaaaacgggacgcctccatacccgcttcaaccaaacagccacggcgaccggtcgtttgtcctcctctgatccaaaccttcagaatattccagtacgtaccccattgggccagaagatccgccgtgcgtttgtagctgaggagggttggcgtttagtggccctcgattatagccaaattgaattacgtgtccttgcccatctttctggcgatgagaacctcatccgcgtgtttcaggaaggcaaagacattcacactcaaacggcaagctggatgtttggattatcagctgaagcgatcgatcctttgatgcgtcgtgcagcgaagaccatcaatttcggtgttctctacggtatgagtgcctttcgtttgtcgcaggaattaggcattccctatgaagaagctcaggcgttcattcagaaatactttcaaagctatcccaaagttaaagcatggatcgagaagactctcgaagaaggccgcacacgtggttacgtagagaccttatttggacgtcgccgctatgttcccgatttaaacgctcgcgtgaaaggcaagcgtgaagccgccgaacgcatggcgttcaacatgcctgtacagggcacggcagctgacctcatgaaacttgcaatggtgcgcctttttccacaattgcgtgaagttggtgcccgcatgctcttgcaggtccacgatgaactcttgttagaagcgccaaaagagcgtgcggaagaggtggcagccctcgcgaaagaagttatggaaggcgtgtggcccttagcggtgcctcttgaagtcgaagttggtattggcgaggattggctggctgccaaagga

SEQ ID NO: 3536 - protein, 841 aa, synthetic construct
  REGION 1..841: note = Variant of DNA polymerase I from Thermus sp. strain 2.9
MHHHHHHGGSGVLPVFEPKGRVLLVDGHHLAYRNFFALKGLTTSSGEPVQGVYGFAKSLLKALKEDGDVVIVVFDAKAPSFRHEAYEAYKAGRAPTPEDFPRQLALMKELVDLLGLERLEVPGFEADDVLATLAKKAEREGYEVQILTADRDLFQLLSPRISVLHPEGHRITPEWLWEKYGLRPEQWVDFRALAGDPSDNIPGVKGIGEKTALKLLKEWGSLENLLKNLDQVKPESVREKILAHLEDLKLSRELSRVRTDLPLEVDFQRRREPDWEGLKAFLERLEFGSLLHEFGLLESPLPAEEAPWPPPEGAFLGYRLSRPEPMWAELLALAASAQGRVYRAEDPHGALRGLFEVRGLLAKDLAVVALREGLDLPPTDDPMLLAYLLDPSNTTPEGVARRYGGEWTEDAAKRALLAERLHANLLGRLQGEERLLWLYGEVEKPLSRVLAHMEATGVKLDVAYLENLSLEVAAHMRRLEEEVFRLAGRSFRLNSRDQLERVLFDELGLPPIGKTEKTGKRSTSAAVLEALREVHPIVDKILQYRELAKLKGTYIDRLPALVHPKTGRLHTRFNQTATATGRLSSSDPNLQNIPVRTPLGQKIRRAFVAEEGWRLVALDYSQIELRVLAHLSGDENLIRVFQEGKDIHTQTASWMFGLSAEAIDPLMRRAAKTINFGVLYGMSAFRLSQELGIPYEEAQAFIQKYFQSYPKVKAWIEKTLEEGRTRGYVETLFGRRRYVPDLNARVKGKREAAERMAFNMPVQGTAADLMKLAMVRLFPQLREVGARMLLQVHDELLLEAPKERAEEVAALAKEVMEGVWPLAVPLEVEVGIGEDWLAAKG

SEQ ID NO: 3537 - DNA, 2523 bp, synthetic construct
  misc_feature 1..2523: note = Variant of DNA polymerase I from Thermus sp. strain 2.9
  source 1..2523: mol_type = other DNA
atgcaccatcatcatcatcatggcggtagcggcgtgttaccggtgttcgagcctaaaggtcgcgtgcttctggttgatggccatcatctcgcgtatcgtaacttctttgccctgaaaggattaaccaccagcagcggcgagccggtacagggtgtctacggctttgcaaagtcgctcctgaaagctctgaaagaagacggtgatgtggtgattgttgtctttgatgcgaaagcgccaagttttcgccacgaagcgtacgaagcttacaaagccgggcgtgctccaacgccggaagactttcctcgccaattggcgcttatgaaggaattagtggatttgcttggcctcgaacgcttggaagttcccggtttcgaggcagacgacgtattagcgactctcgcaaagaaagccgaacgtgagggctatgaagtccagatcttgacagcagatcgcgatcttttccagcttttatctccgcgcatctcggtgttacacccggaagggcatcgtatcaccccggaatggctctgggagaaatatggtttgcgtcccgaacaatgggtggattttcgcgccttagcaggcgatccgagcgacaatattccgggagttaaaggtatcggcgagaagacggcgctcaagctccttaaagaatgggggtcgttggagaacttgcttaagaatttagatcaggtcaaaccagagtcagtgcgtgagaagattcttgctcacctcgaagacctcaaattaagccgcgaattgtcccgtgtacgcaccgatttgccgctcgaagttgatttccaacgccgccgcgaacctgactgggagggtcttaaagcgtttttagagcgtcttgaatttggttcgctcttgcatgaattcggccttttagaagagccgttaccagccgaagaagcaccttggccaccgcccgagggcgcgtttttaggttaccgtttgagtcgcccggaaccgatgtgggccgaattactggctcttgcagcgtctgcccagggacgtgtgtatcgcgcggaagaccctcatggtgcgctccgcggcctcttcgaagtccgtggactccttgccaaagacttagctgttgttgcattgcgcgaaggtcttgatttacctccgactgatgatccaatgcttcttgcgtacctcttggacccgtcaaacacgacgcccgaaggcgtagcccgtcgttacggcggcgagtggaccgaagatgcagcgaaacgcgcgttattggccgaacgtttgcacgccaatttattaggacgtttgcaaggcgaggaacgtctcctctggctttacgaagaagtggagaaaccattgagtcgcgtgctcgcgcatatggaagctaccggtgtcaaattagacgtggcgtatttggagaatctcagccttgaagttgctgcccacatgcgccgcttggaggaagaagtattccgtttagcaggccgttcctttcgccttaattctcgcgatcagttagaacgtgtgttgttcgatgaacttggtctccctcctatcggcaagacagagaagaccggtaaacgtagcacttcagcggcggttttagaagctcttcgcgaagtccatcccattgtggacaagatcttgcaataccgcgaactcgcgaaattgaaaggcacctatattgaccgtcttccggcattagtccacccgaaaacgggacgcctccatacccgcttcaaccaaacagccacggcgaccggtcgtttgtcctcctctgatccaaaccttcagaatattccagtacgtaccccattgggccagaagatccgccgtgcgtttgtagctgaggagggttggcgtttagtggccctcgattatagccaaattgaattacgtgtccttgcccatctttctggcgatgagaacctcatccgcgtgtttcaggaaggcaaagacattcacactcaaacggcaagctggatgtttggattatcagctgaagcgatcgatcctttgatgcgtcgtgcagcgaagaccatcaatttcggtgttctctacggtatgagtgcctttcgtttgtcgcaggaattaggcattccctatgaagaagctcaggcgttcattcagaaatactttcaaagctatcccaaagttaaagcatggatcgagaagactctcgaagaaggccgcacacgtggttacgtagagaccttatttggacgtcgccgctatgttcccgatttaaacgctcgcgtgaaaggcaagcgtgaagccgccgaacgcatggcgttcaacatgcctgtacagggcacggcagctgacctcatgaaacttgcaatggtgcgcctttttccacaattgcgtgaagttggtgcccgcatgctcttgcaggtccacgatgaactcttgttagaagcgccaaaagagcgtgcggaagaggtggcagccctcgcgaaagaagttatggaaggcgtgtggcccttagcggtgcctcttgaagtcgaagttggtattggcgaggattggctggctgccaaagga

SEQ ID NO: 3538 - protein, 841 aa, synthetic construct
  REGION 1..841: note = Variant of DNA polymerase I from Thermus sp. strain 2.9
MHHHHHHGGSGVLPVFEPKGRVLLVDGHHLAYRNFFALKGLTTSSGEPVQGVYGFAKSLLKALKEDGDVVIVVFDAKAPSFRHEAYEAYKAGRAPTPEDFPRQLALMKELVDLLGLERLEVPGFEADDVLATLAKKAEREGYEVQILTADRDLFQLLSPRISVLHPEGHRITPEWLWEKYGLRPEQWVDFRALAGDPSDNIPGVKGIGEKTALKLLKEWGSLENLLKNLDQVKPESVREKILAHLEDLKLSRELSRVRTDLPLEVDFQRRREPDWEGLKAFLERLEFGSLLHEFGLLEEPLPAEEAPWPPPEGAFLGYRLSRPEPMWAELLALAASAQGRVYRAEDPHGALRGLFEVRGLLAKDLAVVALREGLDLPPTDDPMLLAYLLDPSNTTPEGVARRYGGEWTEDAAKRALLAERLHANLLGRLQGEERLLWLYEEVEKPLSRVLAHMEATGVKLDVAYLENLSLEVAAHMRRLEEEVFRLAGRSFRLNSRDQLERVLFDELGLPPIGKTEKTGKRSTSAAVLEALREVHPIVDKILQYRELAKLKGTYIDRLPALVHPKTGRLHTRFNQTATATGRLSSSDPNLQNIPVRTPLGQKIRRAFVAEEGWRLVALDYSQIELRVLAHLSGDENLIRVFQEGKDIHTQTASWMFGLSAEAIDPLMRRAAKTINFGVLYGMSAFRLSQELGIPYEEAQAFIQKYFQSYPKVKAWIEKTLEEGRTRGYVETLFGRRRYVPDLNARVKGKREAAERMAFNMPVQGTAADLMKLAMVRLFPQLREVGARMLLQVHDELLLEAPKERAEEVAALAKEVMEGVWPLAVPLEVEVGIGEDWLAAKG

SEQ ID NO: 3539 - DNA, 2523 bp, synthetic construct
  misc_feature 1..2523: note = Variant of DNA polymerase I from Thermus sp. strain 2.9
  source 1..2523: mol_type = other DNA
atgcaccatcatcatcatcatggcggtagcggcgtgttacctgtgttcgagcctaaaggtcgcgtgcttctggttgatggccatcatctcgcgtatcgtaacttctttgccctgaaaggattaaccaccagcagcggcgagccggtacagggtgtctacggctttgcaaagtcgctcctgaaagctctgaaagaagacggtgatgtggtgattgttgtctttgatgcgaaagcgccaagttttcgccacgaagcgtacgaagcttacaaagccgggcgtgctccaacgccggaagactttcctcgccaattggcgcttatgaaggaattagtggatttgcttggcctcgaacgcttggaagttcccggtttcgaggcagacgacgtattagcgactctcgcaaagaaagccgaacgcgagggctatgaagtccagatcttgacagcagatcgcgatcttttccagcttttatctccgcgcatctcggtgttacacccggaagggcatcgtatcaccccggaatggctctgggagaaatatggtttgcgtcccgaacaatgggtggattttcgcgccttagcaggcgataaaagcgacaatattccgggagttaaaggtatcggcgagaagacggcgctcaagctccttaaagaatgggggtcgttggagaacttgcttaagaatttagatcaggtcaaaccagagtcagtgcgtgagaagattcttgctcacctcgaagacctcaaattaagccgcgaattgtcccgtgtacgcaccgatttgccgctcgaagttgatttccaacgccgccgcgaacctgactgggagggtcttaaagcgtttttagagcgtcttgaatttggttcgctcttgcatgaattcggccttttagaaagcccgttaccagccgaagaagcaccttggccaccgcccgagggcgcgtttttaggttaccgtttgagtcgcccggaaccgatgtgggccgaattactggctcttgcagcgtctgcccagggacgtgtgtatcgcgcggaagaccctcatggtgcgctccgcggcctcttcgaagtccgtggactccttgccaaagacttagctgttgttgcattgcgcgaaggtcttgatttacctccgactgatgatccaatgcttcttgcgtacctcttggacccgtcaaacacgacgcccgaaggcgtagcccgtcgttacggcggcgagtggaccgaagatgcagcgaaacgcgcgttattggccgaacgtttgcacgccaatttattaggacgtttgcaaggcgaggaacgtctcctctggctttacgaagaagtggagaaaccattgagtcgcgtgctcgcgcatatggaagctaccggtgtcaaattagacgtggcgtatttggagaatctcagccttgaagttgctgcccacatgcgccgcttggaggaagaagtattccgtttagcaggccgttcctttcgccttaattctcgcgatcagttagaacgtgtgttgttcgatgaacttggtctccctcctatcggcaagacagagaagaccggtaaacgtagcacttcagcggcggttttagaagctcttcgcgaagtccatcccattgtggacaagatcttgcaataccgcgaactcgcgaaattgaaaggcacctatattgaccgtcttccggcattagtccacccgaaaacgggacgcctccatacccgcttcaaccaaacagccacggcgaccggtcgtttgtcctcctctgatccaaaccttcagaatattccagtacgtaccccattgggccagaagatccgccgtgcgtttgtagctgaggagggttggcgtttagtggccctcgattatagccaaattgaattacgtgtccttgcccatctttctggcgatgagaacctcatccgcgtgtttcaggaaggcaaagacattcacactcaaacggcaagctggatgtttggattatcagctgaagcgatcgatcctttgatgcgtcgtgcagcgaagaccatcaatttcggtgttctctacggtatgagtgcctttcgtttgtcgcaggaattaggcattcccaaagaagaagctcaggcgttcattcagaaatactttcaaagctatcccaaagttaaagcatggatcgagaagactctcgaagaaggccgcacacgtggttacgtagagaccttatttggacgtcgccgctatgttcccgatttaaacgctcgcgtgaaaggcaagcgtgaagccgccgaacgcatggcgttcaacatgcctgtacagggcacggcagctgacctcatgaaacttgcaatggtgcgcctttttccacaattgcgtgaagttggtgcccgcatgctcttgcaggtccacgatgaactcttgttagaagcgccaaaagagcgtgcggaagaggtggcagccctcgcgaaagaagttatggaaggcgtgtggcccttagcggtgcctcttgaagtcgaagttggtattggcgaggattggctggctgccaaagga

SEQ ID NO: 3540 - protein, 841 aa, synthetic construct
  REGION 1..841: note = Variant of DNA polymerase I from Thermus sp. strain 2.9
MHHHHHHGGSGVLPVFEPKGRVLLVDGHHLAYRNFFALKGLTTSSGEPVQGVYGFAKSLLKALKEDGDVVIVVFDAKAPSFRHEAYEAYKAGRAPTPEDFPRQLALMKELVDLLGLERLEVPGFEADDVLATLAKKAEREGYEVQILTADRDLFQLLSPRISVLHPEGHRITPEWLWEKYGLRPEQWVDFRALAGDKSDNIPGVKGIGEKTALKLLKEWGSLENLLKNLDQVKPESVREKILAHLEDLKLSRELSRVRTDLPLEVDFQRRREPDWEGLKAFLERLEFGSLLHEFGLLESPLPAEEAPWPPPEGAFLGYRLSRPEPMWAELLALAASAQGRVYRAEDPHGALRGLFEVRGLLAKDLAVVALREGLDLPPTDDPMLLAYLLDPSNTTPEGVARRYGGEWTEDAAKRALLAERLHANLLGRLQGEERLLWLYEEVEKPLSRVLAHMEATGVKLDVAYLENLSLEVAAHMRRLEEEVFRLAGRSFRLNSRDQLERVLFDELGLPPIGKTEKTGKRSTSAAVLEALREVHPIVDKILQYRELAKLKGTYIDRLPALVHPKTGRLHTRFNQTATATGRLSSSDPNLQNIPVRTPLGQKIRRAFVAEEGWRLVALDYSQIELRVLAHLSGDENLIRVFQEGKDIHTQTASWMFGLSAEAIDPLMRRAAKTINFGVLYGMSAFRLSQELGIPKEEAQAFIQKYFQSYPKVKAWIEKTLEEGRTRGYVETLFGRRRYVPDLNARVKGKREAAERMAFNMPVQGTAADLMKLAMVRLFPQLREVGARMLLQVHDELLLEAPKERAEEVAALAKEVMEGVWPLAVPLEVEVGIGEDWLAAKG

SEQ ID NO: 3541 - DNA, 2523 bp, synthetic construct
  misc_feature 1..2523: note = Variant of DNA polymerase I from Thermus sp. strain 2.9
  source 1..2523: mol_type = other DNA
atgcaccatcatcatcatcatggcggtagcggcgtgttaccggtgttcgagcctaaaggtcgcgtgcttctggttgatggccatcatctcgcgtatcgtaacttctttgccctgaaaggattaaccaccagcagcggcgagccggtacagggtgtctacggctttgcaaagtcgctcctgaaagctctgaaagaagacggtgatgtggtgattgttgtctttgatgcgaaagcgccaagttttcgccacgaagcgtacgaagcttacaaagccgggcgtgctccaacgccggaagactttcctcgccaattggcgcttatgaaggaattagtggatttgcttggcctcgaacgcttggaagttcccggtttcgaggcagacgacgtattagcgactctcgcaaagaaagccgaacgtgagggctatgaagtccagatcttgacagcagatcgcgatcttttccagcttttatctccgcgcatctcggtgttacacccggaagggcatcgtatcaccccggaatggctctgggagaaatatggtttgcgtcccgaacaatgggtggattttcgcgccttagcaggcgatccgagcgacaatattccgggagttaaaggtatcggcgagaagacggcgctcaagctccttaaagaatgggggtcgttggagaacttgcttaagaatttagatcaggtcaaaccagagtcagtgcgtgagaagattcttgctcacctcgaagacctcaaattaagccgcgaattgtcccgtgtacgcaccgatttgccgctcgaagttgatttccaacgccgccgcgaacctgactgggagggtcttaaagcgtttttagagcgtcttgaatttggttcgctcttgcatgaattcggccttttagaaagcccgttaccagccgaagaagcaccttggccaccgcccgagggcgcgtttttaggttaccgtttgagtcgcccggaaccgatgtgggccgaattactggctcttgcagcgtctgcccagggacgtgtgtatcgcgcggaagaccctcatggtgcgctccgcggcctcttcgaagtccgtggactccttgccaaagacttagctgttgttgcattgcgcgaaggtcttgatttacctccgactgatgatccaatgcttcttgcgtacctcttggacccgtcaaacacgacgcccgaaggcgtagcccgtcgttacggcggcgagtggaccgaagatgcagcgaaacgcgcgttattggccgaacgtttgcacgccaatttattaggacgtttgcaaggcgaggaacgtctcctctggctttacgaagaagtggagaaaccattgagtcgcgtgctcgcgcatatggaagctaccggtgtcaaattagacgtggcgtatttggagaatctcagccttgaagttgctgcccacatgcgccgcttggaggaagaagtattctttttagcaggccgttcctttcgccttaattctcgcgatcagttagaacgtgtgttgttcgatgaacttggtctccctcctatcggcaagacagagaagaccggtaaacgtagcacttcagcggcggttttagaagctcttcgcgaagtccatcccattgtggacaagatcttgcaataccgcgaactcgcgaaattgaaaggcacctatattgaccgtcttccggcattagtccacccgaaaacgggacgcctccatacccgcttcaaccaaacagccacggcgaccggtcgtttgtcctcctctgatccaaaccttcagaatattccagtacgtaccccattgggccagaagatccgccgtgcgtttgtagctgaggagggttggcgtttagtggccctcgattatagccaaattgaattacgtgtccttgcccatctttctggcgatgagaacctcatccgcgtgtttcaggaaggcaaagacattcacactcaaacggcaagctggatgtttggattatcagctgaagcgatcgatcctttgatgcgtcgtgcagcgaagaccatcaatttcggtgttctctacggtatgagtgcctttcgtttgtcgcaggaattaggcattccctatgaagaagctcaggcgttcattcagaaatactttcaaagctatcccaaagttaaagcatggatcgagaagactctcgaagaaggccgcacacgtggttacgtagagaccttatttggacgtcgccgctatgttcccgatttaaacgctcgcgtgaaaggcaagcgtgaagccgccgaacgcatggcgttcaacatgcctgtacagggcacggcagctgacctcatgaaacttgcaatggtgcgcctttttccacaattgcgtgaagttggtgcccgcatgctcttgcaggtccacgatgaactcttgttagaagcgccaaaagagcgtgcggaagaggtggcagccctcgcgaaagaagttatggaaggcgtgtggcccttagcggtgcctcttgaagtcgaagttggtattggcgaggattggctggctgccaaagga

SEQ ID NO: 3542 - protein, 841 aa, synthetic construct
  REGION 1..841: note = Variant of DNA polymerase I from Thermus sp. strain 2.9
MHHHHHHGGSGVLPVFEPKGRVLLVDGHHLAYRNFFALKGLTTSSGEPVQGVYGFAKSLLKALKEDGDVVIVVFDAKAPSFRHEAYEAYKAGRAPTPEDFPRQLALMKELVDLLGLERLEVPGFEADDVLATLAKKAEREGYEVQILTADRDLFQLLSPRISVLHPEGHRITPEWLWEKYGLRPEQWVDFRALAGDPSDNIPGVKGIGEKTALKLLKEWGSLENLLKNLDQVKPESVREKILAHLEDLKLSRELSRVRTDLPLEVDFQRRREPDWEGLKAFLERLEFGSLLHEFGLLESPLPAEEAPWPPPEGAFLGYRLSRPEPMWAELLALAASAQGRVYRAEDPHGALRGLFEVRGLLAKDLAVVALREGLDLPPTDDPMLLAYLLDPSNTTPEGVARRYGGEWTEDAAKRALLAERLHANLLGRLQGEERLLWLYEEVEKPLSRVLAHMEATGVKLDVAYLENLSLEVAAHMRRLEEEVFFLAGRSFRLNSRDQLERVLFDELGLPPIGKTEKTGKRSTSAAVLEALREVHPIVDKILQYRELAKLKGTYIDRLPALVHPKTGRLHTRFNQTATATGRLSSSDPNLQNIPVRTPLGQKIRRAFVAEEGWRLVALDYSQIELRVLAHLSGDENLIRVFQEGKDIHTQTASWMFGLSAEAIDPLMRRAAKTINFGVLYGMSAFRLSQELGIPYEEAQAFIQKYFQSYPKVKAWIEKTLEEGRTRGYVETLFGRRRYVPDLNARVKGKREAAERMAFNMPVQGTAADLMKLAMVRLFPQLREVGARMLLQVHDELLLEAPKERAEEVAALAKEVMEGVWPLAVPLEVEVGIGEDWLAAKG

SEQ ID NO: 3543 - DNA, 2523 bp, synthetic construct
  misc_feature 1..2523: note = Variant of DNA polymerase I from Thermus sp. strain 2.9
  source 1..2523: mol_type = other DNA
atgcaccatcatcatcatcatggcggtagcggcgtgttaccggtgttcgagcctaaaggtcgcgtgcttctggttgatggccatcatctcgcgtatcgtaacttctttgccctgaaaggattaaccaccagcagcggcgagccggtacagggtgtctacggctttgcaaagtcgctcctgaaagctctgaaagaagacggtgatgtggtgattgttgtctttgatgcgaaagcgccaagttttcgccacgaagcgtacgaagcttacaaagccgggcgtgctccaacgccggaagactttcctcgccaattggcgcttatgaaggaattagtggatttgcttggcctcgaacgcttggaagttcccggtttcgaggcagacgacgtattagcgactctcgcaaagaaagccgaacgtgagggctatgaagtccagatcttgacagcagatcgcgatcttttccagcttttatctccgcgcatctcggtgttacacccggaagggcatcgtatcaccccggaatggctctgggagaaatatggtttgcgtcccgaacaatgggtggattttcgcgccttagcaggcgatccgagcgacaatattccgggagttaaaggtatcggcgagaagacggcgctcaagctccttaaagaatgggggtcgttggagaacttgcttaagaatttagatcaggtcaaaccagagtcagtgcgtgagaagattcttgctcacctcgaagacctcaaattaagccgcgaattgtcccgtgtacgcaccgatttgccgctcgaagttgatttccaacgccgccgcgaacctgactgggagggtcttaaagcgtttttagagcgtcttgaatttggttcgctcttgcatgaattcggccttttagaaagcccgttaccagccgaagaagcaccttggccaccgcccgagggcgcgtttttaggttaccgtttgagtcgcccggaaccgatgtgggccgaattactggctcttgcagcgtctgcccagggacgtgtgtatcgcgcggaagaccctcatggtgcgctccgcggcctcttcgaagtccgtggactccttgccaaagacttagctgttgttgcattgcgcgaaggtcttgatttacctccgactgatgatccaatgcttcttgcgtacctcttggacccgtcaaacacgacgcccgaaggcgtagcccgtcgttacggcggcgagtggaccgaagatgcagcgaaacgcgcgttattggccgaacgtttgcacgccaatttattaggacgtttgcaaggcgaggaacgtctcctctggctttacgaagaagtggagaaaccattgagtcgcgtgctcgcgcatatggaagctaccggtgtcaaattagacgtggcgtatttggagaatctcagccttgaagttgctgcccacatgcgccgcttggaggaagaagtattccgtttagcaggccgttcctttcgccttaattctcgcgatcagttagaacgtgtgttgttcgatgaacttggtctccctcctatcggcaagacagagaagaccggtaaacgtagcacttcagcggcggttttagaagctcttcgcgaagtccatcccattgtggacaagatcttgcaataccgcgaactcgcgaaattgaaaggcacctatattgaccgtcttccggcattagtccacccgaaaacgggacgcctccatacccgcttcaaccaaacagccacggcgaccggtcgtttgtcctcctctgatccaaaccttcagaatattccagtacgtaccccattgggccagaagatccgccgtgcgtttgtagctgaggagggttggcgtttagtggccctcgattatagccaaattgaattacgtgtccttgcccatctttctggcgatgagaacctcatccgcgtgtttcaggaaggcaaagacattcacactcaaacggcaagctggatgtttggattatcagctgaagcgatcgatcctttgatgcgtcgtgcagcgaagaccatcaatttcggtgttctctacggtatgagtgcctttcgtttgtcgcaggaattaggcattccctatgaagaagctcaggcgttcattcagaaatactttcaaagctatcccaaagttaaagcatggatcgagaagactctcgaagaaggccgcacacgtggttacgtagagaccttatttggacgtcgccgctatgttcccgatttaaacgctcgcgtgaaaggcaagcgtgaagccgccgaacgcatggcgttcaacatgcctgtacagggcacggcagctgacctcatgaaacttgcaatggtgcgcctttttccacaattgcgtgaagttggtgcccgcatgctcttgcaggtccacgatgaactcttgttagaagcgccaaaagagcgtgcggaagaggtggcaggtctcgcgaaagaagttatggaaggcgtgtggcccttagcggtgcctcttgaagtcgaagttggtattggcgaggattggctggctgccaaagga

SEQ ID NO: 3544 - protein, 841 aa, synthetic construct
  REGION 1..841: note = Variant of DNA polymerase I from Thermus sp. strain 2.9
MHHHHHHGGSGVLPVFEPKGRVLLVDGHHLAYRNFFALKGLTTSSGEPVQGVYGFAKSLLKALKEDGDVVIVVFDAKAPSFRHEAYEAYKAGRAPTPEDFPRQLALMKELVDLLGLERLEVPGFEADDVLATLAKKAEREGYEVQILTADRDLFQLLSPRISVLHPEGHRITPEWLWEKYGLRPEQWVDFRALAGDPSDNIPGVKGIGEKTALKLLKEWGSLENLLKNLDQVKPESVREKILAHLEDLKLSRELSRVRTDLPLEVDFQRRREPDWEGLKAFLERLEFGSLLHEFGLLESPLPAEEAPWPPPEGAFLGYRLSRPEPMWAELLALAASAQGRVYRAEDPHGALRGLFEVRGLLAKDLAVVALREGLDLPPTDDPMLLAYLLDPSNTTPEGVARRYGGEWTEDAAKRALLAERLHANLLGRLQGEERLLWLYEEVEKPLSRVLAHMEATGVKLDVAYLENLSLEVAAHMRRLEEEVFRLAGRSFRLNSRDQLERVLFDELGLPPIGKTEKTGKRSTSAAVLEALREVHPIVDKILQYRELAKLKGTYIDRLPALVHPKTGRLHTRFNQTATATGRLSSSDPNLQNIPVRTPLGQKIRRAFVAEEGWRLVALDYSQIELRVLAHLSGDENLIRVFQEGKDIHTQTASWMFGLSAEAIDPLMRRAAKTINFGVLYGMSAFRLSQELGIPYEEAQAFIQKYFQSYPKVKAWIEKTLEEGRTRGYVETLFGRRRYVPDLNARVKGKREAAERMAFNMPVQGTAADLMKLAMVRLFPQLREVGARMLLQVHDELLLEAPKERAEEVAGLAKEVMEGVWPLAVPLEVEVGIGEDWLAAKG

SEQ ID NO: 3545 - DNA, 2523 bp, synthetic construct
  misc_feature 1..2523: note = Variant of DNA polymerase I from Thermus sp. strain 2.9
  source 1..2523: mol_type = other DNA
atgcaccatcatcatcatcatggcggtagcggcgtgttagaggtgttcgagcctaaaggtcgcgtgcttctggttgatggccatcatctcgcgtatcgtaacttctttgccctgaaaggattaaccaccagcagcggcgagccggtacagggtgtctacggctttgcaaagtcgctcctgaaagctctgaaagaagacggtgatgtggtgattgttgtctttgatgcgaaagcgccaagttttcgccacgaagcgtacgaagcttacaaagccgggcgtgctccaacgccggaagactttcctcgccaattggcgcttatgaaggaattagtggatttgcttggcctcgaacgcttggaagttcccggtttcgaggcagacgacgtattagcgactctcgcaaagaaagccgaacgtgagggctatgaagtccagatcttgacagcagatcgcgatcttttccagcttttatctccgcgcatctcggtgttacacccggaagggcatcgtatcaccccggaatggctctgggagaaatatggtttgcgtcccgaacaatgggtggattttcgcgccttagcaggcgatccgagcgacaatattccgggagttaaaggtatcggcgagaagacggcgctcaagctccttaaagaatgggggtcgttggagaacttgcttaagaatttagatcaggtcaaaccagagtcagtgcgtgagaagattcttgctcacctcgaagacctcaaattaagccgcgaattgtcccgtgtacgcaccgatttgccgctcgaagttgatttccaacgccgccgcgaacctgactgggagggtcttaaagcgtttttagagcgtcttgaatttggttcgctcttgcatgaattcggccttttagaaagcccgttaccagccgaagaagcaccttggccaccgcccgagggcgcgtttttaggttaccgtttgagtcgcccggaaccgatgtgggccgaattactggctcttgcagcgtctgcccagggacgtgtgtatcgcgcggaagaccctcatggtgcgctccgcggcctcttcgaagtccgtggactccttgccaaagacttagctgttgttgcattgcgcgaaggtcttgatttacctccgactgatgatccaatgcttcttgcgtacctcttggacccgtcaaacacgacgcccgaaggcgtagcccgtcgttacggcggcgagtggaccgaagatgcagcgaaacgcgcgttattggccgaacgtttgcacgccaatttattaggacgtttgcaaggcgaggaacgtctcctctggctttacgaagaagtggagaaaccattgagtcgcgtgctcgcgcatatggaagctaccggtgtcaaattagacgtggcgtatttggagaatctcagccttgaagttgctgcccacatgcgccgcttggaggaagaagtattccgtttagcaggccgttcctttcgccttaattctcgcgatcagttagaacgtgtgttgttcgatgaacttggtctccctcctatcggcaagacagagaagaccggtaaacgtagcacttcagcggcggttttagaagctcttcgcgaagtccatcccattgtggacaagatcttgcaataccgcgaactcgcgaaattgaaaggcacctatattgaccgtcttccggcattagtccacccgaaaacgggacgcctccatacccgcttcaaccaaacagccacggcgaccggtcgtttgtcctcctctgatccaaaccttcagaatattccagtacgtaccccattgggccagaagatccgccgtgcgtttgtagctgaggagggttggcgtttagtggccctcgattatagccaaattgaattacgtgtccttgcccatctttctggcgatgagaacctcatccgcgtgtttcaggaaggcaaagacattcacactcaaacggcaagctggatgtttggattatcagctgaagcgatcgatcctttgatgcgtcgtgcagcgaagaccatcaatttcggtgttctctacggtatgagtgcctttcgtttgtcgcaggaattaggcattccctatgaagaagctcaggcgttcattcagaaatactttcaaagctatcccaaagttaaagcatggatcgagaagactctcgaagaaggccgcacacgtggttacgtagagaccttatttggacgtcgccgctatgttcccgatttaaacgctcgcgtgaaaggcaagcgtgaagccgccgaacgcatggcgttcaacatgcctgtacagggcacggcagctgacctcatgaaacttgcaatggtgcgcctttttccacaattgcgtgaagttggtgcccgcatgctcttgcaggtccacgatgaactcttgttagaagcgccaaaagagcgtgcggaagaggtggcagccctcgcgaaagaagttatggaaggcgtgtggcccttagcggtgcctcttgaagtcgaagttggtattggcgaggattggctggctgccaaagga

SEQ ID NO: 3546 - protein, 841 aa, synthetic construct; identical to SEQ ID NO: 3508
  REGION 1..841: note = Variant of DNA polymerase I from Thermus sp. strain 2.9

SEQ ID NO: 3547 - DNA, 2523 bp, synthetic construct
  misc_feature 1..2523: note = Variant of DNA polymerase I from Thermus sp. strain 2.9
  source 1..2523: mol_type = other DNA
atgcaccatcatcatcatcatggcggtagcggcgtgttaccggtgttcgagcctaaaggtcgcgtgcttctggttgatggccatcatctcgcgtatcgtaacttctttgccctgaaaggattaaccaccagcagcggcgagccggtacagggtgtctacggctttgcaaagtcgctcctgaaagctctgaaagaagacggtgatgtggtgattgttgtctttgatgcgaaagcgccaagttttcgccacgaagcgtacgaagcttacaaagccgggcgtgctccaacgccggaagactttcctcgccaattggcgcttatgaaggaattagtggatttgcttggcctcgaacgcttggaagttcccggtttcgaggcagacgacgtattagcgactctcgcaaagaaagccgaacgtgagggctatgaagtccagatcttgacagcagatcgcgatcttttccagcttttatctccgcgcatctcggtgttacacccggaagggcatcgtatcaccccggaatggctctgggagaaatatggtttgcgtcccgaacaatgggtggattttcgcgccttagcaggcgatccgagcgacaatattccgggagttaaaggtatcggcgagaagacggcgctcaagctccttaaagaatgggggtcgttggagaacttgcttaagaatttagatcaggtcaaaccagagtcagtgcgtgagaagattcttgctcacctcgaagacctcaaattaagccgcgaattgtcccgtgtacgcaccgatttgccgctcgaagttgatttccaacgccgccgcgaacctgactgggagggtcttaaagcgtttttagagcgtcttgaatttggttcgctcttgcatgaattcggccttttagaaagcccgttaccagccgaagaagcaccttggccaccgcccgagggcgcgtttttaggttaccgtttgagtcgcccggaaccgatgtgggccgaattactggctcttgcagcgtctgcccagggacgtgtgtatcgcgcggaagaccctcatggtgcgctccgcggcctcttcgaagtccgtggactccttgccaaagacttagctgttgttgcattgcgcgaaggtcttgatttacctccgactgatgatccaatgcttcttgcgtacctcttggacccgtcaaacacgacgcccgaaggcgtagcccgtcgttacggcggcgagtggaccgaagatgcagcgaaacgcgcgttattggccgaacgtttgcacgccaatttattaggacgtttgcaaggcgaggaacgtctcctctggctttacgaagaagtggagaaaccattgagtcgcgtgctcgcgcatatggaagctaccggtgtcaaattagacgtggcgtatttggagaatctcagccttgaagttgctgcccacatgcgccgcttggaggaagaagtattccgtttagcaggccgttcctttcgccttaattctcgcgatcagttagaacgtgtgttgttcgatgaacttggtctccctcctatcggcaagacagagaagaccggtaaacgtagcacttcagcggcggttttagaagctcttcgcgaagtccatcccattgtggacaagatcttgcaataccgcgaactcgcgaaattgaaaggcacctatattgaccgtcttccggcattagtccacccgaaaacgggacgcctccatacccgcttcaaccaaacagccacggcgaccggtcgtttgtcctcctctgatccaaaccttcagaatattccagtacgtaccccattgggccagaagatccgccgtgcgtttgtagctgaggagggttggcgtttagtggccctcgattatagccaaattgaattacgtgtccttgcccatctttctggcgatgagaacctcatccgcgtgtttcaggaaggcaaagacattcacactcaaacggcaagctggatgtttggattatcagctgaagcgatcgatcctttgatgcgtcgtgcagcgaagaccatcaatttcggtgttctctacggtatgagtgcctttcgtttgtcgcaggaattaggcattccctatgaagaagctcaggcgttcattcagaaatactttcaaagctatcccaaagttaaagcatggatcgagaagactctcgaagaaggccgcacacgtggttacgtagagaccttatttggacgtcgccgctatgttcccgatttaaacgctcgcgtgaaaggcaagcgtgaagccgccgaacgcatggcgttcaacatgcctgtacagggcacggcagctgacctcatgaaacttgcaatggtgcgcctttttccacaattgcgtgaagttggtgcccgcatgctcttgcaggtccacgatgaactcttgttagaagcgccaaaagagcgtgcggaagaggtggcagccctcgcgaaagaagttatggaagcggtgtggcccttagcggtgcctcttgaagtcgaagttggtattggcgaggattggctggctgccaaagga

SEQ ID NO: 3548 - protein, 841 aa, synthetic construct
  REGION 1..841: note = Variant of DNA polymerase I from Thermus sp. strain 2.9
MHHHHHHGGSGVLPVFEPKGRVLLVDGHHLAYRNFFALKGLTTSSGEPVQGVYGFAKSLLKALKEDGDVVIVVFDAKAPSFRHEAYEAYKAGRAPTPEDFPRQLALMKELVDLLGLERLEVPGFEADDVLATLAKKAEREGYEVQILTADRDLFQLLSPRISVLHPEGHRITPEWLWEKYGLRPEQWVDFRALAGDPSDNIPGVKGIGEKTALKLLKEWGSLENLLKNLDQVKPESVREKILAHLEDLKLSRELSRVRTDLPLEVDFQRRREPDWEGLKAFLERLEFGSLLHEFGLLESPLPAEEAPWPPPEGAFLGYRLSRPEPMWAELLALAASAQGRVYRAEDPHGALRGLFEVRGLLAKDLAVVALREGLDLPPTDDPMLLAYLLDPSNTTPEGVARRYGGEWTEDAAKRALLAERLHANLLGRLQGEERLLWLYEEVEKPLSRVLAHMEATGVKLDVAYLENLSLEVAAHMRRLEEEVFRLAGRSFRLNSRDQLERVLFDELGLPPIGKTEKTGKRSTSAAVLEALREVHPIVDKILQYRELAKLKGTYIDRLPALVHPKTGRLHTRFNQTATATGRLSSSDPNLQNIPVRTPLGQKIRRAFVAEEGWRLVALDYSQIELRVLAHLSGDENLIRVFQEGKDIHTQTASWMFGLSAEAIDPLMRRAAKTINFGVLYGMSAFRLSQELGIPYEEAQAFIQKYFQSYPKVKAWIEKTLEEGRTRGYVETLFGRRRYVPDLNARVKGKREAAERMAFNMPVQGTAADLMKLAMVRLFPQLREVGARMLLQVHDELLLEAPKERAEEVAALAKEVMEAVWPLAVPLEVEVGIGEDWLAAKG

SEQ ID NO: 3549 - DNA, 2523 bp, synthetic construct
  misc_feature 1..2523: note = Variant of DNA polymerase I from Thermus sp. strain 2.9
  source 1..2523: mol_type = other DNA
atgcaccatcatcatcatcatggcggtagcggcgtgttaccggtgttcgagcctaaaggtcgcgtgcttctggttgatggccatcatctcgcgtatcgtaacttctttgccctgaaaggattaaccaccagcagcggcgagccggtacagggtgtctacggctttgcaaagtcgctcctgaaagctctgaaagaagacggtgatgtggtgattgttgtctttgatgcgaaagcgccaagttttcgccacgaagcgtacgaagcttacaaagccgggcgtgctccaacgccggaagactttcctcgccaattggcgcttatgaaggaattagtggatttgcttggcctcgaacgcttggaagttcccggtttcgaggcagacgacgtattagcgactctcgcaaagaaagccgaacgtgagggctatgaagtccagatcttgacagcagatcgcgatcttttccagcttttatctccgcgcatctcggtgttacacccggaagggcatcgtatcaccccggaatggctctgggagaaatatggtttgcgtcccgaacaatgggtggattttcgcgccttagcaggcgatccgagcgacaatattccgggagttaaaggtatcggcaataagacggcgctcaagctccttaaagaatgggggtcgttggagaacttgcttaagaatttagatcaggtcaaaccagagtcagtgcgtgagaagattcttgctcacctcgaagacctcaaattaagccgcgaattgtcccgtgtacgcaccgatttgccgctcgaagttgatttccaacgccgccgcgaacctgactgggagggtcttaaagcgtttttagagcgtcttgaatttggttcgctcttgcatgaattcggccttttagaaagcccgttaccagccgaagaagcaccttggccaccgcccgagggcgcgtttttaggttaccgtttgagtcgcccggaaccgatgtgggccgaattactggctcttgcagcgtctgcccagggacgtgtgtatcgcgcggaagaccctcatggtgcgctccgcggcctcttcgaagtccgtggactccttgccaaagacttagctgttgttgcattgcgcgaaggtcttgatttacctccgactgatgatccaatgcttcttgcgtacctcttggacccgtcaaacacgacgcccgaaggcgtagcccgtcgttacggcggcgagtggaccgaagatgcagcgaaacgcgcgttattggccgaacgtttgcacgccaatttattaggacgtttgcaaggcgaggaacgtctcctctggctttacgaagaagtggagaaaccattgagtcgcgtgctcgcgcatatggaagctaccggtgtcaaattagacgtggcgtatttggagaatctcagccttgaagttgctgcccacatgcgccgcttggaggaagaagtattccgtttagcaggccgttcctttcgccttaattctcgcgatcagttagaacgtgtgttgttcgatgaacttggtctccctcctatcggcaagacagagaagaccggtaaacgtagcacttcagcggcggttttagaagctcttcgcgaagtccatcccattgtggacaagatcttgcaataccgcgaactcgcgaaattgaaaggcacctatattgaccgtcttccggcattagtccacccgaaaacgggacgcctccatacccgcttcaaccaaacagccacggcgaccggtcgtttgtcctcctctgatccaaaccttcagaatattccagtacgtaccccattgggccagaagatccgccgtgcgtttgtagctgaggagggttggcgtttagtggccctcgattatagccaaattgaattacgtgtccttgcccatctttctggcgatgagaacctcatccgcgtgtttcaggaaggcaaagacattcacactcaaacggcaagctggatgtttggattatcagctgaagcgatcgatcctttgatgcgtcgtgcagcgaagaccatcaatttcggtgttctctacggtatgagtgcctttcgtttgtcgcaggaattaggcattccctatgaagaagctcaggcgttcattcagaaatactttcaaagctatcccaaagttaaagcatggatcgagaagactctcgaagaaggccgcacacgtggttacgtagagaccttatttggacgtcgccgctatgttcccgatttaaacgctcgcgtgaaaggcaagcgtgaagccgccgaacgcatggcgttcaacatgcctgtacagggcacggcagctgacctcatgaaacttgcaatggtgcgcctttttccacaattgcgtgaagttggtgcccgcatgctcttgcaggtccacgatgaactcttgttagaagcgccaaaagagcgtgcggaagaggtggcagccctcgcgaaagaagttatggaaggcgtgtggcccttagcggtgcctcttgaagtcgaagttggtattggcgaggattggctggctgccaaagga

SEQ ID NO: 3550 - protein, 841 aa, synthetic construct
  REGION 1..841: note = Variant of DNA polymerase I from Thermus sp. strain 2.9
MHHHHHHGGSGVLPVFEPKGRVLLVDGHHLAYRNFFALKGLTTSSGEPVQGVYGFAKSLLKALKEDGDVVIVVFDAKAPSFRHEAYEAYKAGRAPTPEDFPRQLALMKELVDLLGLERLEVPGFEADDVLATLAKKAEREGYEVQILTADRDLFQLLSPRISVLHPEGHRITPEWLWEKYGLRPEQWVDFRALAGDPSDNIPGVKGIGNKTALKLLKEWGSLENLLKNLDQVKPESVREKILAHLEDLKLSRELSRVRTDLPLEVDFQRRREPDWEGLKAFLERLEFGSLLHEFGLLESPLPAEEAPWPPPEGAFLGYRLSRPEPMWAELLALAASAQGRVYRAEDPHGALRGLFEVRGLLAKDLAVVALREGLDLPPTDDPMLLAYLLDPSNTTPEGVARRYGGEWTEDAAKRALLAERLHANLLGRLQGEERLLWLYEEVEKPLSRVLAHMEATGVKLDVAYLENLSLEVAAHMRRLEEEVFRLAGRSFRLNSRDQLERVLFDELGLPPIGKTEKTGKRSTSAAVLEALREVHPIVDKILQYRELAKLKGTYIDRLPALVHPKTGRLHTRFNQTATATGRLSSSDPNLQNIPVRTPLGQKIRRAFVAEEGWRLVALDYSQIELRVLAHLSGDENLIRVFQEGKDIHTQTASWMFGLSAEAIDPLMRRAAKTINFGVLYGMSAFRLSQELGIPYEEAQAFIQKYFQSYPKVKAWIEKTLEEGRTRGYVETLFGRRRYVPDLNARVKGKREAAERMAFNMPVQGTAADLMKLAMVRLFPQLREVGARMLLQVHDELLLEAPKERAEEVAALAKEVMEGVWPLAVPLEVEVGIGEDWLAAKG

SEQ ID NO: 3551 - DNA, 2523 bp, synthetic construct
  misc_feature 1..2523: note = Variant of DNA polymerase I from Thermus sp. strain 2.9
  source 1..2523: mol_type = other DNA
atgcaccatcatcatcatcatggcggtagcggcgtgttaccggtgttcgagcctaaaggtcgcgtgcttctggttgatggccatcatctcgcgtatcgtaacttctttgccctgaaaggattaaccaccagcagcggcgagccggtacagggtgtctacggctttgcaaagtcgctcctgaaagctctgaaagaagacggtgatgtggtgattgttgtctttgatgcgaaagcgccaagttttcgccacgaagcgtacgaagcttacaaagccgggcgtgctccaacgccggaagactttcctcgccaattggcgcttatgaaggaattagtggatttgcttggcctcgaacgcttggaagttcccggtttcgaggcagacgacgtattagcgactctcgcaaagaaagccgaacgtgagggctatgaagtccagatcttgacagcagatcgcgatcttttccagcttttatctccgcgcatctcggtgttacacccggaagggcatcgtatcaccccggaatggctctgggagaaatatggtttgcgtcccgaacaatgggtggattttcgcgccttagcaggcgatccgagcgacaatattccgggagttaaaggtatcggcgagaagacggcgctcaagctccttaaagaatgggggtcgttggagaacttgcttaagaatttagatcaggtcaaaccagagtcagtgcgtgagaagattcttgctcacctcgaagggctcaaattaagccgcgaattgtcccgtgtacgcaccgatttgccgctcgaagttgatttccaacgccgccgcgaacctgactgggagggtcttaaagcgtttttagagcgtcttgaatttggttcgctcttgcatgaattcggccttttagaaagcccgttaccagccgaagaagcaccttggccaccgcccgagggcgcgtttttaggttaccgtttgagtcgcccggaaccgatgtgggccgaattactggctcttgcagcgtctgcccagggacgtgtgtatcgcgcggaagaccctcatggtgcgctccgcggcctcttcgaagtccgtggactccttgccaaagacttagctgttgttgcattgcgcgaaggtcttgatttacctccgactgatgatccaatgcttcttgcgtacctcttggacccgtcaaacacgacgcccgaaggcgtagcccgtcgttacggcggcgagtggaccgaagatgcagcgaaacgcgcgttattggccgaacgtttgcacgccaatttattaggacgtttgcaaggcgaggaacgtctcctctggctttacgaagaagtggagaaaccattgagtcgcgtgctcgcgcatatggaagctaccggtgtcaaattagacgtggcgtatttggagaatctcagccttgaagttgctgcccacatgcgccgcttggaggaagaagtattccgtttagcaggccgttcctttcgccttaattctcgcgatcagttagaacgtgtgttgttcgatgaacttggtctccctcctatcggcaagacagagaagaccggtaaacgtagcacttcagcggcggttttagaagctcttcgcgaagtccatcccattgtggacaagatcttgcaataccgcgaactcgcgaaattgaaaggcacctatattgaccgtcttccggcattagtccacccgaaaacgggacgcctccatacccgcttcaaccaaacagccacggcgaccggtcgtttgtcctcctctgatccaaaccttcagaatattccagtacgtaccccattgggccagaagatccgccgtgcgtttgtagctgaggagggttggcgtttagtggccctcgattatagccaaattgaattacgtgtccttgcccatctttctggcgatgagaacctcatccgcgtgtttcaggaaggcaaagacattcacactcaaacggcaagctggatgtttggattatcagctgaagcgatcgatcctttgatgcgtcgtgcagcgaagaccatcaatttcggtgttctctacggtatgagtgcctttcgtttgtcgcaggaattaggcattccctatgaagaagctcaggcgttcattcagaaatactttcaaagctatcccaaagttaaagcatggatcgagaagactctcgaagaaggccgcacacgtggttacgtagagaccttatttggacgtcgccgctatgttcccgatttaaacgctcgcgtgaaaggcaagcgtgaagccgccgaacgcatggcgttcaacatgcctgtacagggcacggcagctgacctcatgaaacttgcaatggtgcgcctttttccacaattgcgtgaagttggtgcccgcatgctcttgcaggtccacgatgaactcttgttagaagcgccaaaagagcgtgcggaagaggtggcagccctcgcgaaagaagttatggaaggcgtgtggcccttagcggtgcctcttgaagtcgaagttggtattggcgaggattggctggctgccaaagga

SEQ ID NO: 3552 - protein, 841 aa, synthetic construct
  REGION 1..841: note = Variant of DNA polymerase I from Thermus sp. strain 2.9
MHHHHHHGGSGVLPVFEPKGRVLLVDGHHLAYRNFFALKGLTTSSGEPVQGVYGFAKSLLKALKEDGDVVIVVFDAKAPSFRHEAYEAYKAGRAPTPEDFPRQLALMKELVDLLGLERLEVPGFEADDVLATLAKKAEREGYEVQILTADRDLFQLLSPRISVLHPEGHRITPEWLWEKYGLRPEQWVDFRALAGDPSDNIPGVKGIGEKTALKLLKEWGSLENLLKNLDQVKPESVREKILAHLEGLKLSRELSRVRTDLPLEVDFQRRREPDWEGLKAFLERLEFGSLLHEFGLLESPLPAEEAPWPPPEGAFLGYRLSRPEPMWAELLALAASAQGRVYRAEDPHGALRGLFEVRGLLAKDLAVVALREGLDLPPTDDPMLLAYLLDPSNTTPEGVARRYGGEWTEDAAKRALLAERLHANLLGRLQGEERLLWLYEEVEKPLSRVLAHMEATGVKLDVAYLENLSLEVAAHMRRLEEEVFRLAGRSFRLNSRDQLERVLFDELGLPPIGKTEKTGKRSTSAAVLEALREVHPIVDKILQYRELAKLKGTYIDRLPALVHPKTGRLHTRFNQTATATGRLSSSDPNLQNIPVRTPLGQKIRRAFVAEEGWRLVALDYSQIELRVLAHLSGDENLIRVFQEGKDIHTQTASWMFGLSAEAIDPLMRRAAKTINFGVLYGMSAFRLSQELGIPYEEAQAFIQKYFQSYPKVKAWIEKTLEEGRTRGYVETLFGRRRYVPDLNARVKGKREAAERMAFNMPVQGTAADLMKLAMVRLFPQLREVGARMLLQVHDELLLEAPKERAEEVAALAKEVMEGVWPLAVPLEVEVGIGEDWLAAKG

SEQ ID NO: 3553 - DNA, 2523 bp, synthetic construct; identical to SEQ ID NO: 3309
  misc_feature 1..2523: note = Variant of DNA polymerase I from Thermus sp. strain 2.9
  source 1..2523: mol_type = other DNA

SEQ ID NO: 3554 - protein, 841 aa, synthetic construct; identical to SEQ ID NO: 3310
  REGION 1..841: note = Variant of DNA polymerase I from Thermus sp. strain 2.9

SEQ ID NO: 3555 - DNA, 2523 bp, synthetic construct
  misc_feature 1..2523: note = Variant of DNA polymerase I from Thermus sp. strain 2.9
  source 1..2523: mol_type = other DNA
atgcaccatcatcatcatcatggcggtagcggcgtgttaccggtgttcgagcctaaaggtcgcgtgcttctggttgatggccatcatctcgcgtatcgtaacttctttgccctgaaaggattaaccaccagcagcggcgagccggtacagggtgtctacggctttgcaaagtcgctcctgaaagctctgaaagaagacggtgatgtggtgattgttgtctttgatgcgaaagcgccaagttttcgccacgaagcgtacgaagcttacaaagccgggcgtgctccaacgccggaagactttcctcgccaattggcgcttatgaaggaattagtggatttgcttggcctcgaacgcttggaagttcccggtttcgaggcagacgacgtattagcgactctcgcaaagaaagccgaacgtgagggctatgaagtccagatcttgacagcagatcgcgatcttttccagcttttatctccgcgcatctcggtgttacacccggaagggcatcgtatcaccccggaatggctctgggagaaatatggtttgcgtcccgaacaatgggtggattttcgcgccttagcaggcgatccgagcgacaatattccgggagttaaaggtatcggcgagaagacggcgctcaagctccttaaagaatgggggtcgttggagaacttgcttaagaatttagatcaggtcaaaccagagtcagtgcgtgagaagattcttgctcacctcgaagacctcaaattaagccgcgaattgtcccgtgtacgcaccgatttgccgctcgaagttgatttccaacgccgccgcgaacctgactgggagggtcttaaagcgtttttagagcgtcttgaatttggttcgctcttgcatgaattcggccttttagaaagcccgttaccagccgaagaagcaccttggccaccgcccgagggcgcgtttttaggttaccgtttgagtcgcccggaaccgatgtgggccgaattactggctcttgcagcgtctgcccagggacgtgtgtatcgcgcggaagaccctcatggtgcgctccgcggcctcttcgaagtccgtggactccttgccaaagacttagctgttgttgcattgcgcgaaggtcttgatttacctccgactgatgatccaatgcttcttgcgtacctcttggacccgtcaaacacgacgcccgaaggcgtagcccgtcgttacggcggcgagtggaccgaagatgcagcgaaacgcgcgttattggccgaacgtttgcacgccaatttattaaagcgtttgcaaggcgaggaacgtctcctctggctttacgaagaagtggagaaaccattgagtcgcgtgctcgcgcatatggaagctaccggtgtcaaattagacgtggcgtatttggagaatctcagccttgaagttgctgcccacatgcgccgcttggaggaagaagtattccgtttagcaggccgttcctttcgccttaattctcgcgatcagttagaacgtgtgttgttcgatgaacttggtctccctcctatcggcaagacagagaagaccggtaaacgtagcacttcagcggcggttttagaagctcttcgcgaagtccatcccattgtggacaagatcttgcaataccgcgaactcgcgaaattgaaaggcacctatattgaccgtcttccggcattagtccacccgaaaacgggacgcctccatacccgcttcaaccaaacagccacggcgaccggtcgtttgtcctcctctgatccaaaccttcagaatattccagtacgtaccccattgggccagaagatccgccgtgcgtttgtagctgaggagggttggcgtttagtggccctcgattatagccaaattgaattacgtgtccttgcccatctttctggcgatgagaacctcatccgcgtgtttcaggaaggcaaagacattcacactcaaacggcaagctggatgtttggattatcagctgaagcgatcgatcctttgatgcgtcgtgcagcgaagaccatcaatttcggtgttctctacggtatgagtgcctttcgtttgtcgcaggaattaggcattccctatgaagaagctcaggcgttcattcagaaatactttcaaagctatcccaaagttaaagcatggatcgagaagactctcgaagaaggccgcacacgtggttacgtagagaccttatttggacgtcgccgctatgttcccgatttaaacgctcgcgtgaaaggcaagcgtgaagccgccgaacgcatggcgttcaacatgcctgtacagggcacggcagctgacctcatgaaacttgcaatggtgcgcctttttccacaattgcgtgaagttggtgcccgcatgctcttgcaggtccacgatgaactcttgttagaagcgccaaaagagcgtgcggaagaggtggcagccctcgcgaaagaagttatggaaggcgtgtggcccttagcggtgcctcttgaagtcgaagttggtattggcgaggattggctggctgccaaagga

SEQ ID NO: 3556 - protein, 841 aa, synthetic construct
  REGION 1..841: note = Variant of DNA polymerase I from Thermus sp. strain 2.9
MHHHHHHGGSGVLPVFEPKGRVLLVDGHHLAYRNFFALKGLTTSSGEPVQGVYGFAKSLLKALKEDGDVVIVVFDAKAPSFRHEAYEAYKAGRAPTPEDFPRQLALMKELVDLLGLERLEVPGFEADDVLATLAKKAEREGYEVQILTADRDLFQLLSPRISVLHPEGHRITPEWLWEKYGLRPEQWVDFRALAGDPSDNIPGVKGIGEKTALKLLKEWGSLENLLKNLDQVKPESVREKILAHLEDLKLSRELSRVRTDLPLEVDFQRRREPDWEGLKAFLERLEFGSLLHEFGLLESPLPAEEAPWPPPEGAFLGYRLSRPEPMWAELLALAASAQGRVYRAEDPHGALRGLFEVRGLLAKDLAVVALREGLDLPPTDDPMLLAYLLDPSNTTPEGVARRYGGEWTEDAAKRALLAERLHANLLKRLQGEERLLWLYEEVEKPLSRVLAHMEATGVKLDVAYLENLSLEVAAHMRRLEEEVFRLAGRSFRLNSRDQLERVLFDELGLPPIGKTEKTGKRSTSAAVLEALREVHPIVDKILQYRELAKLKGTYIDRLPALVHPKTGRLHTRFNQTATATGRLSSSDPNLQNIPVRTPLGQKIRRAFVAEEGWRLVALDYSQIELRVLAHLSGDENLIRVFQEGKDIHTQTASWMFGLSAEAIDPLMRRAAKTINFGVLYGMSAFRLSQELGIPYEEAQAFIQKYFQSYPKVKAWIEKTLEEGRTRGYVETLFGRRRYVPDLNARVKGKREAAERMAFNMPVQGTAADLMKLAMVRLFPQLREVGARMLLQVHDELLLEAPKERAEEVAALAKEVMEGVWPLAVPLEVEVGIGEDWLAAKG

SEQ ID NO: 3557 - DNA, 2523 bp, synthetic construct
  misc_feature 1..2523: note = Variant of DNA polymerase I from Thermus sp. strain 2.9
  source 1..2523: mol_type = other DNA
atgcaccatcatcatcatcatggcggtagcggcgtgttagaggtgttcgagcctaaaggtcgcgtgcttctggttgatggccatcatctcgcgtatcgtaacttctttgccctgaaaggattaaccaccagcagcggcgagccggtacagggtgtctacggctttgcaaagtcgctcctgaaagctctgaaagaagacggtgatgtggtgattgttgtctttgatgcgaaagcgccaagttttcgccacgaagcgtacgaagcttacaaagccgggcgtgctgatacgccggaagactttcctcgccaattggcgcttatgaaggaattagtggatttgcttggcctcgaacgcttggaagttcccggtttcgaggcagacgacgtattagcgactctcgcaaagaaagccgaacgtgagggctatgaagtccagatcttgacagcagatcgcgatcttttccagcttttatctccgcgcatctcggtgttacacccggaagggcatcgtatcaccccggaatggctctgggagaaatatggtttgcgtcccgaacaatgggtggattttcgcgccttagcaggcgatccgagcgacaatattccgggagttaaaggtatcggcgagaagacggcgctcaagctccttaaagaatgggggtcgttggagaacttgcttaagaatttagatcaggtcaaaccagagtcagtgcgtgagaagattcttgctcacctcgaagacctcaaattaagccgcgaattgtcccgtgtacgcaccgatttgccgctcgaagttgatttccaacgccgccgcgaacctgactgggagggtcttaaagcgtttttagagcgtcttgaatttggttcgctcttgcatgaattcggccttttagaaagcccgttaccagccgaagaagcaccttggccaccgcccgagggcgcgtttttaggttaccgtttgagtcgcccggaaccgatgtgggccgaattactggctcttgcagcgtctgcccagggacgtgtgtatcgcgcggaagaccctcatggtgcgctccgcggcctcttcgaagtccgtggactccttgccaaagacttagctgttgttgcattgcgcgaaggtcttgatttacctccgactgatgatccaatgcttcttgcgtacctcttggacccgtcaaacacgacgcctgaaggcgtagcccgtcgttacggcggcgagtggaccgaagatgcagcgaaacgcgcgttattggccgaacgtttgcacgccaatttattaggacgtttgcaaggcgaggaacgtctcctctggctttacgaagaagtggagaaaccattgagtcgcgtgctcgcgcatatggaagctaccggtgtcaaattagacgtggcgtatttggagaatctcagccttgaagttgctgcccacatgcgccgcttggaggaagaagtattccgtttagcaggccgttcctttcgccttaattctcgcgatcagttagaaaaggtgttgttcgatgaacttggtctccctcctatcggcaagacagagaagaccggtaaacgtagcacttcagcggcggttttagaagctcttcgcgaagtccatcccattgtggacaagatcttgcaataccgcgaactcgcgaaattgaaaggcacctatattgaccgtcttccggcattagtccacccgaaaacgggacgcctccatacccgcttcaaccaaacagccacggcgaccggtcgtttgtcctcctctgatccaaaccttcagaatattccagtacgtaccccgttgggccagaagatccgccgtgcgtttgtagctgaggagggttggcgtttagtggccctcgattatagccaaattgaattacgtgtccttgcccatctttctggcgatgagaacctcatccgcgtgtttgaggaaggcaaagacattcacactcaaacggcaagctggatgtttggattatcagctgaagcgatcgatcctttgatgcgtcgtgcagcgaagaccatcaatttcggtgttctctacggtatgagtgcctttcgtttgtcgcaggaattaggcattccctacgaagaagctcaggcgttcattcagaaatactttcaaagctatcccaaagttaaagcatggatcgagaagactctcgaagaaggccgcacccgtggttacgtagagaccttatttggacgtcgccgctatgttcccgatttaaacgctcgcgtgaaaggcaagcgtgaagccgccgaacgcatggcgttcaacatgcctgtacagggcacggcagctgacctcatgaaacttgcaatggtgcgcctttttccacaattgcgtgaagttggtgcccgcatgctcttgcaggtccacgatgaactcttgttagaagcgccaaaagagcgtgcggaagaggtggcagccctcgcgaaagaagttatggaaggcgtgtggcccttagcggtgcctcttgaagtcgaagttggtattggcgaggattggctggctgccaaagga

SEQ ID NO: 3558 - protein, 841 aa, synthetic construct
  REGION 1..841: note = Variant of DNA polymerase I from Thermus sp. strain 2.9
MHHHHHHGGSGVLEVFEPKGRVLLVDGHHLAYRNFFALKGLTTSSGEPVQGVYGFAKSLLKALKEDGDVVIVVFDAKAPSFRHEAYEAYKAGRADTPEDFPRQLALMKELVDLLGLERLEVPGFEADDVLATLAKKAEREGYEVQILTADRDLFQLLSPRISVLHPEGHRITPEWLWEKYGLRPEQWVDFRALAGDPSDNIPGVKGIGEKTALKLLKEWGSLENLLKNLDQVKPESVREKILAHLEDLKLSRELSRVRTDLPLEVDFQRRREPDWEGLKAFLERLEFGSLLHEFGLLESPLPAEEAPWPPPEGAFLGYRLSRPEPMWAELLALAASAQGRVYRAEDPHGALRGLFEVRGLLAKDLAVVALREGLDLPPTDDPMLLAYLLDPSNTTPEGVARRYGGEWTEDAAKRALLAERLHANLLGRLQGEERLLWLYEEVEKPLSRVLAHMEATGVKLDVAYLENLSLEVAAHMRRLEEEVFRLAGRSFRLNSRDQLEKVLFDELGLPPIGKTEKTGKRSTSAAVLEALREVHPIVDKILQYRELAKLKGTYIDRLPALVHPKTGRLHTRFNQTATATGRLSSSDPNLQNIPVRTPLGQKIRRAFVAEEGWRLVALDYSQIELRVLAHLSGDENLIRVFEEGKDIHTQTASWMFGLSAEAIDPLMRRAAKTINFGVLYGMSAFRLSQELGIPYEEAQAFIQKYFQSYPKVKAWIEKTLEEGRTRGYVETLFGRRRYVPDLNARVKGKREAAERMAFNMPVQGTAADLMKLAMVRLFPQLREVGARMLLQVHDELLLEAPKERAEEVAALAKEVMEGVWPLAVPLEVEVGIGEDWLAAKG

SEQ ID NO: 3559 - DNA, 2523 bp, synthetic construct
  misc_feature 1..2523: note = Variant of DNA polymerase I from Thermus sp. strain 2.9
  source 1..2523: mol_type = other DNA
atgcaccatcatcatcatcatggcggtagcggcgtgttagaggtgttcgagcctaaaggtcgcgtgcttctggttgatggccatcatctcgcgtatcgtaacttctttgccctgaaaggattaaccaccagcagcggcgagccggtacagggtgtctacggctttgcaaagtcgctcctgaaagctctgaaagaagacggtgatgtggtgattgttgtctttgatgcgaaagcgccaagttttcgccacgaagcgtacgaagcttacaaagccgggcgtgctccaacgccggaagactttcctcgccaattggcgcttatgaaggaattagtggatttgcttggcctcgaacgcttggaagttcccggtttcgaggcagacgacgtattagcgactctcgcaaagaaagccgaacgcgagggctatgaagtccagatcttgacagcagatcgcgatcttttccagcttttatctccgcgcatctcggtgttacacccggaagggcatcgtatcaccccggaatggctctgggagaaatatggtttgcgtcccgaacaatgggtggattttcgcgccttagcaggcgatcctagcgacaatattccgggagttaaaggtatcggcgagaagacggcgctcaagctccttaaagaatgggggtcgttggagaacttgcttaagaatttagatcaggtcaaaccagagtcagtgcgtgagaagattcttgctcacctcgaagacctcaaattaagccgcgaattgtcccgtgtacgcaccgatttgccgctcgaagttgatttccaacgccgccgcgaacctgactgggagggtcttaaagcgtttttagagcgtcttgaatttggttcgctcttgcatgaattcggccttttagaaagcccgttaccagccgaagaagcaccttggccaccgcccgagggcgcgtttttaggttaccgtttgagtcgcccggaaccgatgtgggccgaattactggctcttgcagcgtctgcccagggacgtgtgtatcgcgcggaagaccctcatggtgcgctccgcggcctcttcgaagtccgtggactccttgccaaagacttagctgttgttgcattgcgcgaaggtcttgatttacctccgactgatgatccaatgcttcttgcgtacctcttggacccgtcaaacacgacgcccgaaggcgtagcccgtcgttacggcggcgagtggaccgaagatgcagcgaaacgcgcgttattggccgaacgtttgcacgccaatttattaggacgtttgcaaggcgagaagcgtctcctctggctttacgaagaagtggagaaaccattgagtcgcgtgctcgcgcatatggaagctaccggtgtcaaattagacgtggcgtatttggagaatctcagccttgaagttgctgcccacatgcgccgcttggaggaagaagtattccgtttagcaggccgttcctttcgccttaattctcgcgatcagttagaacgtgtgttgttcgatgaacttggtctccctcctatcggcaagacagagaagaccggtaaacgtagcacttcagcggcggttttagaagctcttcgcgaagtccatcccattgtggacaagatcttgcaataccgcgaactcgcgaaattgaaaggcacctatattgaccgtcttccggcattagtccacccgaaaacgggacgcctccatacccgcttcaaccaaacagccacggcgaccggtcgtttgtcctcctctgatccaaaccttcagaatattccagtacgtaccaaattgggccagaagatccgccgtgcgtttgtagctgaggagggttggcgtttagtggccctcgattatagccaaattgaattacgtgtccttgcccatctttctggcgatgagaacctcatccgcgtgtttcaggaaggcaaagacattcacactcaaacggcaagctggatgtttggattatcagctgaagcgatcgatcctttgatgcgtcgtgcagcgaagaccatcaatttcggtgttctctacggtatgagtgcctttcgtttgtcgcaggaattaggcattccctatgaagaagctcaggcgttcattcagaaatactttcaaagctatcccaaagttaaagcatggatcgagaagactctcgaagaaggccgcacacgtggttacgtagagaccttatttggacgtcgccgctatgttcccgatttaaacgctcgcgtgaaaggcaagcgtgaagccgccgaacgcatggcgttcaacatgcctgtacagggcacggcagctgacctcatgaaacttgcaatggtgcgcctttttccacaattgcgtgaagttggtgcccgcatgctcttgcaggtccacgatgaactcttgttagaagcgccaaaagagcgtgcggaagaggtggcagccctcgcgaaagaagttatggaaggcgtgtggcccttagcggtgcctcttgaagtcgaagttggtattggcgaggattggctggctgccaaagga

SEQ ID NO: 3560 - protein, 841 aa, synthetic construct
  REGION 1..841: note = Variant of DNA polymerase I from Thermus sp. strain 2.9
MHHHHHHGGSGVLEVFEPKGRVLLVDGHHLAYRNFFALKGLTTSSGEPVQGVYGFAKSLLKALKEDGDVVIVVFDAKAPSFRHEAYEAYKAGRAPTPEDFPRQLALMKELVDLLGLERLEVPGFEADDVLATLAKKAEREGYEVQILTADRDLFQLLSPRISVLHPEGHRITPEWLWEKYGLRPEQWVDFRALAGDPSDNIPGVKGIGEKTALKLLKEWGSLENLLKNLDQVKPESVREKILAHLEDLKLSRELSRVRTDLPLEVDFQRRREPDWEGLKAFLERLEFGSLLHEFGLLESPLPAEEAPWPPPEGAFLGYRLSRPEPMWAELLALAASAQGRVYRAEDPHGALRGLFEVRGLLAKDLAVVALREGLDLPPTDDPMLLAYLLDPSNTTPEGVARRYGGEWTEDAAKRALLAERLHANLLGRLQGEKRLLWLYEEVEKPLSRVLAHMEATGVKLDVAYLENLSLEVAAHMRRLEEEVFRLAGRSFRLNSRDQLERVLFDELGLPPIGKTEKTGKRSTSAAVLEALREVHPIVDKILQYRELAKLKGTYIDRLPALVHPKTGRLHTRFNQTATATGRLSSSDPNLQNIPVRTKLGQKIRRAFVAEEGWRLVALDYSQIELRVLAHLSGDENLIRVFQEGKDIHTQTASWMFGLSAEAIDPLMRRAAKTINFGVLYGMSAFRLSQELGIPYEEAQAFIQKYFQSYPKVKAWIEKTLEEGRTRGYVETLFGRRRYVPDLNARVKGKREAAERMAFNMPVQGTAADLMKLAMVRLFPQLREVGARMLLQVHDELLLEAPKERAEEVAALAKEVMEGVWPLAVPLEVEVGIGEDWLAAKG

SEQ ID NO: 3561 - DNA, 2523 bp, synthetic construct
  misc_feature 1..2523: note = Variant of DNA polymerase I from Thermus sp. strain 2.9
  source 1..2523: mol_type = other DNA
atgcaccatcatcatcatcatggcggtagcggcgtgttacctgtgttcgagcctaaaggtcgcgtgcttctggttgatggccatcatctcgcgtatcgtaacttctttgccctgaaaggattaaccaccagcagcggcgagccggtacagggtgtctacggctttgcaaagtcgctcctgaaagctctgaaagaagacggtgatgtggtgattgttgtctttgatgcgaaagcgccaagttttcgccacgaagcgtacgaagcttacaaagccgggcgtgctcctacgccggaagactttcctcgccaattggcgcttatgaaggaattagtggatttgcttggcctcgaacgcttggaagttcccggtttcgaggcagacgacgtattagcgactctcgcaaagaaagccgaagacgagggctatgaagtccagatcttgacagcagatcgcgatcttttccagcttttatctccgcgcatctcggtgttacacccggatgggcatcgtatcaccccggaatggctctgggagaaatatggtttgcgtcccgaacaatgggtggattttcgcgccttagcaggcgatccgagcgacaatattccgggagttaaaggtatcggcgagaagacggcgctcaagctccttaaagaatgggggtcgttggagaacttgcttaagaatttagatcaggtcaaaccagagtcagtgcgtgagaagattcttgctcacctcgaagacctcaaattaagccgcgaattgtcccgtgtacgcaccgatttgccgctcgaagttgatttccaacgccgccgcgaacctgactgggagggtcttaaagcgtttttagagcgtcttgaatttggttcgctcttgcatgaattcggccttttagaaagcccgttaccagccgaagaagcaccttggccaccgcccgagggcgcgtttttaggttaccgtttgagtcgcccggaaccgatgtgggccgaattactggctcttgcagcgtctgcccagggacgtgtgtatcgcgcggaagaccctcatggtgcgctccgcggcctcttcgaagtccgtggactccttgccaaagacttagctgttgttgcattgcgcgaaggtcttgatttacctccgactgatgatccaatgcttcttgcgtacctcttggacccgtcaaacacgacgcccgaaggcgtagcccgtcgttacggcggcgagtggaccgaagatgcagcgaaacgcgcgttattggccgaacgtttgcacgccaatttattaggacgtttgcaaggcgaggaacgtctcctctggctttacgaagaagtggagaaaccattgagtcgcgtgctcgcgcatatggaagctaccggtgtcaaattagacgtggcgtatttggagaatctcagccttgaagttgctgcccacatgcgccgcttggaggaagaagtattccgtttagcaggccgttcctttcgccttaattctcgcgatcagttagaacgtgtgttgttcgatgaacttggtctccctcctatcggcaagacagagaagaccggtaaacgtagcacttcagcggcggttttagaagctcttcgcgaagtccatcccattgtggacaagatcttgcaataccgcgaactcgcgaaattgaaaggcacctatattgaccgtcttccggcattagtccacccgaaaacgggacgcctccatacccgcttcaaccaaacagccacggcgaccggtcgtttgtcctcctctgatccaaaccttcagaatattccagtacgtaccccgttgggccagaagatccgccgtgcgtttgtagctgaggagggttggcgtttagtggccctcgattatagccaaattgaattacgtgtccttgcccatctttctggcgatgagaacctcatccgcgtgtttcaggaaggcaaagacattcacactcaaacggcaagctggatgtttggattatcagctgaagcgatcgatcctttgatgcgtcgtgcagcgaagaccatcaatttcggtgttctctacggtatgagtgcctttcgtttgtcgcaggaattaggcattccctatgaagaagctcaggcgttcattcagaaatactttcaaagctatcccaaagttaaagcatggatcgagaagactctcgaagaaggccgcacacgtggttacgtagagaccttatttggacgtcgccgctatgttcccgatttaaacgctcgcgtgaaaggcaagcgtgaagccgccgaacgcatggcgttcaacatgcctgtacagggcacggcagctgacctcatgaaacttgcaatggtgcgcctttttccacaattgcgtgaagttggtgcccgcatgctcttgcaggtccacgatgaactcttgttagaagcgccaaaagagcgtgcggaagaggtggcagccctcgcgaaagaagttatggaaggcgtgtggcccttagcggtgcctcttgaagtcgaagttggtattggcgaggattggctggctgccaaagga

SEQ ID NO: 3562 - protein, 841 aa, synthetic construct
  REGION 1..841: note = Variant of DNA polymerase I from Thermus sp. strain 2.9
MHHHHHHGGSGVLPVFEPKGRVLLVDGHHLAYRNFFALKGLTTSSGEPVQGVYGFAKSLLKALKEDGDVVIVVFDAKAPSFRHEAYEAYKAGRAPTPEDFPRQLALMKELVDLLGLERLEVPGFEADDVLATLAKKAEDEGYEVQILTADRDLFQLLSPRISVLHPDGHRITPEWLWEKYGLRPEQWVDFRALAGDPSDNIPGVKGIGEKTALKLLKEWGSLENLLKNLDQVKPESVREKILAHLEDLKLSRELSRVRTDLPLEVDFQRRREPDWEGLKAFLERLEFGSLLHEFGLLESPLPAEEAPWPPPEGAFLGYRLSRPEPMWAELLALAASAQGRVYRAEDPHGALRGLFEVRGLLAKDLAVVALREGLDLPPTDDPMLLAYLLDPSNTTPEGVARRYGGEWTEDAAKRALLAERLHANLLGRLQGEERLLWLYEEVEKPLSRVLAHMEATGVKLDVAYLENLSLEVAAHMRRLEEEVFRLAGRSFRLNSRDQLERVLFDELGLPPIGKTEKTGKRSTSAAVLEALREVHPIVDKILQYRELAKLKGTYIDRLPALVHPKTGRLHTRFNQTATATGRLSSSDPNLQNIPVRTPLGQKIRRAFVAEEGWRLVALDYSQIELRVLAHLSGDENLIRVFQEGKDIHTQTASWMFGLSAEAIDPLMRRAAKTINFGVLYGMSAFRLSQELGIPYEEAQAFIQKYFQSYPKVKAWIEKTLEEGRTRGYVETLFGRRRYVPDLNARVKGKREAAERMAFNMPVQGTAADLMKLAMVRLFPQLREVGARMLLQVHDELLLEAPKERAEEVAALAKEVMEGVWPLAVPLEVEVGIGEDWLAAKG

SEQ ID NO: 3563 - DNA, 2523 bp, synthetic construct
  misc_feature 1..2523: note = Variant of DNA polymerase I from Thermus sp. strain 2.9
  source 1..2523: mol_type = other DNA
atgcaccatcatcatcatcatggcggtagcggcgtgttaccggtgttcgagcctaaaggtcgcgtgcttctggttgatggccatcatctcgcgtatcgtaacttctttgccctgaaaggattaaccaccagcagcggcgagccggtacagggtgtctacggctttgcaaagtcgctcctgaaagctctgaaagaagacggtgatgtggtgattgttgtctttgatgcgaaagcgccaagttttcgccacgaagcgtacgaagcttacaaagccgggcgtgctccaacgccggaagactttcctcgccaattggcgcttatgaaggaattagtggatttgcttggcctcgaacgcttggaagttcccggtttcgaggcagacgacgtattagcgactctcgcaaagaaagccgaacgtgagggctatgaagtccagatcttgacagcagatcgcgatcttttccagcttttatctccgcgcatctcggtgttacacccggaagggcatcgtatcaccccggaatggctctgggagaaatatggtttgcgtcccgaacaatgggtggattttcgcgccttagcaggcgatccgagcgacaatattccgggagttaaaggtatcggcgagaagacggcgctcaagctccttaaagaatgggggtcgttggagaacttgcttaagaatttagatcaggtcaaaccagagtcagtgcgtgagaagattcttgctcacctcgaagacctcaaattaagccgcgaattgtcccgtgtacgcaccgatttgccgctcgaagttgatttccaacgccgccgcgaacctgactgggagggtcttaaagcgtttttagagcgtcttgaatttggttcgctcttgcatgaattcggccttttagaaagcccgttaccagccgaagaagcaccttggccaccgcccgagggcgcgtttttaggttaccgtttgagtcgcccggaaccgatgtgggccgaattactggctcttgcagcgtctgcccagggacgtgtgtatcgcgcggaagaccctcatggtgcgctccgcggcctcttcgaagtccgtggactccttgccaaagacttagctgttgttgcattgcgcgaaggtcttgatttacctccgactgatgatccaatgcttcttgcgtacctcttggacccgtcaaacaggacgcccgaaggcgtagcccgtcgttacggcggcgagtggaccgaagatgcagcgaaacgcgcgttattggccgaacgtttgcacgccaatttattaggacgtttgcaaggcgaggaacgtctcctctggctttacgaagaagtggagaaaccattgagtcgcgtgctcgcgcatatggaagctaccggtgtcaaattagacgtggcgtatttggagaatctcagccttgaagttgctgcccacatgcgccgcttggaggaagaagtattccgtttagcaggccgttcctttcgccttaattctcgcgatcagttagaacgtgtgttgttcgatgaacttggtctccctcctatcggcaagacagagaagaccggtaaacgtagcacttcagcggcggttttagaagctcttcgcgaagtccatcccattgtggacaagatcttgcaataccgcgaactcgcgaaattgaaaggcacctatattgaccgtcttccggcattagtccacccgaaaacgggacgcctccatacccgcttcaaccaaacagccacggcgaccggtcgtttgtcctcctctgatccaaaccttcagaatattccagtacgtaccccattgggccagaagatccgccgtgcgtttgtagctgaggagggttggcgtttagtggccctcgattatagccaaattgaattacgtgtccttgcccatctttctggcgatgagaacctcatccgcgtgtttcaggaaggcaaagacattcacactcaaacggcaagctggatgtttggattatcagctgaagcgatcgatcctttgatgcgtcgtgcagcgaagaccatcaatttcggtgttctctacggtatgagtgcctttcgtttgtcgcaggaattaggcattccctatgaagaagctcaggcgttcattcagaaatactttcaaagctatcccaaagttaaagcatggatcgagaagactctcgaagaaggccgcacacgtggttacgtagagaccttatttggacgtcgccgctatgttcccgatttaaacgctcgcgtgaaaggcaagcgtgaagccgccgaacgcatggcgttcaacatgcctgtacagggcacggcagctgacctcatgaaacttgcaatggtgcgcctttttccacaattgcgtgaagttggtgcccgcatgctcttgcaggtccacgatgaactcttgttagaagcgccaaaagagcgtgcggaagaggtggcagccctcgcgaaagaagttatggaaggcgtgtggcccttagcggtgcctcttgaagtcgaagttggtattggcgaggattggctggctgccaaagga

SEQ ID NO: 3564 - protein, 841 aa, synthetic construct
  REGION 1..841: note = Variant of DNA polymerase I from Thermus sp. strain 2.9
MHHHHHHGGSGVLPVFEPKGRVLLVDGHHLAYRNFFALKGLTTSSGEPVQGVYGFAKSLLKALKEDGDVVIVVFDAKAPSFRHEAYEAYKAGRAPTPEDFPRQLALMKELVDLLGLERLEVPGFEADDVLATLAKKAEREGYEVQILTADRDLFQLLSPRISVLHPEGHRITPEWLWEKYGLRPEQWVDFRALAGDPSDNIPGVKGIGEKTALKLLKEWGSLENLLKNLDQVKPESVREKILAHLEDLKLSRELSRVRTDLPLEVDFQRRREPDWEGLKAFLERLEFGSLLHEFGLLESPLPAEEAPWPPPEGAFLGYRLSRPEPMWAELLALAASAQGRVYRAEDPHGALRGLFEVRGLLAKDLAVVALREGLDLPPTDDPMLLAYLLDPSNRTPEGVARRYGGEWTEDAAKRALLAERLHANLLGRLQGEERLLWLYEEVEKPLSRVLAHMEATGVKLDVAYLENLSLEVAAHMRRLEEEVFRLAGRSFRLNSRDQLERVLFDELGLPPIGKTEKTGKRSTSAAVLEALREVHPIVDKILQYRELAKLKGTYIDRLPALVHPKTGRLHTRFNQTATATGRLSSSDPNLQNIPVRTPLGQKIRRAFVAEEGWRLVALDYSQIELRVLAHLSGDENLIRVFQEGKDIHTQTASWMFGLSAEAIDPLMRRAAKTINFGVLYGMSAFRLSQELGIPYEEAQAFIQKYFQSYPKVKAWIEKTLEEGRTRGYVETLFGRRRYVPDLNARVKGKREAAERMAFNMPVQGTAADLMKLAMVRLFPQLREVGARMLLQVHDELLLEAPKERAEEVAALAKEVMEGVWPLAVPLEVEVGIGEDWLAAKG

SEQ ID NO: 3565 - DNA, 2523 bp, synthetic construct; identical to SEQ ID NO: 3435
  misc_feature 1..2523: note = Variant of DNA polymerase I from Thermus sp. strain 2.9
  source 1..2523: mol_type = other DNA

SEQ ID NO: 3566 - protein, 841 aa, synthetic construct; identical to SEQ ID NO: 3436
  REGION 1..841: note = Variant of DNA polymerase I from Thermus sp. strain 2.9

SEQ ID NO: 3567 - DNA, 2523 bp, synthetic construct; identical to SEQ ID NO: 3523
  misc_feature 1..2523: note = Variant of DNA polymerase I from Thermus sp. strain 2.9
  source 1..2523: mol_type = other DNA

SEQ ID NO: 3568 - protein, 841 aa, synthetic construct; identical to SEQ ID NO: 3524
  REGION 1..841: note = Variant of DNA polymerase I from Thermus sp. strain 2.9

SEQ ID NO: 3569 - DNA, 2523 bp, synthetic construct
  misc_feature 1..2523: note = Variant of DNA polymerase I from Thermus sp. strain 2.9
  source 1..2523: mol_type = other DNA
atgcaccatcatcatcatcatggcggtagcggcgtgttaccggtgttcgagcctaaaggtcgcgtgcttctggttgatggccatcatctcgcgtatcgtaacttctttgccctgaaaggattaaccaccagcagcggcgagccggtacagggtgtctacggctttgcaaagtcgctcctgaaagctctgaaagaagacggtgatgtggtgattgttgtctttgatgcgaaagcgccaagttttcgccacgaagcgtacgaagcttacaaagccgggcgtgctccaacgccggaagactttcctcgccaattggcgcttatgaaggaattagtggatttgcttggcctcgaacgcttggaagttcccggtttcgaggcagacgacgtattagcgactctcgcaaagaaagccgaacgtgagggctatgaagtccagatcttgacagcagatcgcgatcttttccagcttttatctccgcgcatctcggtgttacacccggaagggcatcgtatcaccccggaatggctctgggagaaatatggtttgcgtcccgaacaatgggtggattttcgcgccttagcaggcgatccgagcgacaatattccgggagttaaaggtatcggcgagaagacggcgctcaagctccttaaagaatgggggtcgttggagaacttgcttaagaatttagatcaggtcaaaccagagtcagtgcgtgagaagattcttgctcacctcgaagacctcaaattaagccgcgaattgtcccgtgtacgcaccgatttgccgctcgaagttgatttccaacgccgccgcgaacctgactgggagggtcttaaagcgtttttagagcgtcttgaatttggttcgctcttgcatgaattcggccttttagaaagcccgttaccagccgaagaagcaccttggccaccgcccgagggcgcgtttttaggttaccgtttgagtcgcccggaaccgatgtgggccgaattactggctcttgcagcgtctgcccagggacgtgtgtatcgcgcggaagaccctcatggtgcgctccgcggcctcttcgaagtccgtggactccttgccaaagacttagctgttgttgcattgcgcgaaggtcttgatttacctccgactgatgatccaatgcttcttgcgtacctcttggacccgtcaaacacgacgcccgaaggcgtagcccgtcgttacggcggcgagtggaccgaagatgcagcgaaacgcgcgttattggccgaacgtttgcacgccaatttattaggacgtttgcaaggcgaggaacgtctcctctggctttacgaagaagtggagaaaccattgagtcgcgtgctcgcgcatatggaagctaccggtgtcaaattagacgtggcgtatttggagaatctcagccttgaagttgctgcccacatgcgccgcttggaggaagaagtattccgtttagcaggccgttcctttcgccttaattctcgcgatcagttagaacgtgtgttgttcgatgaacttggtctccctcctatcggcaagacagagaagaccggtaaacgtagcacttcagcggcggttttagaagctcttcgcgaagtccatcccattgtggacaagatcttgcaataccgcgaactcgcgaaattgaaaggcacctatattgaccgtcttccggcattagtccacccgaaaacgggacgcctccatacccgcttcaaccaaacagccacggcgaccggtcgtttgtcctcctctgatccaaaccttcagaatattccagtacgtaccccattgggccagaagatccgccgtgcgtttgtagctgaggagggttggcgtttagtggccctcgattatagccaaattgaattacgtgtccttgcccatctttctggcgatgagaacctcatccgcgtgtttcaggaaggcaaagacattcacactcaaacggcaagctggatgtttggattatcagctgaagttatcgatcctttgatgcgtcgtgcagcgaagaccatcaatttcggtgttctctacggtatgagtgcctttcgtttgtcgcaggaattaggcattccctatgaagaagctcaggcgttcattcagaaatactttcaaagctatcccaaagttaaagcatggatcgagaagactctcgaagaaggccgcacacgtggttacgtagagaccttatttggacgtcgccgctatgttcccgatttaaacgctcgcgtgaaaggcaagcgtgaagccgccgaacgcatggcgttcaacatgcctgtacagggcacggcagctgacctcatgaaacttgcaatggtgcgcctttttccacaattgcgtgaagttggtgcccgcatgctcttgcaggtccacgatgaactcttgttagaagcgccaaaagagcgtgcggaagaggtggcagccctcgcgaaagaagttatggaaggcgtgtggcccttagcggtgcctcttgaagtcgaagttggtattggcgaggattggctggctgccaaagga

SEQ ID NO: 3570 - protein, 841 aa, synthetic construct
  REGION 1..841: note = Variant of DNA polymerase I from Thermus sp. strain 2.9
MHHHHHHGGSGVLPVFEPKGRVLLVDGHHLAYRNFFALKGLTTSSGEPVQGVYGFAKSLLKALKEDGDVVIVVFDAKAPSFRHEAYEAYKAGRAPTPEDFPRQLALMKELVDLLGLERLEVPGFEADDVLATLAKKAEREGYEVQILTADRDLFQLLSPRISVLHPEGHRITPEWLWEKYGLRPEQWVDFRALAGDPSDNIPGVKGIGEKTALKLLKEWGSLENLLKNLDQVKPESVREKILAHLEDLKLSRELSRVRTDLPLEVDFQRRREPDWEGLKAFLERLEFGSLLHEFGLLESPLPAEEAPWPPPEGAFLGYRLSRPEPMWAELLALAASAQGRVYRAEDPHGALRGLFEVRGLLAKDLAVVALREGLDLPPTDDPMLLAYLLDPSNTTPEGVARRYGGEWTEDAAKRALLAERLHANLLGRLQGEERLLWLYEEVEKPLSRVLAHMEATGVKLDVAYLENLSLEVAAHMRRLEEEVFRLAGRSFRLNSRDQLERVLFDELGLPPIGKTEKTGKRSTSAAVLEALREVHPIVDKILQYRELAKLKGTYIDRLPALVHPKTGRLHTRFNQTATATGRLSSSDPNLQNIPVRTPLGQKIRRAFVAEEGWRLVALDYSQIELRVLAHLSGDENLIRVFQEGKDIHTQTASWMFGLSAEVIDPLMRRAAKTINFGVLYGMSAFRLSQELGIPYEEAQAFIQKYFQSYPKVKAWIEKTLEEGRTRGYVETLFGRRRYVPDLNARVKGKREAAERMAFNMPVQGTAADLMKLAMVRLFPQLREVGARMLLQVHDELLLEAPKERAEEVAALAKEVMEGVWPLAVPLEVEVGIGEDWLAAKG

SEQ ID NO: 3571 - DNA, 2523 bp, synthetic construct; identical to SEQ ID NO: 3447
  misc_feature 1..2523: note = Variant of DNA polymerase I from Thermus sp. strain 2.9
  source 1..2523: mol_type = other DNA

SEQ ID NO: 3572 - protein, 841 aa, synthetic construct; identical to SEQ ID NO: 3448
  REGION 1..841: note = Variant of DNA polymerase I from Thermus sp. strain 2.9

SEQ ID NO: 3573 - DNA, 2523 bp, synthetic construct
  misc_feature 1..2523: note = Variant of DNA polymerase I from Thermus sp. strain 2.9
  source 1..2523: mol_type = other DNA
atgcaccatcatcatcatcatggcggtagcggcgtgttaccggtgttcgagcctaaaggtcgcgtgcttctggttgatggccatcatctcgcgtatcgtaacttctttgccctgaaaggattaaccaccagcagcggcgagccggtacagggtgtctacggctttgcaaagtcgctcctgaaagctctgaaagaagacggtgatgtggtgattgttgtctttgatgcgaaagcgccaagttttcgccacgaagcgtacgaagcttacaaagccgggcgtgctccaacgccggaagactttcctcgccaattggcgcttatgaaggaattagtggatttgcttggcctcgaacgcttggaagttcccggtttcgaggcagacgacgtattagcgactctcgcaaagaaagccgaacgtgagggctatgaagtccagatcttgacagcagatcgcgatcttttccagcttttatctccgcgcatctcggtgttacacccggaagggcatcgtatcaccccggaatggctctgggagaaatatggtttgcgtcccgaacaatgggtggattttcgcgccttagcaggcgatccgagcgacaatattccgggagttaaaggtatcggcgagaagacggcgctcaagctccttaaagaatgggggtcgttggagaacttgcttaagaatttagatcaggtcaaaccagagtcagtgcgtgagaagattcttgctcacctcgaagacctcaaattaagccgcgaattgtcccgtgtacgcaccgatttgccgctcgaagttgatttccaacgccgccgcgaacctgactgggagggtcttaaagcgtttttagagcgtcttgaatttggttcgctcttgcatgaattcggccttttagaaagcccgttaccagccgaagaagcaccttggccaccgcccgagggcgcgtttttaggttaccgtttgagtcgcccggaaccgatgtgggccgaattactggctcttgcagcgtctgcccagggacgtgtgtatcgcgcggaagaccctcatggtgcgctccgcggcctcttcgaagtccgtggactccttgccaaagacttagctgttgttgcattgcgcgaaggtcttgatttacctccgactgatgatccaatgcttcttgcgtacctcttggacccgtcaaacacgacgcccgaaggcgtagcccgtcgttacggcggcgagtggaccgaagatgcagcgaaacgcgcgttattggccgaacgtttgcacgccaatttacagggacgtttgcaaggcgaggaacgtctcctctggctttacgaagaagtggagaaaccattgagtcgcgtgctcgcgcatatggaagctaccggtgtcaaattagacgtggcgtatttggagaatctcagccttgaagttgctgcccacatgcgccgcttggaggaagaagtattccgtttagcaggccgttcctttcgccttaattctcgcgatcagttagaacgtgtgttgttcgatgaacttggtctccctcctatcggcaagacagagaagaccggtaaacgtagcacttcagcggcggttttagaagctcttcgcgaagtccatcccattgtggacaagatcttgcaataccgcgaactcgcgaaattgaaaggcacctatattgaccgtcttccggcattagtccacccgaaaacgggacgcctccatacccgcttcaaccaaacagccacggcgaccggtcgtttgtcctcctctgatccaaaccttcagaatattccagtacgtaccccattgggccagaagatccgccgtgcgtttgtagctgaggagggttggcgtttagtggccctcgattatagccaaattgaattacgtgtccttgcccatctttctggcgatgagaacctcatccgcgtgtttcaggaaggcaaagacattcacactcaaacggcaagctggatgtttggattatcagctgaagcgatcgatcctttgatgcgtcgtgcagcgaagaccatcaatttcggtgttctctacggtatgagtgcctttcgtttgtcgcaggaattaggcattccctatgaagaagctcaggcgttcattcagaaatactttcaaagctatcccaaagttaaagcatggatcgagaagactctcgaagaaggccgcacacgtggttacgtagagaccttatttggacgtcgccgctatgttcccgatttaaacgctcgcgtgaaaggcaagcgtgaagccgccgaacgcatggcgttcaacatgcctgtacagggcacggcagctgacctcatgaaacttgcaatggtgcgcctttttccacaattgcgtgaagttggtgcccgcatgctcttgcaggtccacgatgaactcttgttagaagcgccaaaagagcgtgcggaagaggtggcagccctcgcgaaagaagttatggaaggcgtgtggcccttagcggtgcctcttgaagtcgaagttggtattggcgaggattggctggctgccaaagga

SEQ ID NO: 3574 - protein, 841 aa, synthetic construct
  REGION 1..841: note = Variant of DNA polymerase I from Thermus sp. strain 2.9
MHHHHHHGGSGVLPVFEPKGRVLLVDGHHLAYRNFFALKGLTTSSGEPVQGVYGFAKSLLKALKEDGDVVIVVFDAKAPSFRHEAYEAYKAGRAPTPEDFPRQLALMKELVDLLGLERLEVPGFEADDVLATLAKKAEREGYEVQILTADRDLFQLLSPRISVLHPEGHRITPEWLWEKYGLRPEQWVDFRALAGDPSDNIPGVKGIGEKTALKLLKEWGSLENLLKNLDQVKPESVREKILAHLEDLKLSRELSRVRTDLPLEVDFQRRREPDWEGLKAFLERLEFGSLLHEFGLLESPLPAEEAPWPPPEGAFLGYRLSRPEPMWAELLALAASAQGRVYRAEDPHGALRGLFEVRGLLAKDLAVVALREGLDLPPTDDPMLLAYLLDPSNTTPEGVARRYGGEWTEDAAKRALLAERLHANLQGRLQGEERLLWLYEEVEKPLSRVLAHMEATGVKLDVAYLENLSLEVAAHMRRLEEEVFRLAGRSFRLNSRDQLERVLFDELGLPPIGKTEKTGKRSTSAAVLEALREVHPIVDKILQYRELAKLKGTYIDRLPALVHPKTGRLHTRFNQTATATGRLSSSDPNLQNIPVRTPLGQKIRRAFVAEEGWRLVALDYSQIELRVLAHLSGDENLIRVFQEGKDIHTQTASWMFGLSAEAIDPLMRRAAKTINFGVLYGMSAFRLSQELGIPYEEAQAFIQKYFQSYPKVKAWIEKTLEEGRTRGYVETLFGRRRYVPDLNARVKGKREAAERMAFNMPVQGTAADLMKLAMVRLFPQLREVGARMLLQVHDELLLEAPKERAEEVAALAKEVMEGVWPLAVPLEVEVGIGEDWLAAKG

SEQ ID NO: 3575 - DNA, 2523 bp, synthetic construct
  misc_feature 1..2523: note = Variant of DNA polymerase I from Thermus sp. strain 2.9
  source 1..2523: mol_type = other DNA
atgcaccatcatcatcatcatggcggtagcggcgtgttaccggtgttcgagcctaaaggtcgcgtgcttctggttgatggccatcatctcgcgtatcgtaacttctttgccctgaaaggattaaccaccagcagcggcgagccggtacagggtgtctacggctttgcaaagtcgctcctgaaagctctgaaagaagacggtgatgtggtgattgttgtctttgatgcgaaagcgccaagttttcgccacgaagcgtacgaagcttacaaagccgggcgtgctccaacgccggaagactttcctcgccaattggcgcttatgaaggaattagtggatttgcttggcctcgaacgcttggaagttcccggtttcgaggcagacgacgtattagcgactctcgcaaagaaagccgaacgtgagggctatgaagtccagatcttgacagcagatcgcgatcttttccagcttttatctccgcgcatctcggtgttacacccggaagggcatcgtatcaccccggaatggctctgggagaaatatggtttgcgtcccgaacaatgggtggattttcgcgccttagcaggcgatccgagcgacaatattccgggagttaaaggtatcggcgagaagacggcgctcaagctccttaaagaatgggggtcgttggagaacttgcttaagaatttagatcaggtcaaaccagagtcagtgcgtgagaagattcttgctcacctcgaagacctcaaattaagccgcgaattgtcccgtgtacgcaccgatttgccgctcgaagttgatttccaacgccgccgcgaacctgactgggagggtcttaaagcgtttttagagcgtcttgaatttggttcgctcttgcatgaattcggccttttagaaagcccgttaccagccgaagaagcaccttggccaccgcccgagggcgcgtttttaggttaccgtttgagtcgcccggaaccgatgtgggccgaattactggctcttgcagcgtctgcccagggacgtgtgtatcgcgcggaagaccctcatggtgcgctccgcggcctcttcgaagtccgtggactccttgccaaagacttagctgttgttgcattgcgcgaaggtcttgatttacctccgactgatgatccaatgcttcttgcgtacctcttggacccgtcaaacacgacgcccgaaggcgtagcccgtcgttacggcggcgagtggaccgaagatgcagcgaaacgcgcgttattggccgaacgtttgcacgccaatttattaggacgtttgcaaggcgaggaacgtctcctctggctttacgaagaagtggagaaaccattgagtcgcgtgctcgcgcatatggaagctaccggtgtcaaattagacgtggcgtatttggagaatctcagccttgaagttgctgcccacatgcgccgcttggaggaagaagtattccgtttagcaggccgttcctttcgccttaattctcgcgatcagttagaacgtgtgttgttcgatgaacttggtctccctcctatcggcaagacagagaagaccggtaaacgtagcacttcagcggcggttttagaagctcttcgcgaagtccatcccattgtggacaagatcttgcaataccgcgaactcgcgaaattgaaaggcacctatattgaccgtcttccggcattagtccacccgaaaacgggacgcctccatacccgcttcaaccaaacagccacggcgaccggtcgtttgtcctcctctgatccaaaccttcagaatattccagtacgtaccccattgggccagaagatccgccgtgcgtttgtagctgaggagggttggcgtttagtggccctcgattatagccaaattgaattacgtgtccttgcccatctttctggcgatgagaacctcatccgcgtgtttcaggaaggcaaagacattcacactcaaacggcaagctggatgtttggattatcagctgaagcgatcgatcctttgatgcgtcgtgcagcgaagaccatcaatttcggtgttctctacggtatgagtgcctttcgtttgtcgcaggaattaggcattccctatgaagaagctcaggcgttcattcagaaatactttcaaagctatcccaaagttaaagcatggatcgagaagactctcgaagaaggccgcacacgtggttacgtagagaccttatttggacgtcgccgctatgttcccgatttaaacgctcgcgtgaaaggcaagcgtgaagccgccgaacgcatggcgttcaacatgcctgtacagggcacggcagctgacctcatgaaacttgcaatggtgcgcctttttccacaattgcgtgaagttggtgcccgcatgctcttgcaggtccacgatgaactcttgttagaagcgccaaaagagcgtgcggaagaggtggcagccctcgcgaaagaagttatggaaagggtgtggcccttagcggtgcctcttgaagtcgaagttggtattggcgaggattggctggctgccaaagga

SEQ ID NO: 3576 - protein, 841 aa, synthetic construct
  REGION 1..841: note = Variant of DNA polymerase I from Thermus sp. strain 2.9
MHHHHHHGGSGVLPVFEPKGRVLLVDGHHLAYRNFFALKGLTTSSGEPVQGVYGFAKSLLKALKEDGDVVIVVFDAKAPSFRHEAYEAYKAGRAPTPEDFPRQLALMKELVDLLGLERLEVPGFEADDVLATLAKKAEREGYEVQILTADRDLFQLLSPRISVLHPEGHRITPEWLWEKYGLRPEQWVDFRALAGDPSDNIPGVKGIGEKTALKLLKEWGSLENLLKNLDQVKPESVREKILAHLEDLKLSRELSRVRTDLPLEVDFQRRREPDWEGLKAFLERLEFGSLLHEFGLLESPLPAEEAPWPPPEGAFLGYRLSRPEPMWAELLALAASAQGRVYRAEDPHGALRGLFEVRGLLAKDLAVVALREGLDLPPTDDPMLLAYLLDPSNTTPEGVARRYGGEWTEDAAKRALLAERLHANLLGRLQGEERLLWLYEEVEKPLSRVLAHMEATGVKLDVAYLENLSLEVAAHMRRLEEEVFRLAGRSFRLNSRDQLERVLFDELGLPPIGKTEKTGKRSTSAAVLEALREVHPIVDKILQYRELAKLKGTYIDRLPALVHPKTGRLHTRFNQTATATGRLSSSDPNLQNIPVRTPLGQKIRRAFVAEEGWRLVALDYSQIELRVLAHLSGDENLIRVFQEGKDIHTQTASWMFGLSAEAIDPLMRRAAKTINFGVLYGMSAFRLSQELGIPYEEAQAFIQKYFQSYPKVKAWIEKTLEEGRTRGYVETLFGRRRYVPDLNARVKGKREAAERMAFNMPVQGTAADLMKLAMVRLFPQLREVGARMLLQVHDELLLEAPKERAEEVAALAKEVMERVWPLAVPLEVEVGIGEDWLAAKG

SEQ ID NO: 3577 - DNA, 2523 bp, synthetic construct
  misc_feature 1..2523: note = Variant of DNA polymerase I from Thermus sp. strain 2.9
  source 1..2523: mol_type = other DNA
atgcaccatcatcatcatcatggcggtagcggcgtgttaccggtgttcgagcctaaaggtcgcgtgcttctggttgatggccatcatctcgcgtatcgtaacttctttgccctgaaaggattaaccaccagcagcggcgagccggtacagggtgtctacggctttgcaaagtcgctcctgaaagctctgaaagaagacggtgatgtggtgattgttgtctttgatgcgaaagcgccaagttttcgccacgaagcgtacgaagcttacaaagccgggcgtgctccaacgccggaagactttcctcgccaattggcgcttatgaaggaattagtggatttgcttggcctcgaacgcttggaagttcccggtttcgaggcagacgacgtattagcgactctcgcaaagaaagccgaacgtgagggctatgaagtccagatcttgacagcagatcgcgatcttttccagcttttatctccgcgcatctcggtgttacacccggaagggcatcgtatcaccccggaatggctctgggagaaatatggtttgcgtcccgaacaatgggtggattttcgcgccttagcaggcgatccgagcgacaatattccgggagttaaaggtatcggcgagaagacggcgctcaagctccttaaagaatgggggtcgttggagaacttgcttaagaatttagatcaggtcaaaccagagtcagtgcgtgagaagattcttgctcacctcgaagacctcaaattaagccgcgaattgtcccgtgtacgcaccgatttgccgctcgaagttgatttccaacgccgccgcgaacctgactgggagggtcttaaagcgtttttagagcgtcttgaatttggttcgctcttgcatgaattcggccttttagaaagcccgttaccagccgaagaagcaccttggccaccgcccgagggcgcgtttttaggttaccgtttgagtcgcccggaaccgatgtgggccgaattactggctcttgcagcgtctgcccagggacgtgtgtatcgcgcggaagaccctcatggtgcgctccgcggcctcttcgaagtccgtggactccttgccaaagacttagctgttgttgcattgcgcgaaggtcttgatttacctccgactgatgatccaatgcttcttgcgtacctcttggacccgtcaaacacgacgcccgaaggcgtagcccgtcgttacggcggcgagtggaccgaagatgcagcgaaacgcgcgttattggccgaacgtttgcacgccaatttattaggacgtttgcaaggcgaggaacgtctcctctggctttacgaagaagtggagaaaccattgagtcgcgtgctcgcgcatatggaagctaccggtgtcaaattagacgtggcgtatttggagaatctcagccttgaagttgctgcccacatgcgccgcttggaggaagaagtattccgtttagcaggccgttcctttcgccttaattctcgcgatcagttagaacgtgtgttgttcgatgaacttggtctccctcctatcggcaagacagagaagaccggtaaacgtagcacttcagcggcggttttagaagctcttcgcgaagtccatcccattgtggacaagatcttgcaataccgcgaactcgcgaaattgaaaggcacctatattgaccgtcttccggcattagtccacccgaaaacgggacgcctccatacccgcttcaaccaaacagccacggcgaccggtcgtttgtcctcctctgatccaaaccttcagaatattccagtacgtaccccattgggccagaagatccgccgtgcgtttgtagctgaggagggttggcgtttagtggccctcgattatagccaaattgaattacgtgtccttgcccatctttctggcgatgagaacctcatccgcgtgtttcaggaaggcaaagacattcacactcaaacggcaagctggatgtttggattatcagctgaagatatcgatcctttgatgcgtcgtgcagcgaagaccatcaatttcggtgttctctacggtatgagtgcctttcgtttgtcgcaggaattaggcattccctatgaagaagctcaggcgttcattcagaaatactttcaaagctatcccaaagttaaagcatggatcgagaagactctcgaagaaggccgcacacgtggttacgtagagaccttatttggacgtcgccgctatgttcccgatttaaacgctcgcgtgaaaggcaagcgtgaagccgccgaacgcatggcgttcaacatgcctgtacagggcacggcagctgacctcatgaaacttgcaatggtgcgcctttttccacaattgcgtgaagttggtgcccgcatgctcttgcaggtccacgatgaactcttgttagaagcgccaaaagagcgtgcggaagaggtggcagccctcgcgaaagaagttatggaaggcgtgtggcccttagcggtgcctcttgaagtcgaagttggtattggcgaggattggctggctgccaaagga

SEQ ID NO: 3578 - protein, 841 aa, synthetic construct
  REGION 1..841: note = Variant of DNA polymerase I from Thermus sp. strain 2.9
MHHHHHHGGSGVLPVFEPKGRVLLVDGHHLAYRNFFALKGLTTSSGEPVQGVYGFAKSLLKALKEDGDVVIVVFDAKAPSFRHEAYEAYKAGRAPTPEDFPRQLALMKELVDLLGLERLEVPGFEADDVLATLAKKAEREGYEVQILTADRDLFQLLSPRISVLHPEGHRITPEWLWEKYGLRPEQWVDFRALAGDPSDNIPGVKGIGEKTALKLLKEWGSLENLLKNLDQVKPESVREKILAHLEDLKLSRELSRVRTDLPLEVDFQRRREPDWEGLKAFLERLEFGSLLHEFGLLESPLPAEEAPWPPPEGAFLGYRLSRPEPMWAELLALAASAQGRVYRAEDPHGALRGLFEVRGLLAKDLAVVALREGLDLPPTDDPMLLAYLLDPSNTTPEGVARRYGGEWTEDAAKRALLAERLHANLLGRLQGEERLLWLYEEVEKPLSRVLAHMEATGVKLDVAYLENLSLEVAAHMRRLEEEVFRLAGRSFRLNSRDQLERVLFDELGLPPIGKTEKTGKRSTSAAVLEALREVHPIVDKILQYRELAKLKGTYIDRLPALVHPKTGRLHTRFNQTATATGRLSSSDPNLQNIPVRTPLGQKIRRAFVAEEGWRLVALDYSQIELRVLAHLSGDENLIRVFQEGKDIHTQTASWMFGLSAEDIDPLMRRAAKTINFGVLYGMSAFRLSQELGIPYEEAQAFIQKYFQSYPKVKAWIEKTLEEGRTRGYVETLFGRRRYVPDLNARVKGKREAAERMAFNMPVQGTAADLMKLAMVRLFPQLREVGARMLLQVHDELLLEAPKERAEEVAALAKEVMEGVWPLAVPLEVEVGIGEDWLAAKG

SEQ ID NO: 3579 - DNA, 2523 bp, synthetic construct; identical to SEQ ID NO: 3547
  misc_feature 1..2523: note = Variant of DNA polymerase I from Thermus sp. strain 2.9
  source 1..2523: mol_type = other DNA

SEQ ID NO: 3580 - protein, 841 aa, synthetic construct; identical to SEQ ID NO: 3548
  REGION 1..841: note = Variant of DNA polymerase I from Thermus sp. strain 2.9

SEQ ID NO: 3581 - DNA, 2523 bp, synthetic construct
  misc_feature 1..2523: note = Variant of DNA polymerase I from Thermus sp. strain 2.9
  source 1..2523: mol_type = other DNA
atgcaccatcatcatcatcatggcggtagcggcgtgttagaggtgttcgagcctaaaggtcgcgtgcttctggttgatggccatcatctcgcgtatcgtaacttctttgccctgaaaggattaaccaccagcagcggcgagccggtacagggtgtctacggctttgcaaagtcgctcctgaaagctctgaaagaagacggtgatgtggtgattgttgtctttgatgcgaaagcgccaagttttcgccacgaagcgtacgaagcttacaaagccgggcgtgctccaacgccggaagactttcctcgccaattggcgcttatgaaggaattagtggatttgcttggcctcgaacgcttggaagttcccggtttcgaggcagacgacgtattagcgactctcgcaaagaaagccgaagacgagggctatgaagtccagatcttgacagcagatcgcgatcttttccagcttttatctccgcgcatctcggtgttacacccggaagggcatcgtatcaccccggaatggctctgggagaaatatggtttgcgtcccgaacaatgggtggattttcgcgccttagcaggcgatcctagcgacaatattccgggagttaaaggtatcggcgagaagacggcgctcaagctccttaaagaatgggggtcgttggagaacttgcttaagaatttagatcaggtcaaaccagagtcagtgcgtgagaagattcttgctcacctcgaagacctcgagttaagccgcgaattgtcccgtgtacgcaccgatttgccgctcgaagttgatttccaacgccgccgcgaacctgactgggagggtcttaaagcgtttttagagcgtcttgaatttggttcgctcttgcatgaattcggccttttagaaagcccgttaccagccgaagaagcaccttggccaccgcccgagggcgcgtttttaggttaccgtttgagtcgcccggaaccgatgtgggccgaattactggctcttgcagcgtctgcccagggacgtgtgtatcgcgcggaagaccctcatggtgcgctccgcggcctcttcgaagtccgtggactccttgccaaagacttagctgttgttgcattgcgcgaaggtcttgatttacctccgactgatgatccaatgcttcttgcgtacctcttggacccgtcaaacacgacgcctgaaggcgtagcccgtcgttacggcggcgagtggaccgaagatgcagcgaaacgcgcgttattggccgaacgtttgcacgccaatttattaggacgtttgcaaggcgagaagcgtctcctctggctttacgaagaagtggagaaaccattgagtcgcgtgctcgcgcatatggaagctaccggtgtcaaattagacgtggcgtatttggagaatctcagccttgaagttgctgcccacatgcgccgcttggaggaagaagtattccgtttagcaggccgttcctttcgccttaattctcgcgatcagttagaacgtgtgttgttcgatgaacttggtctccctcctatcggcaagacagagaagaccggtaaacgtagcacttcagcggcggttttagaagctcttcgcgaagtccatcccattgtggacaagatcttgcaataccgcgaactcgcgaaattgaaaggcacctatattgaccgtcttccggcattagtccacccgaaaacgggacgcctccatacccgcttcaaccaaacagccacggcgaccggtcgtttgtcctcctctgatccaaaccttcagaatattccagtacgtaccccgttgggccagaagatccgccgtgcgtttgtagctgaggagggttggcgtttagtggccctcgattatagccaaattgaattacgtgtccttgcccatctttctggcgatgagaacctcatccgcgtgtttcaggaaggcaaagacattcacactcaaacggcaagctggatgtttggattatcagctgaagcgatcgatcctttgatgcgtcgtgcagcgaagaccatcaatttcggtgttctctacggtatgagtgcctttcgtttgtcgcaggaattaggcattccctacgaagaagctcaggcgttcattcagaaatactttcaaagctatcccaaagttaaagcatggatcgagaagactctcgaagaaggccgcacccgtggttacgtagagaccttatttggacgtcgccgctatgttcccgatttaaacgctcgcgtgaaaggcaagcgtgaagccgccgaacgcatggcgttcaacatgcctgtacagggcacggcagctgacctcatgaaacttgcaatggtgcgcctttttccacaattgcgtgaagttggtgcccgcatgctcttgcaggtccacgatgaactcttgttagaagcgccaaaagagcgtgcggaagaggtggcagccctcgcgaaagaagttatggaaggcgtgtggcccttagcggtgcctcttgaagtcgaagttggtattggcgaggattggctggctgccaaagga

SEQ ID NO: 3582 - protein, 841 aa, synthetic construct
  REGION 1..841: note = Variant of DNA polymerase I from Thermus sp. strain 2.9
MHHHHHHGGSGVLEVFEPKGRVLLVDGHHLAYRNFFALKGLTTSSGEPVQGVYGFAKSLLKALKEDGDVVIVVFDAKAPSFRHEAYEAYKAGRAPTPEDFPRQLALMKELVDLLGLERLEVPGFEADDVLATLAKKAEDEGYEVQILTADRDLFQLLSPRISVLHPEGHRITPEWLWEKYGLRPEQWVDFRALAGDPSDNIPGVKGIGEKTALKLLKEWGSLENLLKNLDQVKPESVREKILAHLEDLELSRELSRVRTDLPLEVDFQRRREPDWEGLKAFLERLEFGSLLHEFGLLESPLPAEEAPWPPPEGAFLGYRLSRPEPMWAELLALAASAQGRVYRAEDPHGALRGLFEVRGLLAKDLAVVALREGLDLPPTDDPMLLAYLLDPSNTTPEGVARRYGGEWTEDAAKRALLAERLHANLLGRLQGEKRLLWLYEEVEKPLSRVLAHMEATGVKLDVAYLENLSLEVAAHMRRLEEEVFRLAGRSFRLNSRDQLERVLFDELGLPPIGKTEKTGKRSTSAAVLEALREVHPIVDKILQYRELAKLKGTYIDRLPALVHPKTGRLHTRFNQTATATGRLSSSDPNLQNIPVRTPLGQKIRRAFVAEEGWRLVALDYSQIELRVLAHLSGDENLIRVFQEGKDIHTQTASWMFGLSAEAIDPLMRRAAKTINFGVLYGMSAFRLSQELGIPYEEAQAFIQKYFQSYPKVKAWIEKTLEEGRTRGYVETLFGRRRYVPDLNARVKGKREAAERMAFNMPVQGTAADLMKLAMVRLFPQLREVGARMLLQVHDELLLEAPKERAEEVAALAKEVMEGVWPLAVPLEVEVGIGEDWLAAKG

SEQ ID NO: 3583 - DNA, 2523 bp, synthetic construct; identical to SEQ ID NO: 3375
  misc_feature 1..2523: note = Variant of DNA polymerase I from Thermus sp. strain 2.9
  source 1..2523: mol_type = other DNA

SEQ ID NO: 3584 - protein, 841 aa, synthetic construct; identical to SEQ ID NO: 3376
  REGION 1..841: note = Variant of DNA polymerase I from Thermus sp. strain 2.9

SEQ ID NO: 3585 - DNA, 2523 bp, synthetic construct
  misc_feature 1..2523: note = Variant of DNA polymerase I from Thermus sp. strain 2.9
  source 1..2523: mol_type = other DNA
atgcaccatcatcatcatcatggcggtagcggcgtgttaccggtgttcgagcctaaaggtcgcgtgcttctggttgatggccatcatctcgcgtatcgtaacttctttgccctgaaaggattaaccaccagcagcggcgagccggtacagggtgtctacggctttgcaaagtcgctcctgaaagctctgaaagaagacggtgatgtggtgattgttgtctttgatgcgaaagcgccaagttttcgccacgaagcgtacgaagcttacaaagccgggcgtgctccaacgccggaagactttcctcgccaattggcgcttatgaaggaattagtggatttgcttggcctcgaacgcttggaagttcccggtttcgaggcagacgacgtattagcgactctcgcaaagaaagccgaacgtgagggctatgaagtccagatcttgacagcagatcgcgatcttttccagcttttatctccgcgcatctcggtgttacacccggaagggcatcgtatcaccccggaatggctctgggagaaatatggtttgcgtcccgaacaatgggtggattttcgcgccttagcaggcgatccgagcgacaatattccgggagttaaaggtatcggcgagaagacggcgctcaagctccttaaagaatgggggtcgttggagaacttgcttaagaatttagatcaggtcaaaccagagtcagtgcgtgagaagattcttgctcacctcgaagacctcaaattaagccgcgaattgtcccgtgtacgcaccgatttgccgctcgaagttgatttccaacgccgccgcgaacctgactgggagggtcttaaagcgtttttagagcgtcttgaatttggttcgctcttgcatgaattcggccttttagaagtgccgttaccagccgaagaagcaccttggccaccgcccgagggcgcgtttttaggttaccgtttgagtcgcccggaaccgatgtgggccgaattactggctcttgcagcgtctgcccagggacgtgtgtatcgcgcggaagaccctcatggtgcgctccgcggcctcttcgaagtccgtggactccttgccaaagacttagctgttgttgcattgcgcgaaggtcttgatttacctccgactgatgatccaatgcttcttgcgtacctcttggacccgtcaaacacgacgcccgaaggcgtagcccgtcgttacggcggcgagtggaccgaagatgcagcgaaacgcgcgttattggccgaacgtttgcacgccaatttattaggacgtttgcaaggcgaggaacgtctcctctggctttacgaagaagtggagaaaccattgagtcgcgtgctcgcgcatatggaagctaccggtgtcaaattagacgtggcgtatttggagaatctcagccttgaagttgctgcccacatgcgccgcttggaggaagaagtattccgtttagcaggccgttcctttcgccttaattctcgcgatcagttagaacgtgtgttgttcgatgaacttggtctccctcctatcggcaagacagagaagaccggtaaacgtagcacttcagcggcggttttagaagctcttcgcgaagtccatcccattgtggacaagatcttgcaataccgcgaactcgcgaaattgaaaggcacctatattgaccgtcttccggcattagtccacccgaaaacgggacgcctccatacccgcttcaaccaaacagccacggcgaccggtcgtttgtcctcctctgatccaaaccttcagaatattccagtacgtaccccattgggccagaagatccgccgtgcgtttgtagctgaggagggttggcgtttagtggccctcgattatagccaaattgaattacgtgtccttgcccatctttctggcgatgagaacctcatccgcgtgtttcaggaaggcaaagacattcacactcaaacggcaagctggatgtttggattatcagctgaagcgatcgatcctttgatgcgtcgtgcagcgaagaccatcaatttcggtgttctctacggtatgagtgcctttcgtttgtcgcaggaattaggcattccctatgaagaagctcaggcgttcattcagaaatactttcaaagctatcccaaagttaaagcatggatcgagaagactctcgaagaaggccgcacacgtggttacgtagagaccttatttggacgtcgccgctatgttcccgatttaaacgctcgcgtgaaaggcaagcgtgaagccgccgaacgcatggcgttcaacatgcctgtacagggcacggcagctgacctcatgaaacttgcaatggtgcgcctttttccacaattgcgtgaagttggtgcccgcatgctcttgcaggtccacgatgaactcttgttagaagcgccaaaagagcgtgcggaagaggtggcagccctcgcgaaagaagttatggaaggcgtgtggcccttagcggtgcctcttgaagtcgaagttggtattggcgaggattggctggctgccaaagga

SEQ ID NO: 3586 - protein, 841 aa, synthetic construct
  REGION 1..841: note = Variant of DNA polymerase I from Thermus sp. strain 2.9
MHHHHHHGGSGVLPVFEPKGRVLLVDGHHLAYRNFFALKGLTTSSGEPVQGVYGFAKSLLKALKEDGDVVIVVFDAKAPSFRHEAYEAYKAGRAPTPEDFPRQLALMKELVDLLGLERLEVPGFEADDVLATLAKKAEREGYEVQILTADRDLFQLLSPRISVLHPEGHRITPEWLWEKYGLRPEQWVDFRALAGDPSDNIPGVKGIGEKTALKLLKEWGSLENLLKNLDQVKPESVREKILAHLEDLKLSRELSRVRTDLPLEVDFQRRREPDWEGLKAFLERLEFGSLLHEFGLLEVPLPAEEAPWPPPEGAFLGYRLSRPEPMWAELLALAASAQGRVYRAEDPHGALRGLFEVRGLLAKDLAVVALREGLDLPPTDDPMLLAYLLDPSNTTPEGVARRYGGEWTEDAAKRALLAERLHANLLGRLQGEERLLWLYEEVEKPLSRVLAHMEATGVKLDVAYLENLSLEVAAHMRRLEEEVFRLAGRSFRLNSRDQLERVLFDELGLPPIGKTEKTGKRSTSAAVLEALREVHPIVDKILQYRELAKLKGTYIDRLPALVHPKTGRLHTRFNQTATATGRLSSSDPNLQNIPVRTPLGQKIRRAFVAEEGWRLVALDYSQIELRVLAHLSGDENLIRVFQEGKDIHTQTASWMFGLSAEAIDPLMRRAAKTINFGVLYGMSAFRLSQELGIPYEEAQAFIQKYFQSYPKVKAWIEKTLEEGRTRGYVETLFGRRRYVPDLNARVKGKREAAERMAFNMPVQGTAADLMKLAMVRLFPQLREVGARMLLQVHDELLLEAPKERAEEVAALAKEVMEGVWPLAVPLEVEVGIGEDWLAAKG

SEQ ID NO: 3587 - DNA, 2523 bp, synthetic construct
  misc_feature 1..2523: note = Variant of DNA polymerase I from Thermus sp. strain 2.9
  source 1..2523: mol_type = other DNA
atgcaccatcatcatcatcatggcggtagcggcgtgttaccggtgttcgagcctaaaggtcgcgtgcttctggttgatggccatcatctcgcgtatcgtaacttctttgccctgaaaggattaaccaccagcagcggcgagccggtacagggtgtctacggctttgcaaagtcgctcctgaaagctctgaaagaagacggtgatgtggtgattgttgtctttgatgcgaaagcgccaagttttcgccacgaagcgtacgaagcttacaaagccgggcgtgctccaacgccggaagactttcctcgccaattggcgcttatgaaggaattagtggatttgcttggcctcgaacgcttggaagttcccggtttcgaggcagacgacgtattagcgactctcgcaaagaaagccgaacgtgagggctatgaagtccagatcttgacagcagatcgcgatcttttccagcttttatctccgcgcatctcggtgttacacccggaagggcatcgtatcaccccggaatggctctgggagaaatatggtttgcgtcccgaacaatgggtggattttcgcgccttagcaggcgatccgagcgacaatattccgggagttaaaggtatcggcgagaagacggcgctcaagctccttaaagaatgggggtcgttggagaacttgcttaagaatttagatcaggtcaaaccagagtcagtgcgtgagaagattcttgctcacctcgaagacctcaaattaagccgcgaattgtcccgtgtacgcaccgatttgccgctcgaagttgatttccaacgccgccgcgaacctgactgggagggtcttaaagcgtttttagagcgtcttgaatttggttcgctcttgcatgaattcggccttttagaaagcccgttaccagccgaagaagcaccttggccaccgcccgagggcgcgtttttaggttaccgtttgagtcgcccggaaccgatgtgggccgaattactggctcttgcagcgtctgcccagggacgtgtgtatcgcgcggaagaccctcatggtgcgctccgcggcctcttcgaagtccgtggactccttgccaaagacttagctgttgttgcattgcgcgaaggtcttgatttacctccgactgatgatccaatgcttcttgcgtacctcttggacccgtcaaacacgacgcccgaaggcgtagcccgtcgttacggcggcgagtggaccgaagatgcagcgaaacgcgcgttattggccgaacgtttgcacgccaatttattaggacgtttgcaaggcgaggaacgtctcctctggctttacgaagaagtggagaaaccattgagtcgcgtgctcgcgcatatggaagctaccggtgtcaaattagacgtggcgtatttggagaatctcagccttgaagttgctgcccacatgcgccgcttggaggaagaagtattccgtttagcaggccgttcctttcgccttaattctcgcgatcagttagaacgtgtgttgttcgatgaacttggtctccctcctatcggcaagacagagaagaccggtaaacgtagcacttcagcggcggttttagaagctcttcgcagggtccatcccattgtggacaagatcttgcaataccgcgaactcgcgaaattgaaaggcacctatattgaccgtcttccggcattagtccacccgaaaacgggacgcctccatacccgcttcaaccaaacagccacggcgaccggtcgtttgtcctcctctgatccaaaccttcagaatattccagtacgtaccccattgggccagaagatccgccgtgcgtttgtagctgaggagggttggcgtttagtggccctcgattatagccaaattgaattacgtgtccttgcccatctttctggcgatgagaacctcatccgcgtgtttcaggaaggcaaagacattcacactcaaacggcaagctggatgtttggattatcagctgaagcgatcgatcctttgatgcgtcgtgcagcgaagaccatcaatttcggtgttctctacggtatgagtgcctttcgtttgtcgcaggaattaggcattccctatgaagaagctcaggcgttcattcagaaatactttcaaagctatcccaaagttaaagcatggatcgagaagactctcgaagaaggccgcacacgtggttacgtagagaccttatttggacgtcgccgctatgttcccgatttaaacgctcgcgtgaaaggcaagcgtgaagccgccgaacgcatggcgttcaacatgcctgtacagggcacggcagctgacctcatgaaacttgcaatggtgcgcctttttccacaattgcgtgaagttggtgcccgcatgctcttgcaggtccacgatgaactcttgttagaagcgccaaaagagcgtgcggaagaggtggcagccctcgcgaaagaagttatggaaggcgtgtggcccttagcggtgcctcttgaagtcgaagttggtattggcgaggattggctggctgccaaagga

SEQ ID NO: 3588 - protein, 841 aa, synthetic construct
  REGION 1..841: note = Variant of DNA polymerase I from Thermus sp. strain 2.9
MHHHHHHGGSGVLPVFEPKGRVLLVDGHHLAYRNFFALKGLTTSSGEPVQGVYGFAKSLLKALKEDGDVVIVVFDAKAPSFRHEAYEAYKAGRAPTPEDFPRQLALMKELVDLLGLERLEVPGFEADDVLATLAKKAEREGYEVQILTADRDLFQLLSPRISVLHPEGHRITPEWLWEKYGLRPEQWVDFRALAGDPSDNIPGVKGIGEKTALKLLKEWGSLENLLKNLDQVKPESVREKILAHLEDLKLSRELSRVRTDLPLEVDFQRRREPDWEGLKAFLERLEFGSLLHEFGLLESPLPAEEAPWPPPEGAFLGYRLSRPEPMWAELLALAASAQGRVYRAEDPHGALRGLFEVRGLLAKDLAVVALREGLDLPPTDDPMLLAYLLDPSNTTPEGVARRYGGEWTEDAAKRALLAERLHANLLGRLQGEERLLWLYEEVEKPLSRVLAHMEATGVKLDVAYLENLSLEVAAHMRRLEEEVFRLAGRSFRLNSRDQLERVLFDELGLPPIGKTEKTGKRSTSAAVLEALRRVHPIVDKILQYRELAKLKGTYIDRLPALVHPKTGRLHTRFNQTATATGRLSSSDPNLQNIPVRTPLGQKIRRAFVAEEGWRLVALDYSQIELRVLAHLSGDENLIRVFQEGKDIHTQTASWMFGLSAEAIDPLMRRAAKTINFGVLYGMSAFRLSQELGIPYEEAQAFIQKYFQSYPKVKAWIEKTLEEGRTRGYVETLFGRRRYVPDLNARVKGKREAAERMAFNMPVQGTAADLMKLAMVRLFPQLREVGARMLLQVHDELLLEAPKERAEEVAALAKEVMEGVWPLAVPLEVEVGIGEDWLAAKG

SEQ ID NO: 3589 - DNA, 2523 bp, synthetic construct
  misc_feature 1..2523: note = Variant of DNA polymerase I from Thermus sp. strain 2.9
  source 1..2523: mol_type = other DNA
atgcaccatcatcatcatcatggcggtagcggcgtgttaccggtgttcgagcctaaaggtcgcgtgcttctggttgatggccatcatctcgcgtatcgtaacttctttgccctgaaaggattaaccaccagcagcggcgagccggtacagggtgtctacggctttgcaaagtcgctcctgaaagctctgaaagaagacggtgatgtggtgattgttgtctttgatgcgaaagcgccaagttttcgccacgaagcgtacgaagcttacaaagccgggcgtgctccaacgccggaagactttcctcgccaattggcgcttatgaaggaattagtggatttgcttggcctcgaacgcttggaagttcccggtttcgaggcagacgacgtattagcgactctcgcaaagaaagccgaacgtgagggctatgaagtccagatcttgacagcagatcgcgatcttttccagcttttatctccgcgcatctcggtgttacacccggaagggcatcgtatcaccccggaatggctctgggagaaatatggtttgcgtcccgaacaatgggtggattttcgcgccttagcaggcgatccgagcgacaatattccgggagttaaaggtatcggcgagaagacggcgctcaagctccttaaagaatgggggtcgttggagaacttgcttaagaatttagatcaggtcaaaccagagtcagtgcgtgagaagattcttgctcacctcgaagacctcaaattaagccgcgaattgtcccgtgtacgcaccgatttgccgctcgaagttgatttccaacgccgccgcgaacctgactgggagggtcttaaagcgtttttagagcgtcttgaatttggttcgctcttgcatgaattcggccttttagaaagcccgttaccagccgaagaagcaccttggccaccgcccgagggcgcgtttttaggttaccgtttgagtcgcccggaaccgatgtgggccgaattactggctcttgcagcgtctgcccagggacgtgtgtatcgcgcggaagaccctcatggtgcgctccgcggcctcttcgaagtccgtggactccttgccaaagacttagctgttgttgcattgcgcgaaggtcttgatttacctccgactgatgatccaatgcttcttgcgtacctcttggacccgtcaaacacgacgcccgaaggcgtagcccgtcgttacggcggcgagtggaccgaagatgcagcgaaacgcgcgttattggccgaacgtttgcacgaaaatttattaggacgtttgcaaggcgaggaacgtctcctctggctttacgaagaagtggagaaaccattgagtcgcgtgctcgcgcatatggaagctaccggtgtcaaattagacgtggcgtatttggagaatctcagccttgaagttgctgcccacatgcgccgcttggaggaagaagtattccgtttagcaggccgttcctttcgccttaactctcgcgatcagttagaacgtgtgttgttcgatgaacttggtctccctcctatcggcaagacagagaagaccggtaaacgtagcacttcagcggcggttttagaagctcttcgcgaagtccatcccattgtggacaagatcttgcaataccgcgaactcgcgaaattgaaaggcacctatattgaccgtcttccggcattagtccacccgaaaacgggacgcctccatacccgcttcaaccaaacagccacggcgaccggtcgtttgtcctcctctgatccaaaccttcagaatattccagtacgtaccccattgggccagaagatccgccgtgcgtttgtagctgaggagggttggcgtttagtggccctcgattatagccaaattgaattacgtgtccttgcccatctttctggcgatgagaacctcatccgcgtgtttcaggaaggcaaagacattcacactcaaacggcaagctggatgtttggattatcagctgaagcgatcgatcctttgatgcgtcgtgcagcgaagaccatcaatttcggtgttctctacggtatgagtgcctttcgtttgtcgcaggaattaggcattccctatgaagaagctcaggcgttcattcagaaatactttcaaagctatcccaaagttaaagcatggatcgagaagactctcgaggaaggccgcacacgtggttacgtagagaccttatttggacgtcgccgctatgttcccgatttaaacgctcgcgtgaaaggcaagcgtgaagccgccgaacgcatggcgttcaacatgcctgtacagggcacggcagctgacctcatgaaacttgcaatggtgcgcctttttccacaattgcgtgaagttggtgcccgcatgctcttgcaggtccacgatgaactcttgttagaagcgccaaaagagcgtgcggaagaggtggcagccctcgcgaaagaagttatggaaggcgtgtggcccttagcggtgcctcttgaagtcgaagttggtattggcgaggattggctggctgccaaagga

SEQ ID NO: 3590 - protein, 841 aa, synthetic construct
  REGION 1..841: note = Variant of DNA polymerase I from Thermus sp. strain 2.9
MHHHHHHGGSGVLPVFEPKGRVLLVDGHHLAYRNFFALKGLTTSSGEPVQGVYGFAKSLLKALKEDGDVVIVVFDAKAPSFRHEAYEAYKAGRAPTPEDFPRQLALMKELVDLLGLERLEVPGFEADDVLATLAKKAEREGYEVQILTADRDLFQLLSPRISVLHPEGHRITPEWLWEKYGLRPEQWVDFRALAGDPSDNIPGVKGIGEKTALKLLKEWGSLENLLKNLDQVKPESVREKILAHLEDLKLSRELSRVRTDLPLEVDFQRRREPDWEGLKAFLERLEFGSLLHEFGLLESPLPAEEAPWPPPEGAFLGYRLSRPEPMWAELLALAASAQGRVYRAEDPHGALRGLFEVRGLLAKDLAVVALREGLDLPPTDDPMLLAYLLDPSNTTPEGVARRYGGEWTEDAAKRALLAERLHENLLGRLQGEERLLWLYEEVEKPLSRVLAHMEATGVKLDVAYLENLSLEVAAHMRRLEEEVFRLAGRSFRLNSRDQLERVLFDELGLPPIGKTEKTGKRSTSAAVLEALREVHPIVDKILQYRELAKLKGTYIDRLPALVHPKTGRLHTRFNQTATATGRLSSSDPNLQNIPVRTPLGQKIRRAFVAEEGWRLVALDYSQIELRVLAHLSGDENLIRVFQEGKDIHTQTASWMFGLSAEAIDPLMRRAAKTINFGVLYGMSAFRLSQELGIPYEEAQAFIQKYFQSYPKVKAWIEKTLEEGRTRGYVETLFGRRRYVPDLNARVKGKREAAERMAFNMPVQGTAADLMKLAMVRLFPQLREVGARMLLQVHDELLLEAPKERAEEVAALAKEVMEGVWPLAVPLEVEVGIGEDWLAAKG

SEQ ID NO: 3591 - DNA, 2523 bp, synthetic construct
  misc_feature 1..2523: note = Variant of DNA polymerase I from Thermus sp. strain 2.9
  source 1..2523: mol_type = other DNA
atgcaccatcatcatcatcatggcggtagcggcgtgttaccggtgttcgagcctaaaggtcgcgtgcttctggttgatggccatcatctcgcgtatcgtaacttctttgccctgaaaggattaaccaccagcagcggcgagccggtacagggtgtctacggctttgcaaagtcgctcctgaaagctctgaaagaagacggtgatgtggtgattgttgtctttgatgcgaaagcgccaagttttcgccacgaagcgtacgaagcttacaaagccgggcgtgctccaacgccggaagactttcctcgccaattggcgcttatgaaggaattagtggatttgcttggcctcgaacgcttggaagttcccggtttcgaggcagacgacgtattagcgactctcgcaaagaaagccgaacgtgagggctatgaagtccagatcttgacagcagatcgcgatcttttccagcttttatctccgcgcatctcggtgttacacccggaagggcatcgtatcaccccggaatggctctgggagaaatatggtttgcgtcccgaacaatgggtggattttcgcgccttagcaggcgatccgagcgacaatattccgggagttaaaggtatcggcgagaagacggcgctcaagctccttaaagaatgggggtcgttggagaacttgcttaagaatttagatcaggtcaaaccagagtcagtgcgtgagaagattcttgctcacctcgaagacctcaaattaagccgcgaattgtcccgtgtacgcaccgatttgccgctcgaagttgatttccaacgccgccgcgaacctgactgggagggtcttaaagcgtttttagagcgtcttgaatttggttcgctcttgcatgaattcggccttttagaaagcccgttaccagccgaagaagcaccttggccaccgcccgagggcgcgtttttaggttaccgtttgagtcgcccggaaccgatgtgggccgaattactggctcttgcagcgtctgcccagggacgtgtgtatcgcgcggaagaccctcatggtgcgctccgcggcctcttcgaagtccgtggactccttgccaaagacttagctgttgttgcattgcgcgaaggtcttgatttacctccgactgatgatccaatgcttcttgcgtacctcttggacccgtcaaacacgacgcccgaaggcgtagcccgtcgttacggcggcgagtggaccgaagatgcagcgaaacgcgcgttattggccgaacgtttgcacgccaatttattaagtcgtttgcaaggcgaggaacgtctcctctggctttacgaagaagtggagaaaccattgagtcgcgtgctcgcgcatatggaagctaccggtgtcaaattagacgtggcgtatttggagaatctcagccttgaagttgctgcccacatgcgccgcttggaggaagaagtattccgtttagcaggccgttcctttcgccttaattctcgcgatcagttagaacgtgtgttgttcgatgaacttggtctccctcctatcggcaagacagagaagaccggtaaacgtagcacttcagcggcggttttagaagctcttcgcgaagtccatcccattgtggacaagatcttgcaataccgcgaactcgcgaaattgaaaggcacctatattgaccgtcttccggcattagtccacccgaaaacgggacgcctccatacccgcttcaaccaaacagccacggcgaccggtcgtttgtcctcctctgatccaaaccttcagaatattccagtacgtaccccattgggccagaagatccgccgtgcgtttgtagctgaggagggttggcgtttagtggccctcgattatagccaaattgaattacgtgtccttgcccatctttctggcgatgagaacctcatccgcgtgtttcaggaaggcaaagacattcacactcaaacggcaagctggatgtttggattatcagctgaagcgatcgatcctttgatgcgtcgtgcagcgaagaccatcaatttcggtgttctctacggtatgagtgcctttcgtttgtcgcaggaattaggcattccctatgaagaagctcaggcgttcattcagaaatactttcaaagctatcccaaagttaaagcatggatcgagaagactctcgaagaaggccgcacacgtggttacgtagagaccttatttggacgtcgccgctatgttcccgatttaaacgctcgcgtgaaaggcaagcgtgaagccgccgaacgcatggcgttcaacatgcctgtacagggcacggcagctgacctcatgaaacttgcaatggtgcgcctttttccacaattgcgtgaagttggtgcccgcatgctcttgcaggtccacgatgaactcttgttagaagcgccaaaagagcgtgcggaagaggtggcagccctcgcgaaagaagttatggaaggcgtgtggcccttagcggtgcctcttgaagtcgaagttggtattggcgaggattggctggctgccaaagga

SEQ ID NO: 3592 - protein, 841 aa, synthetic construct
  REGION 1..841: note = Variant of DNA polymerase I from Thermus sp. strain 2.9
MHHHHHHGGSGVLPVFEPKGRVLLVDGHHLAYRNFFALKGLTTSSGEPVQGVYGFAKSLLKALKEDGDVVIVVFDAKAPSFRHEAYEAYKAGRAPTPEDFPRQLALMKELVDLLGLERLEVPGFEADDVLATLAKKAEREGYEVQILTADRDLFQLLSPRISVLHPEGHRITPEWLWEKYGLRPEQWVDFRALAGDPSDNIPGVKGIGEKTALKLLKEWGSLENLLKNLDQVKPESVREKILAHLEDLKLSRELSRVRTDLPLEVDFQRRREPDWEGLKAFLERLEFGSLLHEFGLLESPLPAEEAPWPPPEGAFLGYRLSRPEPMWAELLALAASAQGRVYRAEDPHGALRGLFEVRGLLAKDLAVVALREGLDLPPTDDPMLLAYLLDPSNTTPEGVARRYGGEWTEDAAKRALLAERLHANLLSRLQGEERLLWLYEEVEKPLSRVLAHMEATGVKLDVAYLENLSLEVAAHMRRLEEEVFRLAGRSFRLNSRDQLERVLFDELGLPPIGKTEKTGKRSTSAAVLEALREVHPIVDKILQYRELAKLKGTYIDRLPALVHPKTGRLHTRFNQTATATGRLSSSDPNLQNIPVRTPLGQKIRRAFVAEEGWRLVALDYSQIELRVLAHLSGDENLIRVFQEGKDIHTQTASWMFGLSAEAIDPLMRRAAKTINFGVLYGMSAFRLSQELGIPYEEAQAFIQKYFQSYPKVKAWIEKTLEEGRTRGYVETLFGRRRYVPDLNARVKGKREAAERMAFNMPVQGTAADLMKLAMVRLFPQLREVGARMLLQVHDELLLEAPKERAEEVAALAKEVMEGVWPLAVPLEVEVGIGEDWLAAKG

SEQ ID NO: 3593 - DNA, 2523 bp, synthetic construct
  misc_feature 1..2523: note = Variant of DNA polymerase I from Thermus sp. strain 2.9
  source 1..2523: mol_type = other DNA
atgcaccatcatcatcatcatggcggtagcggcgtgttaccggtgttcgagcctaaaggtcgcgtgcttctggttgatggccatcatctcgcgtatcgtaacttctttgccctgaaaggattaaccaccagcagcggcgagccggtacagggtgtctacggctttgcaaagtcgctcctgaaagctctgaaagaagacggtgatgtggtgattgttgtctttgatgcgaaagcgccaagttttcgccacgaagcgtacgaagcttacaaagccgggcgtgctccaacgccggaagactttcctcgccaattggcgcttatgaaggaattagtggatttgcttggcctcgaacgcttggaagttcccggtttcgaggcagacgacgtattagcgactctcgcaaagaaagccgaacgtgagggctatgaagtccagatcttgacagcagatcgcgatcttttccagcttttatctccgcgcatctcggtgttacacccggaagggcatcgtatcaccccggaatggctctgggagaaatatggtttgcgtcccgaacaatgggtggattttcgcgccttagcaggcgatccgagcgacaatattccgggagttaaaggtatcggcgagaagacggcgctcaagctccttaaagaatgggggtcgttggagaacttgcttaagaatttagatcaggtcaaaccagagtcagtgcgtgagaagattcttgctcacctcgaagacctcaaattaagccgcgaattgtcccgtgtacgcaccgatttgccgctcgaagttgatttccaacgccgccgcgaacctgactgggagggtcttaaagcgtttttagagcgtcttgaatttggttcgctcttgcatgaattcggccttttagaaagcccgttaccagccgaagaagcaccttggccaccgcccgagggcgcgtttttaggttaccgtttgagtcgcccggaaccgatgtgggccgaattactggctcttgcagcgtctgcccagggacgtgtgtatcgcgcggaagaccctcatggtgcgctccgcggcctcttcgaagtccgtggactccttgccaaagacttagctgttgttgcattgcgcgaaggtcttgatttacctccgactgatgatccaatgcttcttgcgtacctcttggacccgtcaaacacgacgcccgaaggcgtagcccgtcgttacggcggcgagtggaccgaagatgcagcgaaacgcgcgttattggccgaacgtttgcacgccaatttattaggacgtttgcaaggcgaggaacgtctcctctggctttacgaagaagtggaggttccattgagtcgcgtgctcgcgcatatggaagctaccggtgtcaaattagacgtggcgtatttggagaatctcagccttgaagttgctgcccacatgcgccgcttggaggaagaagtattccgtttagcaggccgttcctttcgccttaattctcgcgatcagttagaacgtgtgttgttcgatgaacttggtctccctcctatcggcaagacagagaagaccggtaaacgtagcacttcagcggcggttttagaagctcttcgcgaagtccatcccattgtggacaagatcttgcaataccgcgaactcgcgaaattgaaaggcacctatattgaccgtcttccggcattagtccacccgaaaacgggacgcctccatacccgcttcaaccaaacagccacggcgaccggtcgtttgtcctcctctgatccaaaccttcagaatattccagtacgtaccccattgggccagaagatccgccgtgcgtttgtagctgaggagggttggcgtttagtggccctcgattatagccaaattgaattacgtgtccttgcccatctttctggcgatgagaacctcatccgcgtgtttcaggaaggcaaagacattcacactcaaacggcaagctggatgtttggattatcagctgaagcgatcgatcctttgatgcgtcgtgcagcgaagaccatcaatttcggtgttctctacggtatgagtgcctttcgtttgtcgcaggaattaggcattccctatgaagaagctcaggcgttcattcagaaatactttcaaagctatcccaaagttaaagcatggatcgagaagactctcgaagaaggccgcacacgtggttacgtagagaccttatttggacgtcgccgctatgttcccgatttaaacgctcgcgtgaaaggcaagcgtgaagccgccgaacgcatggcgttcaacatgcctgtacagggcacggcagctgacctcatgaaacttgcaatggtgcgcctttttccacaattgcgtgaagttggtgcccgcatgctcttgcaggtccacgatgaactcttgttagaagcgccaaaagagcgtgcggaagaggtggcagccctcgcgaaagaagttatggaaggcgtgtggcccttagcggtgcctcttgaagtcgaagttggtattggcgaggattggctggctgccaaagga

SEQ ID NO: 3594 - protein, 841 aa, synthetic construct
  REGION 1..841: note = Variant of DNA polymerase I from Thermus sp. strain 2.9
MHHHHHHGGSGVLPVFEPKGRVLLVDGHHLAYRNFFALKGLTTSSGEPVQGVYGFAKSLLKALKEDGDVVIVVFDAKAPSFRHEAYEAYKAGRAPTPEDFPRQLALMKELVDLLGLERLEVPGFEADDVLATLAKKAEREGYEVQILTADRDLFQLLSPRISVLHPEGHRITPEWLWEKYGLRPEQWVDFRALAGDPSDNIPGVKGIGEKTALKLLKEWGSLENLLKNLDQVKPESVREKILAHLEDLKLSRELSRVRTDLPLEVDFQRRREPDWEGLKAFLERLEFGSLLHEFGLLESPLPAEEAPWPPPEGAFLGYRLSRPEPMWAELLALAASAQGRVYRAEDPHGALRGLFEVRGLLAKDLAVVALREGLDLPPTDDPMLLAYLLDPSNTTPEGVARRYGGEWTEDAAKRALLAERLHANLLGRLQGEERLLWLYEEVEVPLSRVLAHMEATGVKLDVAYLENLSLEVAAHMRRLEEEVFRLAGRSFRLNSRDQLERVLFDELGLPPIGKTEKTGKRSTSAAVLEALREVHPIVDKILQYRELAKLKGTYIDRLPALVHPKTGRLHTRFNQTATATGRLSSSDPNLQNIPVRTPLGQKIRRAFVAEEGWRLVALDYSQIELRVLAHLSGDENLIRVFQEGKDIHTQTASWMFGLSAEAIDPLMRRAAKTINFGVLYGMSAFRLSQELGIPYEEAQAFIQKYFQSYPKVKAWIEKTLEEGRTRGYVETLFGRRRYVPDLNARVKGKREAAERMAFNMPVQGTAADLMKLAMVRLFPQLREVGARMLLQVHDELLLEAPKERAEEVAALAKEVMEGVWPLAVPLEVEVGIGEDWLAAKG

SEQ ID NO: 3595 - DNA, 2523 bp, synthetic construct
  misc_feature 1..2523: note = Variant of DNA polymerase I from Thermus sp. strain 2.9
  source 1..2523: mol_type = other DNA
atgcaccatcatcatcatcatggcggtagcggcgtgttacctgtgttcgagcctaaaggtcgcgtgcttctggttgatggccatcatctcgcgtatcgtaacttctttgccctgaaaggattaaccaccagcagcggcgagccggtacagggtgtctacggctttgcaaagtcgctcctgaaagctctgaaagaagacggtgatgtggtgattgttgtctttgatgcgaaagcgccaagttttcgccacgaagcgtacgaagcttacaaagccgggcgtgctcctacgccggaagactttcctcgccaattggcgcttatgaaggaattagtggatttgcttggcctcgaacgcttggaagttcccggtttcgaggcagacgacgtattagcgactctcgcaaagaaagccgaacgcgagggctatgaagtccagatcttgacagcagatcgcgatcttttccagcttttatctccgcgcatctcggtgttacacccggaagggcatcgtatcaccccggaatggctctgggagaaatatggtttgcgtcccgaacaatgggtggattttcgcgccttagcaggcgatccgagcgacaatattccgggagttaaaggtatcggcgagaagacggcgctcaagctccttaaagaatgggggtcgttggagaacttgcttaagaatttagatcaggtcaaaccagagtcagtgcgtgagaagattcttgctcacctcgaagacctcgagttaagccgcgaattgtcccgtgtacgcaccgatttgccgctcgaagttgatttccaacgccgccgcgaacctgactgggagggtcttaaagcgtttttagagcgtcttgaatttggttcgctcttgcatgaattcggccttttagaaagcccgttaccagccgaagaagcaccttggccaccgcccgagggcgcgtttttaggttaccgtttgagtcgcccggaaccgatgtgggccgaattactggctcttgcagcgtctgcccagggacgtgtgtatcgcgcggaagaccctcatggtgcgctccgcggcctcttcgaagtccgtggactccttgccaaagacttagctgttgttgcattgcgcgaaggtcttgatttacctccgactgatgatccaatgcttcttgcgtacctcttggacccgtcaaacacgacgcctgaaggcgtagcccgtcgttacggcggcgagtggaccgaagatgcagcgaaacgcgcgttattggccgaacgtttgcacgccaatttattaggacgtttgcaaggcgaggagcgtctcctctggctttacgaagaagtggagaaaccattgagtcgcgtgctcgcgcatatggaagctaccggtgtcaaattagacgtggcgtatttggagaatctcagccttgaagttgctgcccacatgcgccgcttggaggaagaagtattccgtttagcaggccgttcctttcgccttaattctcgcgatcagttagaacgtgtgttgttcgatgaacttggtctccctcctatcggcaagacagagaagaccggtaaacgtagcacttcagcggcggttttagaagctcttcgcgaagtccatcccattgtggacaagatcttgcaataccgcgaactcgcgaaattgaaaggcacctatattgaccgtcttccggcattagtccacccgaaaacgggacgcctccatacccgcttcaaccaaacagccacggcgaccggtcgtttgtcctcctctgatccaaaccttcagaatattccagtacgtaccccgttgggccagaagatccgccgtgcgtttgtagctgaggagggttggcgtttagtggccctcgattatagccaaattgaattacgtgtccttgcccatctttctggcgatgagaacctcatccgcgtgtttcaggaaggcaaagacattcacactcaaacggcaagctggatgtttggattatcagctgaagcgatcgatcctttgatgcgtcgtgcagcgaagaccatcaatttcggtgttctctacggtatgagtgcctttcgtttgtcgcaggaattaggcattccctacgaagaagctcaggcgttcattcagaaatactttcaaagctatcccaaagttaaagcatggatcgagaagactctcgaagaaggccgccaccgtggttacgtagagaccttatttggacgtcgccgctatgttcccgatttaaacgctcgcgtgaaaggcaagcgtgaagccgccgaacgcatggcgttcaacatgcctgtacagggcacggcagctgacctcatgaaacttgcaatggtgcgcctttttccacaattgcgtgaagttggtgcccgcatgctcttgcaggtccacgatgaactcttgttagaagcgccaaaagagcgtgcggaagaggtggcagccctcgcgaaagaagttatggaaggcgtgtggcccttagcggtgcctcttgaagtcgaagttggtattggcgaggattggctggctgccaaagga

SEQ ID NO: 3596 - protein, 841 aa, synthetic construct
  REGION 1..841: note = Variant of DNA polymerase I from Thermus sp. strain 2.9
MHHHHHHGGSGVLPVFEPKGRVLLVDGHHLAYRNFFALKGLTTSSGEPVQGVYGFAKSLLKALKEDGDVVIVVFDAKAPSFRHEAYEAYKAGRAPTPEDFPRQLALMKELVDLLGLERLEVPGFEADDVLATLAKKAEREGYEVQILTADRDLFQLLSPRISVLHPEGHRITPEWLWEKYGLRPEQWVDFRALAGDPSDNIPGVKGIGEKTALKLLKEWGSLENLLKNLDQVKPESVREKILAHLEDLELSRELSRVRTDLPLEVDFQRRREPDWEGLKAFLERLEFGSLLHEFGLLESPLPAEEAPWPPPEGAFLGYRLSRPEPMWAELLALAASAQGRVYRAEDPHGALRGLFEVRGLLAKDLAVVALREGLDLPPTDDPMLLAYLLDPSNTTPEGVARRYGGEWTEDAAKRALLAERLHANLLGRLQGEERLLWLYEEVEKPLSRVLAHMEATGVKLDVAYLENLSLEVAAHMRRLEEEVFRLAGRSFRLNSRDQLERVLFDELGLPPIGKTEKTGKRSTSAAVLEALREVHPIVDKILQYRELAKLKGTYIDRLPALVHPKTGRLHTRFNQTATATGRLSSSDPNLQNIPVRTPLGQKIRRAFVAEEGWRLVALDYSQIELRVLAHLSGDENLIRVFQEGKDIHTQTASWMFGLSAEAIDPLMRRAAKTINFGVLYGMSAFRLSQELGIPYEEAQAFIQKYFQSYPKVKAWIEKTLEEGRHRGYVETLFGRRRYVPDLNARVKGKREAAERMAFNMPVQGTAADLMKLAMVRLFPQLREVGARMLLQVHDELLLEAPKERAEEVAALAKEVMEGVWPLAVPLEVEVGIGEDWLAAKG

SEQ ID NO: 3597 - DNA, 2523 bp, synthetic construct
  misc_feature 1..2523: note = Variant of DNA polymerase I from Thermus sp. strain 2.9
  source 1..2523: mol_type = other DNA
atgcaccatcatcatcatcatggcggtagcggcgtgttaccggtgttcgagcctaaaggtcgcgtgcttctggttgatggccatcatctcgcgtatcgtaacttctttgccctgaaaggattaaccaccagcagcggcgagccggtacagggtgtctacggctttgcaaagtcgctcctgaaagctctgaaagaagacggtgatgtggtgattgttgtctttgatgcgaaagcgccaagttttcgccacgaagcgtacgaagcttacaaagccgggcgtgctccaacgccggaagactttcctcgccaattggcgcttatgaaggaattagtggatttgcttggcctcgaacgcttggaagttcccggtttcgaggcagacgacgtattagcgactctcgcaaagaaagccgaacgtgagggctatgaagtccagatcttgacagcagatcgcgatcttttccagcttttatctccgcgcatctcggtgttacacccggaagggcatcgtatcaccccggaatggctctgggagaaatatggtttgcgtcccgaacaatgggtggattttcgcgccttagcaggcgatccgagcgacaatattccgggagttaaaggtatcggcgagaagacggcgctcaagctccttaaagaatgggggtcgttggagaacttgcttaagaatttagatcaggtcaaaccagagtcagtgcgtgagaagattcttgctcacctcgaagacctcaaattaagccgcgaattgtcccgtgtacgcaccgatttgccgctcgaagttgatttccaacgccgccgcgaacctgactgggagggtcttaaagcgtttttagagcgtcttgaatttggttcgctcttgcatgaattcggccttttagaaagcccgttaccagccgaagaagcaccttggccaccgcccgagtttgcgtttttaggttaccgtttgagtcgcccggaaccgatgtgggccgaattactggctcttgcagcgtctgcccagggacgtgtgtatcgcgcggaagaccctcatggtgcgctccgcggcctcttcgaagtccgtggactccttgccaaagacttagctgttgttgcattgcgcgaaggtcttgatttacctccgactgatgatccaatgcttcttgcgtacctcttggacccgtcaaacacgacgcccgaaggcgtagcccgtcgttacggcggcgagtggaccgaagatgcagcgaaacgcgcgttattggccgaacgtttgcacgccaatttattaggacgtttgcaaggcgaggaacgtctcctctggctttacgaagaagtggagaaaccattgagtcgcgtgctcgcgcatatggaagctaccggtgtcaaattagacgtggcgtatttggagaatctcagccttgaagttgctgcccacatgcgccgcttggaggaagaagtattccgtttagcaggccgttcctttcgccttaattctcgcgatcagttagaacgtgtgttgttcgatgaacttggtctccctcctatcggcaagacagagaagaccggtaaacgtagcacttcagcggcggttttagaagctcttcgcgaagtccatcccattgtggacaagatcttgcaataccgcgaactcgcgaaattgaaaggcacctatattgaccgtcttccggcattagtccacccgaaaacgggacgcctccatacccgcttcaaccaaacagccacggcgaccggtcgtttgtcctcctctgatccaaaccttcagaatattccagtacgtaccccattgggccagaagatccgccgtgcgtttgtagctgaggagggttggcgtttagtggccctcgattatagccaaattgaattacgtgtccttgcccatctttctggcgatgagaacctcatccgcgtgtttcaggaaggcaaagacattcacactcaaacggcaagctggatgtttggattatcagctgaagcgatcgatcctttgatgcgtcgtgcagcgaagaccatcaatttcggtgttctctacggtatgagtgcctttcgtttgtcgcaggaattaggcattccctatgaagaagctcaggcgttcattcagaaatactttcaaagctatcccaaagttaaagcatggatcgagaagactctcgaagaaggccgcacacgtggttacgtagagaccttatttggacgtcgccgctatgttcccgatttaaacgctcgcgtgaaaggcaagcgtgaagccgccgaacgcatggcgttcaacatgcctgtacagggcacggcagctgacctcatgaaacttgcaatggtgcgcctttttccacaattgcgtgaagttggtgcccgcatgctcttgcaggtccacgatgaactcttgttagaagcgccaaaagagcgtgcggaagaggtggcagccctcgcgaaagaagttatggaaggcgtgtggcccttagcggtgcctcttgaagtcgaagttggtattggcgaggattggctggctgccaaagga

SEQ ID NO: 3598 - protein, 841 aa, synthetic construct
  REGION 1..841: note = Variant of DNA polymerase I from Thermus sp. strain 2.9
MHHHHHHGGSGVLPVFEPKGRVLLVDGHHLAYRNFFALKGLTTSSGEPVQGVYGFAKSLLKALKEDGDVVIVVFDAKAPSFRHEAYEAYKAGRAPTPEDFPRQLALMKELVDLLGLERLEVPGFEADDVLATLAKKAEREGYEVQILTADRDLFQLLSPRISVLHPEGHRITPEWLWEKYGLRPEQWVDFRALAGDPSDNIPGVKGIGEKTALKLLKEWGSLENLLKNLDQVKPESVREKILAHLEDLKLSRELSRVRTDLPLEVDFQRRREPDWEGLKAFLERLEFGSLLHEFGLLESPLPAEEAPWPPPEFAFLGYRLSRPEPMWAELLALAASAQGRVYRAEDPHGALRGLFEVRGLLAKDLAVVALREGLDLPPTDDPMLLAYLLDPSNTTPEGVARRYGGEWTEDAAKRALLAERLHANLLGRLQGEERLLWLYEEVEKPLSRVLAHMEATGVKLDVAYLENLSLEVAAHMRRLEEEVFRLAGRSFRLNSRDQLERVLFDELGLPPIGKTEKTGKRSTSAAVLEALREVHPIVDKILQYRELAKLKGTYIDRLPALVHPKTGRLHTRFNQTATATGRLSSSDPNLQNIPVRTPLGQKIRRAFVAEEGWRLVALDYSQIELRVLAHLSGDENLIRVFQEGKDIHTQTASWMFGLSAEAIDPLMRRAAKTINFGVLYGMSAFRLSQELGIPYEEAQAFIQKYFQSYPKVKAWIEKTLEEGRTRGYVETLFGRRRYVPDLNARVKGKREAAERMAFNMPVQGTAADLMKLAMVRLFPQLREVGARMLLQVHDELLLEAPKERAEEVAALAKEVMEGVWPLAVPLEVEVGIGEDWLAAKG

SEQ ID NO: 3599 - DNA, 2523 bp, synthetic construct
  misc_feature 1..2523: note = Variant of DNA polymerase I from Thermus sp. strain 2.9
  source 1..2523: mol_type = other DNA
atgcaccatcatcatcatcatggcggtagcggcgtgttaccggtgttcgagcataaaggtcgcgtgcttctggttgatggccatcatctcgcgtatcgtaacttctttgccctgaaaggattaaccaccagcagcggcgagccggtacagggtgtctacggctttgcaaagtcgctcctgaaagctctgaaagaagacggtgatgtggtgattgttgtctttgatgcgaaagcgccaagttttcgccacgaagcgtacgaagcttacaaagccgggcgtgctccaacgccggaagactttcctcgccaattggcgcttatgaaggaattagtggatttgcttggcctcgaacgcttggaagttcccggtttcgaggcagacgacgtattagcgactctcgcaaagaaagccgaacgtgagggctatgaagtccagatcttgacagcagatcgcgatcttttccagcttttatctccgcgcatctcggtgttacacccggaagggcatcgtatcaccccggaatggctctgggagaaatatggtttgcgtcccgaacaatgggtggattttcgcgccttagcaggcgatccgagcgacaatattccgggagttaaaggtatcggcgagaagacggcgctcaagctccttaaagaatgggggtcgttggagaacttgcttaagaatttagatcaggtcaaaccagagtcagtgcgtgagaagattcttgctcacctcgaagacctcaaattaagccgcgaattgtcccgtgtacgcaccgatttgccgctcgaagttgatttccaacgccgccgcgaacctgactgggagggtcttaaagcgtttttagagcgtcttgaatttggttcgctcctgcatgaattcggccttttagaaagcccgttaccagccgaagaagcaccttggccaccgcccgagggcgcgtttttaggttaccgtttgagtcgcccggaaccgatgtgggccgaattactggctcttgcagcgtctgcccagggacgtgtgtatcgcgcggaagaccctcatggtgcgctccgcggcctcttcgaagtccgtggactccttgccaaagacttagctgttgttgcattgcgcgaaggtcttgatttacctccgactgatgatccaatgcttcttgcgtacctcttggacccgtcaaacacgacgcccgaaggcgtagcccgtcgttacggcggcgagtggaccgaagatgcagcgaaacgcgcgttattggccgaacgtttgcacgccaatttattaggacgtttgcaaggcgaggaacgtctcctctggctttacgaagaagtggagaaaccattgagtcgcgtgctcgcgcatatggaagctaccggtgtcaaattagacgtggcgtatttggagaatctcagccttgaagttgctgcccacatgcgccgcttggaggaagaagtattccgtttagcaggccgttcctttcgccttaattctcgcgatcagttagaacgtgtgttgttcgatgaacttggtctccctcctatcggcaagacagagaagaccggtaaacgtagcacttcagcggcggttttagaagctctgcgcgaagtccatcccattgtggacaagatcttgcaataccgcgaactggcgaaattgaaaggcacctatattgaccgtcttccggcattagtccacccgaaaacgggacgcctccatacccgcttcaaccaaacagccacggcgaccggtcgtttgtcctcctctgatccaaaccttcagaatattccagtacgtaccccattgggccagaagatccgccgtgcgtttgtagctgaggagggttggcgtttagtggccctcgattatagccaaattgaattacgtgtccttgcccatctttctggcgatgagaacctcatccgcgtgtttcaggaaggcaaagacattcacactcaaacggcaagctggatgtttggattatcagctgaagcgatcgatcctttgatgcgtcgtgcagcgaagacgatcaatttcggtgttctctacggtatgagtccgtttcgtttgtcgcaggaattaggcattccctatgaagaagctcaggcgttcattcagaaatactttcaaagctatcccaaagttaaagcatggatcgagaagactctcgaagaaggccgcacacgtggttacgtagagaccttatttggacgtcgccgctatgttcccgatttaaacgctcgcgtgaaaggcaagcgtgaagccgccgaacgcatggcgttcaacatgcctgtacagggcacggcagctgacctcatgaaacttgcaatggtgcgcctttttccacaattgcgtgaagttggtgcccgcatgctcttgcaggtccacgatgaactcttgttagaagcgccaaaagagcgtgcggaagaggtggcagccctcgcgaaagaagttatggaaggcgtgtggcccttagcggtgcctcttgaagtcgaagttggtattggcgaggattggctggctgccaaagga

SEQ ID NO: 3600 - protein, 841 aa, synthetic construct
  REGION 1..841: note = Variant of DNA polymerase I from Thermus sp. strain 2.9
MHHHHHHGGSGVLPVFEHKGRVLLVDGHHLAYRNFFALKGLTTSSGEPVQGVYGFAKSLLKALKEDGDVVIVVFDAKAPSFRHEAYEAYKAGRAPTPEDFPRQLALMKELVDLLGLERLEVPGFEADDVLATLAKKAEREGYEVQILTADRDLFQLLSPRISVLHPEGHRITPEWLWEKYGLRPEQWVDFRALAGDPSDNIPGVKGIGEKTALKLLKEWGSLENLLKNLDQVKPESVREKILAHLEDLKLSRELSRVRTDLPLEVDFQRRREPDWEGLKAFLERLEFGSLLHEFGLLESPLPAEEAPWPPPEGAFLGYRLSRPEPMWAELLALAASAQGRVYRAEDPHGALRGLFEVRGLLAKDLAVVALREGLDLPPTDDPMLLAYLLDPSNTTPEGVARRYGGEWTEDAAKRALLAERLHANLLGRLQGEERLLWLYEEVEKPLSRVLAHMEATGVKLDVAYLENLSLEVAAHMRRLEEEVFRLAGRSFRLNSRDQLERVLFDELGLPPIGKTEKTGKRSTSAAVLEALREVHPIVDKILQYRELAKLKGTYIDRLPALVHPKTGRLHTRFNQTATATGRLSSSDPNLQNIPVRTPLGQKIRRAFVAEEGWRLVALDYSQIELRVLAHLSGDENLIRVFQEGKDIHTQTASWMFGLSAEAIDPLMRRAAKTINFGVLYGMSPFRLSQELGIPYEEAQAFIQKYFQSYPKVKAWIEKTLEEGRTRGYVETLFGRRRYVPDLNARVKGKREAAERMAFNMPVQGTAADLMKLAMVRLFPQLREVGARMLLQVHDELLLEAPKERAEEVAALAKEVMEGVWPLAVPLEVEVGIGEDWLAAKG

SEQ ID NO: 3601 - DNA, 2523 bp, synthetic construct
  misc_feature 1..2523: note = Variant of DNA polymerase I from Thermus sp. strain 2.9
  source 1..2523: mol_type = other DNA
atgcaccatcatcatcatcatggcggtagcggcgtgttaccggtgttcgagcataaaggtcgcgtgcttctggttgatggccatcatctcgcgtatcgtaacttctttgccctgaaaggattaaccaccagcagcggcgagccggtacagggtgtctacggctttgcaaagtcgctcctgaaagctctgaaagaagacggtgatgtggtgattgttgtctttgatgcgaaagcgccaagttttcgccacgaagcgtacgaagcttacaaagccgggcgtgctccaacgccggaagactttcctcgccaattggcgcttatgaaggaattagtggatttgcttggcctcgaacgcttggaagttcccggtttcgaggcagacgacgtattagcgactctcgcaaagaaagccgaacgtgagggctatgaagtccagatcttgacagcagatcgcgatcttttccagcttttatctccgcgcatctcggtgttacacccggaagggcatcgtatcaccccggaatggctctgggagaaatatggtttgcgtcccgaacaatgggtggattttcgcgccttagcaggcgatccgagcgacaatattccgggagttaaaggtatcggcgagaagacggcgctcaagctccttaaagaatgggggtcgttggagaacttgcttaagaatttagatcaggtcaaaccagagtcagtgcgtgagaagattcttgctcacctcgaagacctcaaattaagccgcgaattgtcccgtgtacgcaccgatttgccgctcgaagttgatttccaacgccgccgcgaacctgactgggagggtcttaaagcgtttttagagcgtcttgaatttggttcgctcctgcatgaattcggccttttagaaagcccgttaccagccgaagaagcaccttggccaccgcccgagggcgcgtttttaggttaccgtttgagtcgcccggaaccgatgtgggccgaattactggctcttgcagcgtctgcccagggacgtgtgtatcgcgcggaagaccctcatggtgcgctccgcggcctcttcgaagtccgtggactccttgccaaagacttagctgttgttgcattgcgcgaaggtcttgatttacctccgactgatgatccaatgcttcttgcgtacctcttggacccgtcaaacacgacgcccgaaggcgtagcccgtcgttacggcggcgagtggaccgaagatgcagcgaaacgcgcgttattggccgaacgtttgcacgccaatttattaggacgtttgcaaggcgaggaacgtctcctctggctttacgaagaagtggagaaaccattgagtcgcgtgctcgcgcatatggaagctaccggtgtcaaattagacgtggcgtatttggagaatctcagccttgaagttgctgcccacatgcgccgcttggaggaagaagtattccgtttagcaggccgttcctttcgccttaattctcgcgatcagttagaacgtgtgctgttcgatgaacttggtctccctcctatcggcaagacagagaagaccggtaaacgtagcacttcagcggcggttttagaagctcttcgcgaagtccatcccattgtggacaagatcttgcaataccgcgaactcgcgaaattgaaaggcacctatattgaccgtcttccggcattagtccacccgaaaacgggacgcctccatacccgcttcaaccaaacagccacggcgaccggtcgtttgtcctcctctgatccaaaccttcagaatattccagtacgtaccccattgggccagaagatccgccgtgcgtttgtagctgaggagggttggcgtttagtggccctcgattatagccaaattgaattacgtgtccttgcccatctttctggcgatgagaacctcatccgcgtgtttcaggaaggcaaagacattcacactcaaacggcaagctggatgtttggattatcagctgaagcgatcgatcctttgatgcgtcgtgcagcgaagacgatcaatttcggtgttctctacggtatgagtccgtttcgtttgtcgcaggaattaggcattccctatgaagaagctcaggcgttcattcagaaatactttcaaagctatcccaaagttaaagcatggatcgagaagactctcgaagaaggccgcacacgtggttacgtagagaccttatttggacgtcgccgctatgttcccgatttaaacgctcgcgtgaaaggcaagcgtgaagccgccgaacgcatggcgttcaacatgcctgtacagggcacggcagctgacctcatgaaacttgcaatggtgcgcctttttccacaattgcgtgaagttggtgcccgcatgctcttgcaggtccacgatgaactcttgttagaagcgccaaaagagcgtgcggaagaggtggcagccctcgcgaaagaagttatggaaggcgtgtggcccttagcggtgcctcttgaagtcgaagttggtattggcgaggattggctggctgccaaagga

SEQ ID NO: 3602 - protein, 841 aa, synthetic construct; identical to SEQ ID NO: 3600
  REGION 1..841: note = Variant of DNA polymerase I from Thermus sp. strain 2.9

SEQ ID NO: 3603 - DNA, 2523 bp, synthetic construct
  misc_feature 1..2523: note = Variant of DNA polymerase I from Thermus sp. strain 2.9
  source 1..2523: mol_type = other DNA
atgcaccatcatcatcatcatggcggtagcggcgtgttaccggtgttcgagcctaaaggtcgcgtgcttctggttgatggccatcatctcgcgtatcgtaacttctttgccctgaaaggattaaccaccagcagcggcgagccggtacagggtgtctacggctttgcaaagtcgctcctgaaagctctgaaagaagacggtgatgtggtgattgttgtctttgatgcgaaagcgccaagttttcgccacgaagcgtacgaagcttacaaagccgggcgtgctccaacgccggaagactttcctcgccaattggcgcttatgaaggaattagtggatttgcttggcctcgaacgcttggaagttcccggtttcgaggcagacgacgtattagcgactctcgcaaagaaagccgaacgtgagggctatgaagtccagatcttgacagcagatcgcgatcttttccagcttttatctccgcgcatctcggtgttacacccggaagggcatcgtatcaccccggaatggctctgggagaaatatggtttgcgtcccgaacaatgggtggattttcgcgccttagcaggcgatccgagcgacaatattccgggagttaaaggtatcggcgagaagacggcgctcaagctccttaaagaatgggggtcgttggagaacttgcttaagaatttagatcaggtcaaaccagagtcagtgcgtgagaagattcttgctcacctcgaagacctcaaattaagccgcgaattgtcccgtgtacgcaccgatttgccgctcgaagttgatttccaacgccgccgcgaacctgactgggagggtcttaaagcgtttttagagcgtcttgaatttggttcgctcttgcatgaattcggccttttagaaagcccgttaccagccgaagaagcaccttggccaccgcccgagggcgcgtttttaggttaccgtttgagtcgcccggaaccgatgtgggccgaattactggctcttgcagcgtctgcccagggacgtgtgtatcgcgcggaagaccctcatggtgcgctccgcggcctcttcgaagtccgtggactccttgccaaagacttagctgttgttgcattgcgcgaaggtcttgatttacctccgactgatgatccaatgcttcttgcgtacctcttggacccgtcaaacacgacgcccgaaggcgtagcccgtcgttacggcggcgagtggaccgaagatgcagcgaaacgcgcgttattggccgaacgtttgcacgccaatttattaggacgtttgcaaggcgaggaacgtctcctctggctttacgaagaagtggagaaaccattgagtaaggtgctcgcgcatatggaagctaccggtgtcaaattagacgtggcgtatttggagaatctcagccttgaagttgctgcccacatgcgccgcttggaggaagaagtattccgtttagcaggccgttcctttcgccttaattctcgcgatcagttagaacgtgtgttgttcgatgaacttggtctccctcctatcggcaagacagagaagaccggtaaacgtagcacttcagcggcggttttagaagctcttcgcgaagtccatcccattgtggacaagatcttgcaataccgcgaactcgcgaaattgaaaggcacctatattgaccgtcttccggcattagtccacccgaaaacgggacgcctccatacccgcttcaaccaaacagccacggcgaccggtcgtttgtcctcctctgatccaaaccttcagaatattccagtacgtaccccattgggccagaagatccgccgtgcgtttgtagctgaggagggttggcgtttagtggccctcgattatagccaaattgaattacgtgtccttgcccatctttctggcgatgagaacctcatccgcgtgtttcaggaaggcaaagacattcacactcaaacggcaagctggatgtttggattatcagctgaagcgatcgatcctttgatgcgtcgtgcagcgaagaccatcaatttcggtgttctctacggtatgagtgcctttcgtttgtcgcaggaattaggcattccctatgaagaagctcaggcgttcattcagaaatactttcaaagctatcccaaagttaaagcatggatcgagaagactctcgaagaaggccgcacacgtggttacgtagagaccttatttggacgtcgccgctatgttcccgatttaaacgctcgcgtgaaaggcaagcgtgaagccgccgaacgcatggcgttcaacatgcctgtacagggcacggcagctgacctcatgaaacttgcaatggtgcgcctttttccacaattgcgtgaagttggtgcccgcatgctcttgcaggtccacgatgaactcttgttagaagcgccaaaagagcgtgcggaagaggtggcagccctcgcgaaagaagttatggaaggcgtgtggcccttagcggtgcctcttgaagtcgaagttggtattggcgaggattggctggctgccaaagga

SEQ ID NO: 3604 - protein, 841 aa, synthetic construct
  REGION 1..841: note = Variant of DNA polymerase I from Thermus sp. strain 2.9
MHHHHHHGGSGVLPVFEPKGRVLLVDGHHLAYRNFFALKGLTTSSGEPVQGVYGFAKSLLKALKEDGDVVIVVFDAKAPSFRHEAYEAYKAGRAPTPEDFPRQLALMKELVDLLGLERLEVPGFEADDVLATLAKKAEREGYEVQILTADRDLFQLLSPRISVLHPEGHRITPEWLWEKYGLRPEQWVDFRALAGDPSDNIPGVKGIGEKTALKLLKEWGSLENLLKNLDQVKPESVREKILAHLEDLKLSRELSRVRTDLPLEVDFQRRREPDWEGLKAFLERLEFGSLLHEFGLLESPLPAEEAPWPPPEGAFLGYRLSRPEPMWAELLALAASAQGRVYRAEDPHGALRGLFEVRGLLAKDLAVVALREGLDLPPTDDPMLLAYLLDPSNTTPEGVARRYGGEWTEDAAKRALLAERLHANLLGRLQGEERLLWLYEEVEKPLSKVLAHMEATGVKLDVAYLENLSLEVAAHMRRLEEEVFRLAGRSFRLNSRDQLERVLFDELGLPPIGKTEKTGKRSTSAAVLEALREVHPIVDKILQYRELAKLKGTYIDRLPALVHPKTGRLHTRFNQTATATGRLSSSDPNLQNIPVRTPLGQKIRRAFVAEEGWRLVALDYSQIELRVLAHLSGDENLIRVFQEGKDIHTQTASWMFGLSAEAIDPLMRRAAKTINFGVLYGMSAFRLSQELGIPYEEAQAFIQKYFQSYPKVKAWIEKTLEEGRTRGYVETLFGRRRYVPDLNARVKGKREAAERMAFNMPVQGTAADLMKLAMVRLFPQLREVGARMLLQVHDELLLEAPKERAEEVAALAKEVMEGVWPLAVPLEVEVGIGEDWLAAKG

SEQ ID NO: 3605 - DNA, 2523 bp, synthetic construct
  misc_feature 1..2523: note = Variant of DNA polymerase I from Thermus sp. strain 2.9
  source 1..2523: mol_type = other DNA
atgcaccatcatcatcatcatggcggtagcggcgtgttacctgtgttcgagcctaaaggtcgcgtgcttctggttgatggccatcatctcgcgtatcgtaacttctttgccctgaaaggattaaccaccagcagcggcgagccggtacatggtgtctacggctttgcaaagtcgctcctgaaagctctgaaagaagacggtgatgtggtgattgttgtctttgatgcgaaagcgccaagttttcgccacgaagcgtacgaagcttacaaagccgggcgtgctccaacgccggaagactttcctcgccaattggcgcttatgaaggaattagtggatttgcttggcctcgaacgcttggaagttcccggtttcgaggcagacgacgtattagcgactctcgcaaagaaagccgaacgtgagggctatgaagtccagatcttgacagcagatcgcgatcttttccagcttttatctccgcgcatctcggtgttacacccggaagggcatcgtatcaccccggaatggctctgggagaaatatggtttgcgtcccgaacaatgggtggattttcgcgccttagcaggcgatccgagcgacaatattccgggagttaaaggtatcggcgagaagacggcgctcaagctccttaaagaatgggggtcgttggagaacttgcttaagaatttagatcaggtcaaaccagagtcagtgcgtgagaagattcttgctcacctcgaagacctcaaattaagccgcgaattgtcccgtgtacgcaccgatttgccgctcgaagttgatttccaacgccgccgcgaacctgactgggagggtcttaaagcgtttttagagcgtcttgaatttggttcgctcttgcatgaattcggccttttagaaagcccgttaccagccgaagaagcaccttggccaccgcccgagggcgcgtttttaggttaccgtttgagtcgcccggaaccgatgtgggccgaattactggctcttgcagcgtctgcccagggacgtgtgtatcgcgcggaagaccctcatggtgcgctccgcggcctcttcgaagtccgtggactccttgccaaagacttagctgttgttgcattgcgcgaaggtcttgatttacctccgactgatgatccaatgcttcttgcgtacctcttggacccgtcaaacacgacgcctgaaggcgtagcccgtcgttacggcggcgagtggaccgaagatgcagcgaaacgcgcgttattggccgaacgtttgcacgccaatttattaggacgtttgcaaggcgaggaacgtctcctctggctttacgaagaagtggagaaaccattgagtcgcgtgctcgcgcatatggaagctaccggtgtcaaattagacgtggcgtatttggagaatctcagccttgaagttgctgcccacatgcgccgcttggaggaagaagtattccgtttagcaggccgttcctttcgccttaattctcgcgatcagttagaacgtgtgttgttcgatgaacttggtctccctcctatcggcaagacagagaagaccggtaaacgtagcacttcagcggcggttttagaagctcttcgcgaagtccatcccattgtggacaagatcttgcaataccgcgaactcgcgaaattgaaaggcacctatattgaccgtcttccggcattagtccacccgaaaacgggacgcctccatacccgcttcaaccaaacagccacggcgaccggtcgtttgtcctcctctgatccaaaccttcagaatattccagtacgtaccaaattgggccagaagatccgccgtgcgtttgtagctgaggagggttggcgtttagtggccctcgattatagccaaattgaattacgtgtccttgcccatctttctggcgatgagaacctcatccgcgtgtttcaggaaggcaaagacattcacactcaaacggcaagctggatgtttggattatcagctgaagcgatcgatcctttgatgcgtcgtgcagcgaagaccatcaatttcggtgttctctacggtatgagtgcctttcgtttgtcgcaggaattaggcattccctatgaagaagctcaggcgttcattcagaaatactttcaaagctatcccaaagttaaagcatggatcgagaagactctcgaagaaggccgcacacgtggttacgtagagaccttatttggacgtcgccgctatgttcccgatttaaacgctcgcgtgaaaggcaagcgtgaagccgccgaacgcatggcgttcaacatgcctgtacagggcacggcagctgacctcatgaaacttgcaatggtgcgcctttttccacaattgcgtgaagttggtgcccgcatgctcttgcaggtccacgatgaactcttgttagaagcgccaaaagagcgtgcggaagaggtggcagccctcgcgaaagaagttatggaaggcgtgtggcccttagcggtgcctcttgaagtcgaagttggtattggcgaggattggctggctgccaaagga

SEQ ID NO: 3606 - protein, 841 aa, synthetic construct
  REGION 1..841: note = Variant of DNA polymerase I from Thermus sp. strain 2.9
MHHHHHHGGSGVLPVFEPKGRVLLVDGHHLAYRNFFALKGLTTSSGEPVHGVYGFAKSLLKALKEDGDVVIVVFDAKAPSFRHEAYEAYKAGRAPTPEDFPRQLALMKELVDLLGLERLEVPGFEADDVLATLAKKAEREGYEVQILTADRDLFQLLSPRISVLHPEGHRITPEWLWEKYGLRPEQWVDFRALAGDPSDNIPGVKGIGEKTALKLLKEWGSLENLLKNLDQVKPESVREKILAHLEDLKLSRELSRVRTDLPLEVDFQRRREPDWEGLKAFLERLEFGSLLHEFGLLESPLPAEEAPWPPPEGAFLGYRLSRPEPMWAELLALAASAQGRVYRAEDPHGALRGLFEVRGLLAKDLAVVALREGLDLPPTDDPMLLAYLLDPSNTTPEGVARRYGGEWTEDAAKRALLAERLHANLLGRLQGEERLLWLYEEVEKPLSRVLAHMEATGVKLDVAYLENLSLEVAAHMRRLEEEVFRLAGRSFRLNSRDQLERVLFDELGLPPIGKTEKTGKRSTSAAVLEALREVHPIVDKILQYRELAKLKGTYIDRLPALVHPKTGRLHTRFNQTATATGRLSSSDPNLQNIPVRTKLGQKIRRAFVAEEGWRLVALDYSQIELRVLAHLSGDENLIRVFQEGKDIHTQTASWMFGLSAEAIDPLMRRAAKTINFGVLYGMSAFRLSQELGIPYEEAQAFIQKYFQSYPKVKAWIEKTLEEGRTRGYVETLFGRRRYVPDLNARVKGKREAAERMAFNMPVQGTAADLMKLAMVRLFPQLREVGARMLLQVHDELLLEAPKERAEEVAALAKEVMEGVWPLAVPLEVEVGIGEDWLAAKG

SEQ ID NO: 3607 - DNA, 2523 bp, synthetic construct
  misc_feature 1..2523: note = Variant of DNA polymerase I from Thermus sp. strain 2.9
  source 1..2523: mol_type = other DNA
atgcaccatcatcatcatcatggcggtagcggcgtgttaccggtgttcgagcctaaaggtcgcgtgcttctggttgatggccatcatctcgcgtatcgtaacttctttgccctgaaaggattaaccaccagcagcggcgagccggtacagggtgtctacggctttgcaaagtcgctcctgaaagctctgaaagaagacggtgatgtggtgattgttgtctttgatgcgaaagcgccaagttttcgccacgaagcgtacgaagcttacaaagccgggcgtgctccaacgccggaagactttcctcgccaattggcgcttatgaaggaattagtggatttgcttggcctcgaacgcttggaagttcccggtttcgaggcagacgacgtattagcgactctcgcaaagaaagccgaacgtgagggctatgaagtccagatcttgacagcagatcgcgatcttttccagcttttatctccgcgcatctcggtgttacacccggaagggcatcgtatcaccccggaatggctctgggagaaatatggtttgcgtcccgaacaatgggtggattttcgcgccttagcaggcgatccgagcgacaatattccgggagttaaaggtatcggcgagaagacggcgctcaagctccttaaagaatgggggtcgttggagaacttgcttaagaatttagatcaggtcaaaccagagtcagtgcgtgagaagattcttgctcacctcgaagacctcaaattaagccgcgaattgtcccgtgtacgcaccgatttgccgctcgaagttgatttccaacgccgccgcgaacctgactgggagggtcttaaagcgtttttagagcgtcttgaatttggttcgctcttgcatgaattcggccttttagaaagcccgttaccagccgaagaagcaccttggccaccgcccgagggcgcgtttttaggttaccgtttgagtcgcccggaaccgatgtgggccgaattactggctcttgcagcgtctgcccagggacgtgtgtatcgcgcggaagaccctcatggtgcgctccgcggcctcttcgaagtccgtggactccttgccaaagacttagctgttgttgcattgcgcgaaggtcttgatttacctccgactgatgatccaatgcttcttgcgtacctcttggacccgtcaaacacgacgcccgaaggcgtagcccgtcgttacggcggcgagtggaccgaagatgcagcgaaacgcgcgttattggccgaacgtttgcacgccaatttattaggacgtttgcaaggcgaggaacgtctcctctggctttacgaagaagtggagaaaccattgagtcgcgtgctcgcgcatatggaagctaccggtgtcaaattagacgtggcgtatttggagaatctcagccttgaagttgctgcccacatgcgccgcttggaggaagaagtattccgtttagcaggccgttcctttcgccttaattctcgcgatcagttagaacgtgtgttgttcgatgaacttggtctccctcctatcggcaagacagagaagaccggtaaacgtagcacttcagcggcggttttagaagctcttcgcgaagtccatcccattgtggacaagatcttgcaataccgcgaactcgcgaaattgaaaggcacctatattgaccgtcttccggcattagtccacccgaaaacgggacgcctccatacccgcttcaaccaaacagccacggcgaccggtcgtttgtcctcctctgatccaaaccttcagaatattccagtagttaccccattgggccagaagatccgccgtgcgtttgtagctgaggagggttggcgtttagtggccctcgattatagccaaattgaattacgtgtccttgcccatctttctggcgatgagaacctcatccgcgtgtttcaggaaggcaaagacattcacactcaaacggcaagctggatgtttggattatcagctgaagcgatcgatcctttgatgcgtcgtgcagcgaagaccatcaatttcggtgttctctacggtatgagtgcctttcgtttgtcgcaggaattaggcattccctatgaagaagctcaggcgttcattcagaaatactttcaaagctatcccaaagttaaagcatggatcgagaagactctcgaagaaggccgcacacgtggttacgtagagaccttatttggacgtcgccgctatgttcccgatttaaacgctcgcgtgaaaggcaagcgtgaagccgccgaacgcatggcgttcaacatgcctgtacagggcacggcagctgacctcatgaaacttgcaatggtgcgcctttttccacaattgcgtgaagttggtgcccgcatgctcttgcaggtccacgatgaactcttgttagaagcgccaaaagagcgtgcggaagaggtggcagccctcgcgaaagaagttatggaaggcgtgtggcccttagcggtgcctcttgaagtcgaagttggtattggcgaggattggctggctgccaaagga

SEQ ID NO: 3608 - protein, 841 aa, synthetic construct
  REGION 1..841: note = Variant of DNA polymerase I from Thermus sp. strain 2.9
MHHHHHHGGSGVLPVFEPKGRVLLVDGHHLAYRNFFALKGLTTSSGEPVQGVYGFAKSLLKALKEDGDVVIVVFDAKAPSFRHEAYEAYKAGRAPTPEDFPRQLALMKELVDLLGLERLEVPGFEADDVLATLAKKAEREGYEVQILTADRDLFQLLSPRISVLHPEGHRITPEWLWEKYGLRPEQWVDFRALAGDPSDNIPGVKGIGEKTALKLLKEWGSLENLLKNLDQVKPESVREKILAHLEDLKLSRELSRVRTDLPLEVDFQRRREPDWEGLKAFLERLEFGSLLHEFGLLESPLPAEEAPWPPPEGAFLGYRLSRPEPMWAELLALAASAQGRVYRAEDPHGALRGLFEVRGLLAKDLAVVALREGLDLPPTDDPMLLAYLLDPSNTTPEGVARRYGGEWTEDAAKRALLAERLHANLLGRLQGEERLLWLYEEVEKPLSRVLAHMEATGVKLDVAYLENLSLEVAAHMRRLEEEVFRLAGRSFRLNSRDQLERVLFDELGLPPIGKTEKTGKRSTSAAVLEALREVHPIVDKILQYRELAKLKGTYIDRLPALVHPKTGRLHTRFNQTATATGRLSSSDPNLQNIPVVTPLGQKIRRAFVAEEGWRLVALDYSQIELRVLAHLSGDENLIRVFQEGKDIHTQTASWMFGLSAEAIDPLMRRAAKTINFGVLYGMSAFRLSQELGIPYEEAQAFIQKYFQSYPKVKAWIEKTLEEGRTRGYVETLFGRRRYVPDLNARVKGKREAAERMAFNMPVQGTAADLMKLAMVRLFPQLREVGARMLLQVHDELLLEAPKERAEEVAALAKEVMEGVWPLAVPLEVEVGIGEDWLAAKG

SEQ ID NO: 3609 - DNA, 2523 bp, synthetic construct
  misc_feature 1..2523: note = Variant of DNA polymerase I from Thermus sp. strain 2.9
  source 1..2523: mol_type = other DNA
atgcaccatcatcatcatcatggcggtagcggcgtgttaccggtgttcgagcctaaaggtcgcgtgcttctggttgatggccatcatctcgcgtatcgtaacttctttgccctgaaaggattaaccaccagcagcggcgagccggtacagggtgtctacggctttgcaaagtcgctcctgaaagctctgaaagaagacggtgatgtggtgattgttgtctttgatgcgaaagcgccaagttttcgccacgaagcgtacgaagcttacaaagccgggcgtgctccaacgccggaagactttcctcgccaattggcgcttatgaaggaattagtggatttgcttggcctcgaacgcttggaagttcccggtttcgaggcagacgacgtattagcgactctcgcaaagaaagccgaacgtgagggctatgaagtccagatcttgacagcagatcgcgatcttttccagcttttatctccgcgcatctcggtgttacacccggaagggcatcgtatcaccccggaatggctctgggagaaatatggtttgcgtcccgaacaatgggtggattttcgcgccttagcaggcgatccgagcgacaatattccgggagttaaaggtatcggcgagaagacggcgctcaagctccttaaagaatgggggtcgttggagaacttgcttaagaatttagatcaggtcaaaccagagtcagtgcgtgagaagattcttgctcacctcgaagacctcaaattaagccgcgaattgtcccgtgtacgcaccgatttgccgctcgaagttgatttccaacgccgccgcgaacctgactgggagggtcttaaagcgtttttagagcgtcttgaatttggttcgctcttgcatgaattcggccttttagaaagcccgttaccagccgaagaagcaccttggccaccgcccgagggcgcgtttttaggttaccgtttgagtcgcccggaaccgatgtgggccgaattactggctcttgcagcgtctgcccagggacgtgtgtatcgcgcggaagaccctcatggtgcgctccgcggcctcttcgaagtccgtggactccttgccaaagacttagctgttgttgcattgcgcgaaggtcttgatttacctccgactgatgatccaatgcttcttgcgtacctcttggacccgtcaaacacgacgcccgaaggcgtagcccgtcgttacggcggcgagtggaccgaagatgcagcgaaacgcgcgttattggccgaacgtttgcacgccaatttattaggacgtttgcaaggcgaggaacgtctcctctggctttacgaagaagtggagaaaccattgagtcgcgtgctcgcgcatatggaagctaccggtgtcaaattagacgtggcgtatttggagaatctcagccttgaagttgctgcccacatgcgccgcttggaggaagaagtattccgtttagcaggccgttcctttcgccttaattctcgcgatcagttagaacgtgtgttgttcgatgaacttggtctccctcctatcggcaagacagagaagaccggtaaacgtagcacttcagcggcggttttagaagctcttcgcgaagtccatcccattgtggacaagatcttgcaataccgcgaactcgcgaaattgaaaggcacctatattgaccgtcttccggcattagtccacccgaaaacgggacgcctccatacccgcttcaaccaaacagccacggcgaccggtcgtttgtcctcctctgatccaaaccttcagaatattccagtacgtaccccattgggccagaagatccgccgtgcgtttgtagctgaggagggttggcgtttagtggccctcgattatagccaaattgaattacgtgtccttgcccatctttctggcgatgagaacctcatccgcgtgtttcaggaaggcaaagacattcacactcaaacggcaagctggatgtttggattatcagctgaagcgatcgatcctttgatgcgtcgtgcagcgaagaccatcaatttcggtgttctctacggtatgagtgcctttcgtttgtcgcaggaattaggcattccctatgaagaagctcaggcgttcattcagaaatactttcaaagctatcccaaagttaaagcatggatcgagaagactctcgaagaaggccgcacacgtggttacgtagagaccttatttggacgtcgccgctatgttcccgatttaaacgctcgcgtgaaaggcaagcgtggggccgccgaacgcatggcgttcaacatgcctgtacagggcacggcagctgacctcatgaaacttgcaatggtgcgcctttttccacaattgcgtgaagttggtgcccgcatgctcttgcaggtccacgatgaactcttgttagaagcgccaaaagagcgtgcggaagaggtggcagccctcgcgaaagaagttatggaaggcgtgtggcccttagcggtgcctcttgaagtcgaagttggtattggcgaggattggctggctgccaaagga

SEQ ID NO: 3610 - protein, 841 aa, synthetic construct
  REGION 1..841: note = Variant of DNA polymerase I from Thermus sp. strain 2.9
MHHHHHHGGSGVLPVFEPKGRVLLVDGHHLAYRNFFALKGLTTSSGEPVQGVYGFAKSLLKALKEDGDVVIVVFDAKAPSFRHEAYEAYKAGRAPTPEDFPRQLALMKELVDLLGLERLEVPGFEADDVLATLAKKAEREGYEVQILTADRDLFQLLSPRISVLHPEGHRITPEWLWEKYGLRPEQWVDFRALAGDPSDNIPGVKGIGEKTALKLLKEWGSLENLLKNLDQVKPESVREKILAHLEDLKLSRELSRVRTDLPLEVDFQRRREPDWEGLKAFLERLEFGSLLHEFGLLESPLPAEEAPWPPPEGAFLGYRLSRPEPMWAELLALAASAQGRVYRAEDPHGALRGLFEVRGLLAKDLAVVALREGLDLPPTDDPMLLAYLLDPSNTTPEGVARRYGGEWTEDAAKRALLAERLHANLLGRLQGEERLLWLYEEVEKPLSRVLAHMEATGVKLDVAYLENLSLEVAAHMRRLEEEVFRLAGRSFRLNSRDQLERVLFDELGLPPIGKTEKTGKRSTSAAVLEALREVHPIVDKILQYRELAKLKGTYIDRLPALVHPKTGRLHTRFNQTATATGRLSSSDPNLQNIPVRTPLGQKIRRAFVAEEGWRLVALDYSQIELRVLAHLSGDENLIRVFQEGKDIHTQTASWMFGLSAEAIDPLMRRAAKTINFGVLYGMSAFRLSQELGIPYEEAQAFIQKYFQSYPKVKAWIEKTLEEGRTRGYVETLFGRRRYVPDLNARVKGKRGAAERMAFNMPVQGTAADLMKLAMVRLFPQLREVGARMLLQVHDELLLEAPKERAEEVAALAKEVMEGVWPLAVPLEVEVGIGEDWLAAKG

SEQ ID NO: 3611 - DNA, 2523 bp, synthetic construct
  misc_feature 1..2523: note = Variant of DNA polymerase I from Thermus sp. strain 2.9
  source 1..2523: mol_type = other DNA
atgcaccatcatcatcatcatggcggtagcggcgtgttaccggtgttcgagcctaaaggtcgcgtgcttctggttgatggccatcatctcgcgtatcgtaacttctttgccctgaaaggattaaccaccagcagcggcgagccggtacagggtgtctacggctttgcaaagtcgctcctgaaagctctgaaagaagacggtgatgtggtgattgttgtctttgatgcgaaagcgccaagttttcgccacgaagcgtacgaagcttacaaagccgggcgtgctccaacgccggaagactttcctcgccaattggcgcttatgaaggaattagtggatttgcttggcctcgaacgcttggaagttcccggtttcgaggcagacgacgtattagcgactctcgcaaagaaagccgaacgtgagggctatgaagtccagatcttgacagcagatcgcgatcttttccagcttttatctccgcgcatctcggtgttacacccggaagggcatcgtatcaccccggaatggctctgggagaaatatggtttgcgtcccgaacaatgggtggattttcgcgccttagcaggcgatccgagcgacaatattccgggagttaaaggtatcggcgagaagacggcgctcaagctccttaaagaatgggggtcgttggagaacttgcttaagaatttagatcaggtcaaaccagagtcagtgcgtgagaagattcttgctcacctcgaagacctcaaattaagccgcgaattgtcccgtgtacgcaccgatttgccgctcgaagttgatttccaacgccgccgcgaacctgactgggagggtcttaaagcgtttttagagcgtcttgaatttggttcgctcttgcatgaattcggccttttagaaagcccgttaccagccgaagaagcaccttggccaccgcccgagggcgcgtttttaggttaccgtttgagtcgcccggaaccgatgtgggccgaattactggctcttgcagcgtctgcccagggacgtgtgtatcgcgcggaagaccctcatggtgcgctccgcggcctcttcgaagtccgtggactccttgccaaagacttagctgttgttgcattgcgcgaaggtcttgatttacctccgactgatgatccaatgcttcttgcgtacctcttggacccgtcaaacacgacgcccgaaggcgtagcccgtcgttacggcggcgagtggaccgaagatgcagcgaaacgcgcgttattggccgaacgtttgcacgccaatttattaggacgtttgcaaggcgaggaacgtctcctctggctttacgaagaagtggagaaaccattgagtcgcgtgctcgcgcatatggaagctaccggtgtcaaattagacgtggcgtatttggagaatctcagccttgaagttgctgcccacatgcgccgcttggaggaagaagtattctctttagcaggccgttcctttcgccttaattctcgcgatcagttagaacgtgtgttgttcgatgaacttggtctccctcctatcggcaagacagagaagaccggtaaacgtagcacttcagcggcggttttagaagctcttcgcgaagtccatcccattgtggacaagatcttgcaataccgcgaactcgcgaaattgaaaggcacctatattgaccgtcttccggcattagtccacccgaaaacgggacgcctccatacccgcttcaaccaaacagccacggcgaccggtcgtttgtcctcctctgatccaaaccttcagaatattccagtacgtaccccattgggccagaagatccgccgtgcgtttgtagctgaggagggttggcgtttagtggccctcgattatagccaaattgaattacgtgtccttgcccatctttctggcgatgagaacctcatccgcgtgtttcaggaaggcaaagacattcacactcaaacggcaagctggatgtttggattatcagctgaagcgatcgatcctttgatgcgtcgtgcagcgaagaccatcaatttcggtgttctctacggtatgagtgcctttcgtttgtcgcaggaattaggcattccctatgaagaagctcaggcgttcattcagaaatactttcaaagctatcccaaagttaaagcatggatcgagaagactctcgaagaaggccgcacacgtggttacgtagagaccttatttggacgtcgccgctatgttcccgatttaaacgctcgcgtgaaaggcaagcgtgaagccgccgaacgcatggcgttcaacatgcctgtacagggcacggcagctgacctcatgaaacttgcaatggtgcgcctttttccacaattgcgtgaagttggtgcccgcatgctcttgcaggtccacgatgaactcttgttagaagcgccaaaagagcgtgcggaagaggtggcagccctcgcgaaagaagttatggaaggcgtgtggcccttagcggtgcctcttgaagtcgaagttggtattggcgaggattggctggctgccaaagga

SEQ ID NO: 3612 - protein, 841 aa, synthetic construct
  REGION 1..841: note = Variant of DNA polymerase I from Thermus sp. strain 2.9
MHHHHHHGGSGVLPVFEPKGRVLLVDGHHLAYRNFFALKGLTTSSGEPVQGVYGFAKSLLKALKEDGDVVIVVFDAKAPSFRHEAYEAYKAGRAPTPEDFPRQLALMKELVDLLGLERLEVPGFEADDVLATLAKKAEREGYEVQILTADRDLFQLLSPRISVLHPEGHRITPEWLWEKYGLRPEQWVDFRALAGDPSDNIPGVKGIGEKTALKLLKEWGSLENLLKNLDQVKPESVREKILAHLEDLKLSRELSRVRTDLPLEVDFQRRREPDWEGLKAFLERLEFGSLLHEFGLLESPLPAEEAPWPPPEGAFLGYRLSRPEPMWAELLALAASAQGRVYRAEDPHGALRGLFEVRGLLAKDLAVVALREGLDLPPTDDPMLLAYLLDPSNTTPEGVARRYGGEWTEDAAKRALLAERLHANLLGRLQGEERLLWLYEEVEKPLSRVLAHMEATGVKLDVAYLENLSLEVAAHMRRLEEEVFSLAGRSFRLNSRDQLERVLFDELGLPPIGKTEKTGKRSTSAAVLEALREVHPIVDKILQYRELAKLKGTYIDRLPALVHPKTGRLHTRFNQTATATGRLSSSDPNLQNIPVRTPLGQKIRRAFVAEEGWRLVALDYSQIELRVLAHLSGDENLIRVFQEGKDIHTQTASWMFGLSAEAIDPLMRRAAKTINFGVLYGMSAFRLSQELGIPYEEAQAFIQKYFQSYPKVKAWIEKTLEEGRTRGYVETLFGRRRYVPDLNARVKGKREAAERMAFNMPVQGTAADLMKLAMVRLFPQLREVGARMLLQVHDELLLEAPKERAEEVAALAKEVMEGVWPLAVPLEVEVGIGEDWLAAKG

SEQ ID NO: 3613 - DNA, 2523 bp, synthetic construct
  misc_feature 1..2523: note = Variant of DNA polymerase I from Thermus sp. strain 2.9
  source 1..2523: mol_type = other DNA
atgcaccataggcatcatcatggcggtagcggcgtgttaccggtgttcgagcctaaaggtcgcgtgcttctggttgatggccatcatctcgcgtatcgtaacttctttgccctgaaaggattaaccaccagcagcggcgagccggtacagggtgtctacggctttgcaaagtcgctcctgaaagctctgaaagaagacggtgatgtggtgattgttgtctttgatgcgaaagcgccaagttttcgccacgaagcgtacgaagcttacaaagccgggcgtgctccaacgccggaagactttcctcgccaattggcgcttatgaaggaattagtggatttgcttggcctcgaacgcttggaagttcccggtttcgaggcagacgacgtattagcgactctcgcaaagaaagccgaacgtgagggctatgaagtccagatcttgacagcagatcgcgatcttttccagcttttatctccgcgcatctcggtgttacacccggaagggcatcgtatcaccccggaatggctctgggagaaatatggtttgcgtcccgaacaatgggtggattttcgcgccttagcaggcgatccgagcgacaatattccgggagttaaaggtatcggcgagaagacggcgctcaagctccttaaagaatgggggtcgttggagaacttgcttaagaatttagatcaggtcaaaccagagtcagtgcgtgagaagattcttgctcacctcgaagacctcaaattaagccgcgaattgtcccgtgtacgcaccgatttgccgctcgaagttgatttccaacgccgccgcgaacctgactgggagggtcttaaagcgtttttagagcgtcttgaatttggttcgctcttgcatgaattcggccttttagaaagcccgttaccagccgaagaagcaccttggccaccgcccgagggcgcgtttttaggttaccgtttgagtcgcccggaaccgatgtgggccgaattactggctcttgcagcgtctgcccagggacgtgtgtatcgcgcggaagaccctcatggtgcgctccgcggcctcttcgaagtccgtggactccttgccaaagacttagctgttgttgcattgcgcgaaggtcttgatttacctccgactgatgatccaatgcttcttgcgtacctcttggacccgtcaaacacgacgcccgaaggcgtagcccgtcgttacggcggcgagtggaccgaagatgcagcgaaacgcgcgttattggccgaacgtttgcacgccaatttattaggacgtttgcaaggcgaggaacgtctcctctggctttacgaagaagtggagaaaccattgagtcgcgtgctcgcgcatatggaagctaccggtgtcaaattagacgtggcgtatttggagaatctcagccttgaagttgctgcccacatgcgccgcttggaggaagaagtattccgtttagcaggccgttcctttcgccttaattctcgcgatcagttagaacgtgtgttgttcgatgaacttggtctccctcctatcggcaagacagagaagaccggtaaacgtagcacttcagcggcggttttagaagctcttcgcgaagtccatcccattgtggacaagatcttgcaataccgcgaactcgcgaaattgaaaggcacctatattgaccgtcttccggcattagtccacccgaaaacgggacgcctccatacccgcttcaaccaaacagccacggcgaccggtcgtttgtcctcctctgatccaaaccttcagaatattccagtacgtaccccattgggccagaagatccgccgtgcgtttgtagctgaggagggttggcgtttagtggccctcgattatagccaaattgaattacgtgtccttgcccatctttctggcgatgagaacctcatccgcgtgtttcaggaaggcaaagacattcacactcaaacggcaagctggatgtttggattatcagctgaagcgatcgatcctttgatgcgtcgtgcagcgaagaccatcaatttcggtgttctctacggtatgagtgcctttcgtttgtcgcaggaattaggcattccctatgaagaagctcaggcgttcattcagaaatactttcaaagctatcccaaagttaaagcatggatcgagaagactctcgaagaaggccgcacacgtggttacgtagagaccttatttggacgtcgccgctatgttcccgatttaaacgctcgcgtgaaaggcaagcgtgaagccgccgaacgcatggcgttcaacatgcctgtacagggcacggcagctgacctcatgaaacttgcaatggtgcgcctttttccacaattgcgtgaagttggtgcccgcatgctcttgcaggtccacgatgaactcttgttagaagcgccaaaagagcgtgcggaagaggtggcagccctcgcgaaagaagttatggaaggcgtgtggcccttagcggtgcctcttgaagtcgaagttggtattggcgaggattggctggctgccaaagga

SEQ ID NO: 3614 - protein, 841 aa, synthetic construct
  REGION 1..841: note = Variant of DNA polymerase I from Thermus sp. strain 2.9
MHHRHHHGGSGVLPVFEPKGRVLLVDGHHLAYRNFFALKGLTTSSGEPVQGVYGFAKSLLKALKEDGDVVIVVFDAKAPSFRHEAYEAYKAGRAPTPEDFPRQLALMKELVDLLGLERLEVPGFEADDVLATLAKKAEREGYEVQILTADRDLFQLLSPRISVLHPEGHRITPEWLWEKYGLRPEQWVDFRALAGDPSDNIPGVKGIGEKTALKLLKEWGSLENLLKNLDQVKPESVREKILAHLEDLKLSRELSRVRTDLPLEVDFQRRREPDWEGLKAFLERLEFGSLLHEFGLLESPLPAEEAPWPPPEGAFLGYRLSRPEPMWAELLALAASAQGRVYRAEDPHGALRGLFEVRGLLAKDLAVVALREGLDLPPTDDPMLLAYLLDPSNTTPEGVARRYGGEWTEDAAKRALLAERLHANLLGRLQGEERLLWLYEEVEKPLSRVLAHMEATGVKLDVAYLENLSLEVAAHMRRLEEEVFRLAGRSFRLNSRDQLERVLFDELGLPPIGKTEKTGKRSTSAAVLEALREVHPIVDKILQYRELAKLKGTYIDRLPALVHPKTGRLHTRFNQTATATGRLSSSDPNLQNIPVRTPLGQKIRRAFVAEEGWRLVALDYSQIELRVLAHLSGDENLIRVFQEGKDIHTQTASWMFGLSAEAIDPLMRRAAKTINFGVLYGMSAFRLSQELGIPYEEAQAFIQKYFQSYPKVKAWIEKTLEEGRTRGYVETLFGRRRYVPDLNARVKGKREAAERMAFNMPVQGTAADLMKLAMVRLFPQLREVGARMLLQVHDELLLEAPKERAEEVAALAKEVMEGVWPLAVPLEVEVGIGEDWLAAKG

SEQ ID NO: 3615 - DNA, 2523 bp, synthetic construct
  misc_feature 1..2523: note = Variant of DNA polymerase I from Thermus sp. strain 2.9
  source 1..2523: mol_type = other DNA
atgcaccatcatcatcatcatggcggtagcggcgtgttacctgtgttcgagcctaaaggtcgcgtgcttctggttgatggccatcatctcgcgtatcgtaacttctttgccctgaaaggattaaccaccagcagcggcgagccggtacagggtgtctacggctttgcaaagtcgctcctgaaagctctgaaagaagacggtgatgtggtgattgttgtctttgatgcgaaagcgccaagttttcgccacgaagcgtacgaagcttacaaagccgggcgtgctcctacgccggaagactttcctcgccaattggcgcttatgaaggaattagtggatttgcttggcctcgaacgcttggaagttcccggtttcgaggcagacgacgtattagcgactctcgcaaagaaagccgaacgtgagggctatgaagtccagatcttgacagcagatcgcgatcttttccagcttttatctccgcgcatctcggtgttacacccggaagggcatcgtatcaccccggaatggctctgggagaaatatggtttgcgtcccgaacaatgggtggattttcgcgccttagcaggcgatcctagcgacaatattccgggagttaaaggtatcggcgagaagacggcgctcaagctccttaaagaatgggggtcgttggagaacttgcttaagaatttagatcaggtcaaaccagagtcagtgcgtgagaagattcttgctcacctcgaagacctcaagttaagccgcgaattgtcccgtgtacgcaccgatttgccgctcgaagttgatttccaacgccgccgcgaacctgactgggagggtcttaaagcgtttttagagcgtcttgaatttggttcgctcttgcatgaattcggccttttagaaagcccgttaccagccgaagaagcaccttggccaccgcccgagggcgcgtttttaggttaccgtttgagtcgcccggaaccgatgtgggccgaattactggctcttgcagcgtctgcccagggacgtgtgtatcgcgcggaagaccctcatggtgcgctccgcggcctcttcgaagtccgtggactccttgccaaagacttagctgttgttgcattgcgcgaaggtcttgatttacctccgactgatgatccaatgcttcttgcgtacctcttggacccgtcaaacacgacgcccgaaggcgtagcccgtcgttacggcggcgagtggaccgaagatgcagcgaaacgcgcgttattggccgaacgtttgcacgccaatttattaggacgtttgcaaggcgaggaacgtctcctctggctttacgaagaagtggagaaaccattgagtcgcgtgctcgcgcatatggaagctaccggtgtcaaattagacgtggcgtatttggagaatctcagccttgaagttgctgcccacatgcgccgcttggaggaagaagtattccgtttagcaggccgttcctttcgccttaattctcgcgatcagttagaacgtgtgttgttcgatgaacttggtctccctcctatcggcaagacagagaagaccggtaaacgtagcacttcagcggcggttttagaagctcttcgcgaagtccatcccattgtggacaagatcttgcaataccgcgaactcgcgaaattgaaaggcacctatattgaccgtcttccggcattagtccacccgaaaacgggacgcctccatacccgcttcaaccaaacagccacggcgaccggtcgtttgtcctcctctgatccaaaccttcagaatattccagtacgtaccaaattgggccagaagatccgccgtgcgtttgtagctgaggagggttggcgtttagtggccctcgattatagccaaattgaattacgtgtccttgcccatctttctggcgatgagaacctcatccgcgtgtttcaggaaggcaaagacattcacactcaaacggcaagctggatgtttggattatcagctgaagcgatcgatcctttgatgcgtcgtgcagcgaagaccatcaatttcggtgttctctacggtatgagtgcctttcgtttgtcgcaggaattaggcattccctatgaagaagctcaggcgttcattcagaaatactttcaaagctatcccaaagttaaagcatggatcgagaagactctcgaagaaggccgccaccgtggttacgtagagaccttatttggacgtcgccgctatgttcccgatttaaacgctcgcgtgaaaggcaagcgtgaagccgccgaacgcatggcgttcaacatgcctgtacagggcacggcagctgacctcatgaaacttgcaatggtgcgcctttttccacaattgcgtgaagttggtgcccgcatgctcttgcaggtccacgatgaactcttgttagaagcgccaaaagagcgtgcggaagaggtggcagccctcgcgaaagaagttatggaaggcgtgtggcccttagcggtgcctcttgaagtcgaagttggtattggcgaggattggctggctgccaaagga

SEQ ID NO: 3616 - protein, 841 aa, synthetic construct
  REGION 1..841: note = Variant of DNA polymerase I from Thermus sp. strain 2.9
MHHHHHHGGSGVLPVFEPKGRVLLVDGHHLAYRNFFALKGLTTSSGEPVQGVYGFAKSLLKALKEDGDVVIVVFDAKAPSFRHEAYEAYKAGRAPTPEDFPRQLALMKELVDLLGLERLEVPGFEADDVLATLAKKAEREGYEVQILTADRDLFQLLSPRISVLHPEGHRITPEWLWEKYGLRPEQWVDFRALAGDPSDNIPGVKGIGEKTALKLLKEWGSLENLLKNLDQVKPESVREKILAHLEDLKLSRELSRVRTDLPLEVDFQRRREPDWEGLKAFLERLEFGSLLHEFGLLESPLPAEEAPWPPPEGAFLGYRLSRPEPMWAELLALAASAQGRVYRAEDPHGALRGLFEVRGLLAKDLAVVALREGLDLPPTDDPMLLAYLLDPSNTTPEGVARRYGGEWTEDAAKRALLAERLHANLLGRLQGEERLLWLYEEVEKPLSRVLAHMEATGVKLDVAYLENLSLEVAAHMRRLEEEVFRLAGRSFRLNSRDQLERVLFDELGLPPIGKTEKTGKRSTSAAVLEALREVHPIVDKILQYRELAKLKGTYIDRLPALVHPKTGRLHTRFNQTATATGRLSSSDPNLQNIPVRTKLGQKIRRAFVAEEGWRLVALDYSQIELRVLAHLSGDENLIRVFQEGKDIHTQTASWMFGLSAEAIDPLMRRAAKTINFGVLYGMSAFRLSQELGIPYEEAQAFIQKYFQSYPKVKAWIEKTLEEGRHRGYVETLFGRRRYVPDLNARVKGKREAAERMAFNMPVQGTAADLMKLAMVRLFPQLREVGARMLLQVHDELLLEAPKERAEEVAALAKEVMEGVWPLAVPLEVEVGIGEDWLAAKG

SEQ ID NO: 3617 - DNA, 2523 bp, synthetic construct
  misc_feature 1..2523: note = Variant of DNA polymerase I from Thermus sp. strain 2.9
  source 1..2523: mol_type = other DNA
atgcaccatcatcatcatcatggcggtagcggcgtgttaccggtgttcgagcctaaaggtcgcgtgcttctggttgatggccatcatctcgcgtatcgtaacttctttgccctgaaaggattaaccaccagcagcggcgagccggtacagggtgtctacggctttgcaaagtcgctcctgaaagctctgaaagaagacggtgatgtggtgattgttgtctttgatgcgaaagcgccaagttttcgccacgaagcgtacgaagcttacaaagccgggcgtgctccaacgccggaagactttcctcgccaattggcgcttatgaaggaattagtggatttgcttggcctcgaacgcttggaagttcccggtttcgaggcagacgacgtattagcgactctcgcaaagaaagccgaacgtgagggctatgaagtccagatcttgacagcagatcgcgatcttttccagcttttatctccgcgcatctcggtgttacacccggaagggcatcgtatcaccccggaatggctctgggagaaatatggtttgcgtcccgaacaatgggtggattttcgcgccttagcaggcgatccgagcgacaatattccgggagttaaaggtatcggcgagaagacggcgctcaagctccttaaagaatgggggtcgttggagaacttgcttaagaatttagatcaggtcaaaccagagtcagtgcgtgagaagattcttgctcacctcgaagacctcaaattaagccgcgaattgtcccgtgtacgcaccgatttgccgctcgaagttgatttccaacgccgccgcgaacctgactgggagggtcttaaagcgtttttagagcgtcttgaatttggttcgctcttgcatgaattcggccttttagaaagcccgttaccagccgaagaagcaccttggccaccgcccgagggcgcgtttttaggttaccgtttgagtcgcccggaaccgatgtgggccgaattactggctcttgcagcgtctgcccagggacgtgtgtatcgcgcggaagaccctcatggtgcgctccgcggcctcttcgaagtccgtggactccttgccaaagacttagctgttgttgcattgcgcgaaggtcttgatttacctccgactgatgatccaatgcttcttgcgtacctcttggacccgtcaaacacgacgcccgaaggcgtagcccgtcgttacggcggcgagtggaccgaagatgcagcgaaacgcgcgttattggccgaacgtttgcacgccaatttattaggacgtttgcaaggcgaggaacgtctcctctggctttacgaagaagtggagaaaccattgagtcgcgtgctcgcgcatatggaagctaccggtgtcaaattagacgtggcgtatttggagaatctcagccttgaagttgctgcccacatgcgccgcttggaggaagaagtattccgtttagcaggccgttcctttcgccttaattctcgcgatcagttagaacgtgtgttgttcgatgaacttggtctccctcctatcggcaagacagagcggaccggtaaacgtagcacttcagcggcggttttagaagctcttcgcgaagtccatcccattgtggacaagatcttgcaataccgcgaactcgcgaaattgaaaggcacctatattgaccgtcttccggcattagtccacccgaaaacgggacgcctccatacccgcttcaaccaaacagccacggcgaccggtcgtttgtcctcctctgatccaaaccttcagaatattccagtacgtaccccattgggccagaagatccgccgtgcgtttgtagctgaggagggttggcgtttagtggccctcgattatagccaaattgaattacgtgtccttgcccatctttctggcgatgagaacctcatccgcgtgtttcaggaaggcaaagacattcacactcaaacggcaagctggatgtttggattatcagctgaagcgatcgatcctttgatgcgtcgtgcagcgaagaccatcaatttcggtgttctctacggtatgagtgcctttcgtttgtcgcaggaattaggcattccctatgaagaagctcaggcgttcattcagaaatactttcaaagctatcccaaagttaaagcatggatcgagaagactctcgaagaaggccgcacacgtggttacgtagagaccttatttggacgtcgccgctatgttcccgatttaaacgctcgcgtgaaaggcaagcgtgaagccgccgaacgcatggcgttcaacatgcctgtacagggcacggcagctgacctcatgaaacttgcaatggtgcgcctttttccacaattgcgtgaagttggtgcccgcatgctcttgcaggtccacgatgaactcttgttagaagcgccaaaagagcgtgcggaagaggtggcagccctcgcgaaagaagttatggaaggcgtgtggcccttagcggtgcctcttgaagtcgaagttggtattggcgaggattggctggctgccaaagga

SEQ ID NO: 3618 - protein, 841 aa, synthetic construct
  REGION 1..841: note = Variant of DNA polymerase I from Thermus sp. strain 2.9
MHHHHHHGGSGVLPVFEPKGRVLLVDGHHLAYRNFFALKGLTTSSGEPVQGVYGFAKSLLKALKEDGDVVIVVFDAKAPSFRHEAYEAYKAGRAPTPEDFPRQLALMKELVDLLGLERLEVPGFEADDVLATLAKKAEREGYEVQILTADRDLFQLLSPRISVLHPEGHRITPEWLWEKYGLRPEQWVDFRALAGDPSDNIPGVKGIGEKTALKLLKEWGSLENLLKNLDQVKPESVREKILAHLEDLKLSRELSRVRTDLPLEVDFQRRREPDWEGLKAFLERLEFGSLLHEFGLLESPLPAEEAPWPPPEGAFLGYRLSRPEPMWAELLALAASAQGRVYRAEDPHGALRGLFEVRGLLAKDLAVVALREGLDLPPTDDPMLLAYLLDPSNTTPEGVARRYGGEWTEDAAKRALLAERLHANLLGRLQGEERLLWLYEEVEKPLSRVLAHMEATGVKLDVAYLENLSLEVAAHMRRLEEEVFRLAGRSFRLNSRDQLERVLFDELGLPPIGKTERTGKRSTSAAVLEALREVHPIVDKILQYRELAKLKGTYIDRLPALVHPKTGRLHTRFNQTATATGRLSSSDPNLQNIPVRTPLGQKIRRAFVAEEGWRLVALDYSQIELRVLAHLSGDENLIRVFQEGKDIHTQTASWMFGLSAEAIDPLMRRAAKTINFGVLYGMSAFRLSQELGIPYEEAQAFIQKYFQSYPKVKAWIEKTLEEGRTRGYVETLFGRRRYVPDLNARVKGKREAAERMAFNMPVQGTAADLMKLAMVRLFPQLREVGARMLLQVHDELLLEAPKERAEEVAALAKEVMEGVWPLAVPLEVEVGIGEDWLAAKG

SEQ ID NO: 3619 - DNA, 2523 bp, synthetic construct
  misc_feature 1..2523: note = Variant of DNA polymerase I from Thermus sp. strain 2.9
  source 1..2523: mol_type = other DNA
atgcaccatcatcatcatcatggcggtagcggcgtgttaccggtgttcgagcctaaaggtcgcgtgcttctggttgatggccatcatctcgcgtatcgtaacttctttgccctgaaaggattaaccaccagcagcggcgagccggtacagggtgtctacggctttgcaaagtcgctcctgaaagctctgaaagaagacggtgatgtggtgattgttgtctttgatgcgaaagcgccaagttttcgccacgaagcgtacgaagcttacaaagccgggcgtgctccaacgccggaagactttcctcgccaattggcgcttatgaaggaattagtggatttgcttggcctcgaacgcttggaagttcccggtttcgaggcagacgacgtattagcgactctcgcaaagaaagccgaacgtgagggctatgaagtccagatcttgacagcagatcgcgatcttttccagcttttatctccgcgcatctcggtgttacacccggaagggcatcgtatcaccccggaatggctctgggagaaatatggtttgcgtcccgaacaatgggtggattttcgcgccttagcaggcgatccgagcgacaatattccgggagttaaaggtatcggcgagaagacggcgctcaagctccttaaagaatgggggtcgttggagaacttgcttaagaatttagatcaggtcaaaccagagtcagtgcgtgagaagattcttgctcacctcgaagacctcaaattaagccgcgaattgtcccgtgtacgcaccgatttgccgctcgaagttgatttccaacgccgccgcgaacctgactgggagggtcttaaagcgtttttagagcgtcttgaatttggttcgctcttgcatgaattcggccttttagaacggccgttaccagccgaagaagcaccttggccaccgcccgagggcgcgtttttaggttaccgtttgagtcgcccggaaccgatgtgggccgaattactggctcttgcagcgtctgcccagggacgtgtgtatcgcgcggaagaccctcatggtgcgctccgcggcctcttcgaagtccgtggactccttgccaaagacttagctgttgttgcattgcgcgaaggtcttgatttacctccgactgatgatccaatgcttcttgcgtacctcttggacccgtcaaacacgacgcccgaaggcgtagcccgtcgttacggcggcgagtggaccgaagatgcagcgaaacgcgcgttattggccgaacgtttgcacgccaatttattaggacgtttgcaaggcgaggaacgtctcctctggctttacgaagaagtggagaaaccattgagtcgcgtgctcgcgcatatggaagctaccggtgtcaaattagacgtggcgtatttggagaatctcagccttgaagttgctgtccacatgcgccgcttggaggaagaagtattccgtttagcaggccgttcctttcgccttaattctcgcgatcagttagaacgtgtgttgttcgatgaacttggtctccctcctatcggcaagacagagaagaccggtaaacgtagcacttcagcggcggttttagaagctcttcgcgaagtccatcccattgtggacaagatcttgcaataccgcgaactcgcgaaattgaaaggcacctatattgaccgtcttccggcattagtccacccgaaaacgggacgcctccatacccgcttcaaccaaacagccacggcgaccggtcgtttgtcctcctctgatccaaaccttcagaatattccagtacgtaccccattgggccagaagatccgccgtgcgtttgtagctgaggagggttggcgtttagtggccctcgattatagccaaattgaattacgtgtccttgcccatctttctggcgatgagaacctcatccgcgtgtttcaggaaggcaaagacattcacactcaaacggcaagctggatgtttggattatcagctgaagcgatcgatcctttgatgcgtcgtgcagcgaagaccatcaatttcggtgttctctacggtatgagtgcctttcgtttgtcgcaggaattaggcattccctatgaagaagctcaggcgttcattcagaaatactttcaaagctatcccaaagttaaagcatggatcgagaagactctcgaagaaggccgcacacgtggttacgtagagaccttatttggacgtcgccgctatgttcccgatttaaacgctcgcgtgaaaggcaagcgtgaagccgccgaacgcatggcgttcaacatgcctgtacagggcacggcagctgacctcatgaaacttgcaatggtgcgcctttttccacaattgcgtgaagttggtgcccgcatgctcttgcaggtccacgatgaactcttgttagaagcgccaaaagagcgtgcggaagaggtggcagccctcgcgaaagaagttatggaaggcgtgtggcccttagcggtgcctcttgaagtcgaagttggtattggcgaggattggctggctgccaaagga

SEQ ID NO: 3620 - protein, 841 aa, synthetic construct
  REGION 1..841: note = Variant of DNA polymerase I from Thermus sp. strain 2.9
MHHHHHHGGSGVLPVFEPKGRVLLVDGHHLAYRNFFALKGLTTSSGEPVQGVYGFAKSLLKALKEDGDVVIVVFDAKAPSFRHEAYEAYKAGRAPTPEDFPRQLALMKELVDLLGLERLEVPGFEADDVLATLAKKAEREGYEVQILTADRDLFQLLSPRISVLHPEGHRITPEWLWEKYGLRPEQWVDFRALAGDPSDNIPGVKGIGEKTALKLLKEWGSLENLLKNLDQVKPESVREKILAHLEDLKLSRELSRVRTDLPLEVDFQRRREPDWEGLKAFLERLEFGSLLHEFGLLERPLPAEEAPWPPPEGAFLGYRLSRPEPMWAELLALAASAQGRVYRAEDPHGALRGLFEVRGLLAKDLAVVALREGLDLPPTDDPMLLAYLLDPSNTTPEGVARRYGGEWTEDAAKRALLAERLHANLLGRLQGEERLLWLYEEVEKPLSRVLAHMEATGVKLDVAYLENLSLEVAVHMRRLEEEVFRLAGRSFRLNSRDQLERVLFDELGLPPIGKTEKTGKRSTSAAVLEALREVHPIVDKILQYRELAKLKGTYIDRLPALVHPKTGRLHTRFNQTATATGRLSSSDPNLQNIPVRTPLGQKIRRAFVAEEGWRLVALDYSQIELRVLAHLSGDENLIRVFQEGKDIHTQTASWMFGLSAEAIDPLMRRAAKTINFGVLYGMSAFRLSQELGIPYEEAQAFIQKYFQSYPKVKAWIEKTLEEGRTRGYVETLFGRRRYVPDLNARVKGKREAAERMAFNMPVQGTAADLMKLAMVRLFPQLREVGARMLLQVHDELLLEAPKERAEEVAALAKEVMEGVWPLAVPLEVEVGIGEDWLAAKG

SEQ ID NO: 3621 - DNA, 2523 bp, synthetic construct
  misc_feature 1..2523: note = Variant of DNA polymerase I from Thermus sp. strain 2.9
  source 1..2523: mol_type = other DNA
atgcaccatcatcatgtgcatggcggtagcggcgtgttaccggtgttcgagcctaaaggtcgcgtgcttctggttgatggccatcatctcgcgtatcgtaacttctttgccctgaaaggattaaccaccagcagcggcgagccggtacagggtgtctacggctttgcaaagtcgctcctgaaagctctgaaagaagacggtgatgtggtgattgttgtctttgatgcgaaagcgccaagttttcgccacgaagcgtacgaagcttacaaagccgggcgtgctccaacgccggaagactttcctcgccaattggcgcttatgaaggaattagtggatttgcttggcctcgaacgcttggaagttcccggtttcgaggcagacgacgtattagcgactctcgcaaagaaagccgaacgtgagggctatgaagtccagatcttgacagcagatcgcgatcttttccagcttttatctccgcgcatctcggtgttacacccggaagggcatcgtatcaccccggaatggctctgggagaaatatggtttgcgtcccgaacaatgggtggattttcgcgccttagcaggcgatccgagcgacaatattccgggagttaaaggtatcggcgagaagacggcgctcaagctccttaaagaatgggggtcgttggagaacttgcttaagaatttagatcaggtcaaaccagagtcagtgcgtgagaagattcttgctcacctcgaagacctcaaattaagccgcgaattgtcccgtgtacgcaccgatttgccgctcgaagttgatttccaacgccgccgcgaacctgactgggagggtcttaaagcgtttttagagcgtcttgaatttggttcgctcttgcatgaattcggccttttagaaagcccgttaccagccgaagaagcaccttggccaccgcccgagggcgcgtttttaggttaccgtttgagtcgcccggaaccgatgtgggccgaattactggctcttgcagcgtctgcccagggacgtgtgtatcgcgcggaagaccctcatggtgcgctccgcggcctcttcgaagtccgtggactccttgccaaagacttagctgttgttgcattgcgcgaaggtcttgatttacctccgactgatgatccaatgcttcttgcgtacctcttggacccgtcaaacacgacgcccgaaggcgtagcccgtcgttacggcggcgagtggaccgaagatgcagcgaaacgcgcgttattggccgaacgtttgcacgccaatttattaggacgtttgcaaggcgaggaacgtctcctctggctttacgaagaagtggagaaaccattgagtcgcgtgctcgcgcatatggaagctaccggtgtcaaattagacgtggcgtatttggagaatctcagccttgaagttgctgcccacatgcgccgcttggaggaagaagtattccgtttagcaggccgttcctttcgccttaattctcgcgatcagttagaacgtgtgttgttcgatgaacttggtctccctcctatcggcaagacagagaagaccggtaaacgtagcacttcagcggcggttttagaagctcttcgcgaagtccatcccattgtggacaagatcttgcaataccgcgaactcgcgaaattgaaaggcacctatattgaccgtcttccggcattagtccacccgaaaacgggacgcctccatacccgcttcaaccaaacagccacggcgaccggtcgtttgtcctcctctgatccaaaccttcagaatattccagtacgtaccccattgggccagaagatccgccgtgcgtttgtagctgaggagggttggcgtttagtggccctcgattatagccaaattgaattacgtgtccttgcccatctttctggcgatgagaacctcatccgcgtgtttcaggaaggcaaagacattcacactcaaacggcaagctggatgtttggattatcagctgaagcgatcgatcctttgatgcgtcgtgcagcgaagaccatcaatttcggtgttctctacggtatgagtgcctttcgtttgtcgcaggaattaggcattccctatgaagaagctcaggcgttcattcagaaatactttcaaagctatcccaaagttaaagcatggatcgagaagactctcgaagaaggccgcacacgtggttacgtagagaccttatttggacgtcgccgctatgttcccgatttaaacgctcgcgtgaaaggcaagcgtgaagccgccgaacgcatggcgttcaacatgcctgtacagggcacggcagctgacctcatgaaacttgcaatggtgcgcctttttccacaattgcgtgaagttggtgcccgcatgctcttgcaggtccacgatgaactcttgttagaagcgccaaaagagcgtgcggaagaggtggcagccctcgcgaaagaagttatggaaggcgtgtggcccttagcggtgcctcttgaagtcgaagttggtattggcgaggattggctggctgccaaagga

SEQ ID NO: 3622 - protein, 841 aa, synthetic construct
  REGION 1..841: note = Variant of DNA polymerase I from Thermus sp. strain 2.9
MHHHHVHGGSGVLPVFEPKGRVLLVDGHHLAYRNFFALKGLTTSSGEPVQGVYGFAKSLLKALKEDGDVVIVVFDAKAPSFRHEAYEAYKAGRAPTPEDFPRQLALMKELVDLLGLERLEVPGFEADDVLATLAKKAEREGYEVQILTADRDLFQLLSPRISVLHPEGHRITPEWLWEKYGLRPEQWVDFRALAGDPSDNIPGVKGIGEKTALKLLKEWGSLENLLKNLDQVKPESVREKILAHLEDLKLSRELSRVRTDLPLEVDFQRRREPDWEGLKAFLERLEFGSLLHEFGLLESPLPAEEAPWPPPEGAFLGYRLSRPEPMWAELLALAASAQGRVYRAEDPHGALRGLFEVRGLLAKDLAVVALREGLDLPPTDDPMLLAYLLDPSNTTPEGVARRYGGEWTEDAAKRALLAERLHANLLGRLQGEERLLWLYEEVEKPLSRVLAHMEATGVKLDVAYLENLSLEVAAHMRRLEEEVFRLAGRSFRLNSRDQLERVLFDELGLPPIGKTEKTGKRSTSAAVLEALREVHPIVDKILQYRELAKLKGTYIDRLPALVHPKTGRLHTRFNQTATATGRLSSSDPNLQNIPVRTPLGQKIRRAFVAEEGWRLVALDYSQIELRVLAHLSGDENLIRVFQEGKDIHTQTASWMFGLSAEAIDPLMRRAAKTINFGVLYGMSAFRLSQELGIPYEEAQAFIQKYFQSYPKVKAWIEKTLEEGRTRGYVETLFGRRRYVPDLNARVKGKREAAERMAFNMPVQGTAADLMKLAMVRLFPQLREVGARMLLQVHDELLLEAPKERAEEVAALAKEVMEGVWPLAVPLEVEVGIGEDWLAAKG

SEQ ID NO: 3623 - DNA, 2523 bp, synthetic construct
  misc_feature 1..2523: note = Variant of DNA polymerase I from Thermus sp. strain 2.9
  source 1..2523: mol_type = other DNA
atgcaccatcatcatcatcatggcggtagcggcgtgttaccggtgttcgagcctaaaggtcgcgtgcttctggttgatggccatcatctcgcgtatcgtaacttctttgccctgaaaggattaaccaccagcagcggcgagccggtacagggtgtctacggctttgcaaagtcgctcctgaaagctctgaaagaagacggtgatgtggtgattgttgtctttgatgcgaaagcgccaagttttcgccacgaagcgtacgaagcttacaaagccgggcgtgctccaacgccggaagactttcctcgccaattggcgcttatgaaggaattagtggatttgcttggcctcgaacgcttggaagttcccggtttcgaggcagacgacgtattagcgactctcgcaaagaaagccgaacgtgagggctatgaagtccagatcttgacagcagatcgcgatcttttccagcttttatctccgcgcatctcggtgttacacccggaagggcatcgtatcaccccggaatggctctgggagaaatatggtttgcgtcccgaacaatgggtggattttcgcgccttagcaggcgatccgagcgacaatattccgggagttaaaggtatcggcgagaagacggcgctcaagctccttaaagaatgggggtcgttggagaacttgcttaagaatttagatcaggtcaaaccagagtcagtgcgtgagaagattcttgctcacctcgaagacctcaaattaagccgcgaattgtcccgtgtacgcaccgatttgccgctcgaagttgatttccatcgccgccgcgaacctgactgggagggtcttaaagcgtttttagagcgtcttgaatttggttcgctcttgcatgaattcggccttttagaaagcccgttaccagccgaagaagcaccttggccaccgcccgagggcgcgtttttaggttaccgtttgagtcgcccggaaccgatgtgggccgaattactggctcttgcagcgtctgcccagggacgtgtgtatcgcgcggaagaccctcatggtgcgctccgcggcctcttcgaagtccgtggactccttgccaaagacttagctgttgttgcattgcgcgaaggtcttgatttacctccgactgatgatccaatgcttcttgcgtacctcttggacccgtcaaacacgacgcccgaaggcgtagcccgtcgttacggcggcgagtggaccgaagatgcagcgaaacgcgcgttattggccgaacgtttgcacgccaatttattaggacgtttgcaaggcgaggaacgtctcctctggctttacgaagaagtggagaaaccattgagtcgcgtgctcgcgcatatggaagctaccggtgtcaaattagacgtggcgtatttggagaatctcagccttgaagttgctgcccacatgcgccgcttggaggaagaagtattccgtttagcaggccgttcctttcgccttaattctcgcgatcagttagaacgtgtgttgttcgatgaacttggtctccctcctatcggcaagacagagaagaccggtaaacgtagcacttcagcggcggttttagaagctcttcgcgaagtccatcccattgtggacaagatcttgcaataccgcgaactcgcgaaattgaaaggcacctatattgaccgtcttccggcattagtccacccgaaaacgggacgcctccatacccgcttcaaccaaacagccacggcgaccggtcgtttgtcctcctctgatccaaaccttcagaatattccagtacgtaccccattgggccagaagatccgccgtgcgtttgtagctgaggagggttggcgtttagtggccctcgattatagccaaattgaattacgtgtccttgcccatctttctggcgatgagaacctcatccgcgtgtttcaggaaggcaaagacattcacactcaaacggcaagctggatgtttggattatcagctgaagcgatcgatcctttgatgcgtcgtgcagcgaagaccatcaatttcggtgttctctacggtatgagtgcctttcgtttgtcgcaggaattaggcattccctatgaagaagctcaggcgttcattcagaaatactttcaaagctatcccaaagttaaagcatggatcgagaagactctcgaagaaggccgcacacgtggttacgtagagaccttatttggacgtcgccgctatgttcccgatttaaacgctcgcgtgaaaggcaagcgtgaagccgccgaacgcatggcgttcaacatgcctgtacagggcacggcagctgacctcatgaaacttgcaatggtgcgcctttttccacaattgcgtgaagttggtgcccgcatgctcttgcaggtccacgatgaactcttgttagaagcgccaaaagagcgtgcggaagaggtggcagccctcgcgaaagaagttatggaaggcgtgtggcccttagcggtgcctcttgaagtcgaagttggtattggcgaggattggctggctgccaaagga

SEQ ID NO: 3624 - protein, 841 aa, synthetic construct
  REGION 1..841: note = Variant of DNA polymerase I from Thermus sp. strain 2.9
MHHHHHHGGSGVLPVFEPKGRVLLVDGHHLAYRNFFALKGLTTSSGEPVQGVYGFAKSLLKALKEDGDVVIVVFDAKAPSFRHEAYEAYKAGRAPTPEDFPRQLALMKELVDLLGLERLEVPGFEADDVLATLAKKAEREGYEVQILTADRDLFQLLSPRISVLHPEGHRITPEWLWEKYGLRPEQWVDFRALAGDPSDNIPGVKGIGEKTALKLLKEWGSLENLLKNLDQVKPESVREKILAHLEDLKLSRELSRVRTDLPLEVDFHRRREPDWEGLKAFLERLEFGSLLHEFGLLESPLPAEEAPWPPPEGAFLGYRLSRPEPMWAELLALAASAQGRVYRAEDPHGALRGLFEVRGLLAKDLAVVALREGLDLPPTDDPMLLAYLLDPSNTTPEGVARRYGGEWTEDAAKRALLAERLHANLLGRLQGEERLLWLYEEVEKPLSRVLAHMEATGVKLDVAYLENLSLEVAAHMRRLEEEVFRLAGRSFRLNSRDQLERVLFDELGLPPIGKTEKTGKRSTSAAVLEALREVHPIVDKILQYRELAKLKGTYIDRLPALVHPKTGRLHTRFNQTATATGRLSSSDPNLQNIPVRTPLGQKIRRAFVAEEGWRLVALDYSQIELRVLAHLSGDENLIRVFQEGKDIHTQTASWMFGLSAEAIDPLMRRAAKTINFGVLYGMSAFRLSQELGIPYEEAQAFIQKYFQSYPKVKAWIEKTLEEGRTRGYVETLFGRRRYVPDLNARVKGKREAAERMAFNMPVQGTAADLMKLAMVRLFPQLREVGARMLLQVHDELLLEAPKERAEEVAALAKEVMEGVWPLAVPLEVEVGIGEDWLAAKG

SEQ ID NO: 3625 - DNA, 2523 bp, synthetic construct
  misc_feature 1..2523: note = Variant of DNA polymerase I from Thermus sp. strain 2.9
  source 1..2523: mol_type = other DNA
atgcaccatcatcatcatcatggcggtagcggcgtgttaccggtgttcgagcctaaaggtcgcgtgcttctggttgatggccatcatctcgcgtatcgtaacttctttgccctgaaaggattaaccaccagcagcggcgagccggtacagggtgtctacggctttgcaaagtcgctcctgaaagctctgaaagaagacggtgatgtggtgattgttgtctttgatgcgaaagcgccaagttttcgccacgaagcgtacgaagcttacaaagccgggcgtgctccaacgccggaagactttcctcgccaattggcgcttatgaaggaattagtggatttgcttggcctcgaacgcttggaagttcccggtttcgaggcagacgacgtattagcgactctcgcaaagaaagccgaacgtgagggctatgaagtccagatcttgacagcagatcgcgatcttttccagcttttatctccgcgcatctcggtgttacacccggaagggcatcgtatcaccccggaatggctctgggagaaatatggtttgcgtcccgaacaatgggtggattttcgcgccttagcaggcgatccgagcgacaatattccgggagttaaaggtatcggcgagaagacggcgctcaagctccttaaagaatgggggtcgttggagaacttgcttaagaatttagatcaggtcaaaccagagtcagtgcgtgagaagattcttgctcacctcgaagacctcaaattaagccgcgaattgtcccgtgtacgcaccgatttgccgctcgaagttgatttccaacgccgccgcgaacctgactgggagggtcttaaagcgtttttagagcgtcttgaatttggttcgctcttgcatgaattcggccttttagaaagcccgttaccagccgaagaagcaccttggccaccgcccgagggcgcgtttttaggttaccgtttgagtcgcccggaaccgatgtgggccgaattactggctcttgcagcgtctgcccagggacgtgtgtatcgcgcggaagaccctcatggtgcgctccgcggcctcttcgaagtccgtggactccttgccaaagacttagctgttgttgcattgcgcgaaggtcttgatttacctccgactgatgatccaatgcttcttgcgtacctcttggacccgtcaaacacgacgcccgaaggcgtagcccgtcgttacggcggcgagtggaccgaagatgcagcgaaacgcgcgttattggccgaacgtttgcacgccaatttattaggacgtttgcaaggcgaggaacgtctcctctggctttacgaagaagtggagaaaccattgagtcgcgtgctcgcgcatatggaagctaccggtgtcaaattagacgtggcgtatttggagaatctcagccttgaagttgctgcccacatgcgccgcttggaggaagaagtattccgtttagcaggccgttcctttcgccttaattctcgcgatcagttagaacgtgtgttgttcgatgaacttggtctccctcctatcggcaagacagagaataccggtaaacgtagcacttcagcggcggttttagaagctcttcgcgaagtccatcccattgtggacaagatcttgcaataccgcgaactcgcgaaattgaaaggcacctatattgaccgtcttccggcattagtccacccgaaaacgggacgcctccatacccgcttcaaccaaacagccacggcgaccggtcgtttgtcctcctctgatccaaaccttcagaatattccagtacgtaccccattgggccagaagatccgccgtgcgtttgtagctgaggagggttggcgtttagtggccctcgattatagccaaattgaattacgtgtccttgcccatctttctggcgatgagaacctcatccgcgtgtttcaggaaggcaaagacattcacactcaaacggcaagctggatgtttggattatcagctgaagcgatcgatcctttgatgcgtcgtgcagcgaagaccatcaatttcggtgttctctacggtatgagtgcctttcgtttgtcgcaggaattaggcattccctatgaagaagctcaggcgttcattcagaaatactttcaaagctatcccaaagttaaagcatggatcgagaagactctcgaagaaggccgcacacgtggttacgtagagaccttatttggacgtcgccgctatgttcccgatttaaacgctcgcgtgaaaggcaagcgtgaagccgccgaacgcatggcgttcaacatgcctgtacagggcacggcagctgacctcatgaaacttgcaatggtgcgcctttttccacaattgcgtgaagttggtgcccgcatgctcttgcaggtccacgatgaactcttgttagaagcgccaaaagagcgtgcggaagaggtggcagccctcgcgaaagaagttatggaaggcgtgtggcccttagcggtgcctcttgaagtcgaagttggtattggcgaggattggctggctgccaaagga

SEQ ID NO: 3626 - protein, 841 aa, synthetic construct
  REGION 1..841: note = Variant of DNA polymerase I from Thermus sp. strain 2.9
MHHHHHHGGSGVLPVFEPKGRVLLVDGHHLAYRNFFALKGLTTSSGEPVQGVYGFAKSLLKALKEDGDVVIVVFDAKAPSFRHEAYEAYKAGRAPTPEDFPRQLALMKELVDLLGLERLEVPGFEADDVLATLAKKAEREGYEVQILTADRDLFQLLSPRISVLHPEGHRITPEWLWEKYGLRPEQWVDFRALAGDPSDNIPGVKGIGEKTALKLLKEWGSLENLLKNLDQVKPESVREKILAHLEDLKLSRELSRVRTDLPLEVDFQRRREPDWEGLKAFLERLEFGSLLHEFGLLESPLPAEEAPWPPPEGAFLGYRLSRPEPMWAELLALAASAQGRVYRAEDPHGALRGLFEVRGLLAKDLAVVALREGLDLPPTDDPMLLAYLLDPSNTTPEGVARRYGGEWTEDAAKRALLAERLHANLLGRLQGEERLLWLYEEVEKPLSRVLAHMEATGVKLDVAYLENLSLEVAAHMRRLEEEVFRLAGRSFRLNSRDQLERVLFDELGLPPIGKTENTGKRSTSAAVLEALREVHPIVDKILQYRELAKLKGTYIDRLPALVHPKTGRLHTRFNQTATATGRLSSSDPNLQNIPVRTPLGQKIRRAFVAEEGWRLVALDYSQIELRVLAHLSGDENLIRVFQEGKDIHTQTASWMFGLSAEAIDPLMRRAAKTINFGVLYGMSAFRLSQELGIPYEEAQAFIQKYFQSYPKVKAWIEKTLEEGRTRGYVETLFGRRRYVPDLNARVKGKREAAERMAFNMPVQGTAADLMKLAMVRLFPQLREVGARMLLQVHDELLLEAPKERAEEVAALAKEVMEGVWPLAVPLEVEVGIGEDWLAAKG

SEQ ID NO: 3627 - DNA, 2523 bp, synthetic construct
  misc_feature 1..2523: note = Variant of DNA polymerase I from Thermus sp. strain 2.9
  source 1..2523: mol_type = other DNA
atgcaccatcatcatcatcatggcggtagcggcgtgttacctgtgttcgagcctaaaggtcgcgtgcttctggttgatggccatcatctcgcgtatcgtaacttctttgccctgaaaggattaaccaccagcagcggcgagccggtacagggtgtctacggctttgcaaagtcgctcctgaaagctctgaaagaagacggtgatgtggtgattgttgtctttgatgcgaaagcgccaagttttcgccacgaagcgtacgaagcttacaaagccgggcgtgctccaacgccggaagactttcctcgccaattggcgcttatgaaggaattagtggatttgcttggcctcgaacgcttggaagttcccggtttcgaggcagacgacgtattagcgactctcgcaaagaaagccgaacgtgagggctatgaagtccagatcttgacagcagatcgcgatcttttccagcttttatctccgcgcatctcggtgttacacccggaagggcatcgtatcaccccggaatggctctgggagaaatatggtttgcgtcccgaacaatgggtggattttcgcgccttagcaggcgatccgagcgacaatattccgggagttaaaggtatcggcgagaagacggcgctcaagctccttaaagaatgggggtcgttggagaacttgcttaagaatttagatcaggtcaaaccagagtcagtgcgtgagaagattcttgctcacctcgaagacctcgagttaagccgcgaattgtcccgtgtacgcaccgatttgccgctcgaagttgatttccaacgccgccgcgaacctgactgggagggtcttaaagcgtttttagagcgtcttgaatttggttcgctcttgcatgaattcggccttttagaaagcccgttaccagccgaagaagcaccttggccaccgcccgagggcgcgtttttaggttaccgtttgagtcgcccggaaccgatgtgggccgaattactggctcttgcagcgtctgcccagggacgtgtgtatcgcgcggaagaccctcatggtgcgctccgcggcctcttcgaagtccgtggactccttgccaaagacttagctgttgttgcattgcgcgaaggtcttgatttacctccgactgatgatccaatgcttcttgcgtacctcttggacccgtcaaacacgacgcctgaaggcgtagcccgtcgttacggcggcgagtggaccgaagatgcagcgaaacgcgcgttattggccgaacgtttgcacgccaatttattaggacgtttgcaaggcgaggaacgtctcctctggctttacgaagaagtggagaaaccattgagtcgcgtgctcgcgcatatggaagctaccggtgtcaaattagacgtggcgtatttggagaatctcagccttgaagttgctgcccacatgcgccgcttggaggaagaagtattccgtttagcaggccgttcctttcgccttaattctcgcgatcagttagaacgtgtgttgttcgatgaacttggtctccctcctatcggcaagacagagaagaccggtaaacgtagcacttcagcggcggttttagaagctcttcgcgaagtccatcccattgtggacaagatcttgcaataccgcgaactcgcgaaattgaaaggcacctatattgaccgtcttccggcattagtccacccgaaaacgggacgcctccatacccgcttcaaccaaacagccacggcgaccggtcgtttgtcctcctctgatccaaaccttcagaatattccagtacgtaccccgttgggccagaagatccgccgtgcgtttgtagctgaggagggttggcgtttagtggccctcgattatagccaaattgaattacgtgtccttgcccatctttctggcgatgagaacctcatccgcgtgtttcaggaaggcaaagacattcacactcaaacggcaagctggatgtttggattatcagctgaagcgatcgatcctttgatgcgtcgtgcagcgaagaccatcaatttcggtgttctctacggtatgagtgcctttcgtttgtcgcaggaattaggcattcccaaagaagaagctcaggcgttcattcagaaatactttcaaagctatcccaaagttaaagcatggatcgagaagactctcgaagaaggccgcacccgtggttacgtagagaccttatttggacgtcgccgctatgttcccgatttaaacgctcgcgtgaaaggcaagcgtgaagccgccgaacgcatggcgttcaacatgcctgtacagggcacggcagctgacctcatgaaacttgcaatggtgcgcctttttccacaattgcgtgaagttggtgcccgcatgctcttgcaggtccacgatgaactcttgttagaagcgccaaaagagcgtgcggaagaggtggcagccctcgcgaaagaagttatggaaggcgtgtggcccttagcggtgcctcttgaagtcgaagttggtattggcgaggattggctggctgccaaagga

SEQ ID NO: 3628 - protein, 841 aa, synthetic construct
  REGION 1..841: note = Variant of DNA polymerase I from Thermus sp. strain 2.9
MHHHHHHGGSGVLPVFEPKGRVLLVDGHHLAYRNFFALKGLTTSSGEPVQGVYGFAKSLLKALKEDGDVVIVVFDAKAPSFRHEAYEAYKAGRAPTPEDFPRQLALMKELVDLLGLERLEVPGFEADDVLATLAKKAEREGYEVQILTADRDLFQLLSPRISVLHPEGHRITPEWLWEKYGLRPEQWVDFRALAGDPSDNIPGVKGIGEKTALKLLKEWGSLENLLKNLDQVKPESVREKILAHLEDLELSRELSRVRTDLPLEVDFQRRREPDWEGLKAFLERLEFGSLLHEFGLLESPLPAEEAPWPPPEGAFLGYRLSRPEPMWAELLALAASAQGRVYRAEDPHGALRGLFEVRGLLAKDLAVVALREGLDLPPTDDPMLLAYLLDPSNTTPEGVARRYGGEWTEDAAKRALLAERLHANLLGRLQGEERLLWLYEEVEKPLSRVLAHMEATGVKLDVAYLENLSLEVAAHMRRLEEEVFRLAGRSFRLNSRDQLERVLFDELGLPPIGKTEKTGKRSTSAAVLEALREVHPIVDKILQYRELAKLKGTYIDRLPALVHPKTGRLHTRFNQTATATGRLSSSDPNLQNIPVRTPLGQKIRRAFVAEEGWRLVALDYSQIELRVLAHLSGDENLIRVFQEGKDIHTQTASWMFGLSAEAIDPLMRRAAKTINFGVLYGMSAFRLSQELGIPKEEAQAFIQKYFQSYPKVKAWIEKTLEEGRTRGYVETLFGRRRYVPDLNARVKGKREAAERMAFNMPVQGTAADLMKLAMVRLFPQLREVGARMLLQVHDELLLEAPKERAEEVAALAKEVMEGVWPLAVPLEVEVGIGEDWLAAKG

SEQ ID NO: 3629 - DNA, 2523 bp, synthetic construct
  misc_feature 1..2523: note = Variant of DNA polymerase I from Thermus sp. strain 2.9
  source 1..2523: mol_type = other DNA
atgcaccatcatcatggtcatggcggtagcggcgtgttaccggtgttcgagcctaaaggtcgcgtgcttctggttgatggccatcatctcgcgtatcgtaacttctttgccctgaaaggattaaccaccagcagcggcgagccggtacagggtgtctacggctttgcaaagtcgctcctgaaagctctgaaagaagacggtgatgtggtgattgttgtctttgatgcgaaagcgccaagttttcgccacgaagcgtacgaagcttacaaagccgggcgtgctccaacgccggaagactttcctcgccaattggcgcttatgaaggaattagtggatttgcttggcctcgaacgcttggaagttcccggtttcgaggcagacgacgtattagcgactctcgcaaagaaagccgaacgtgagggctatgaagtccagatcttgacagcagatcgcgatcttttccagcttttatctccgcgcatctcggtgttacacccggaagggcatcgtatcaccccggaatggctctgggagaaatatggtttgcgtcccgaacaatgggtggattttcgcgccttagcaggcgatccgagcgacaatattccgggagttaaaggtatcggcgagaagacggcgctcaagctccttaaagaatgggggtcgttggagaacttgcttaagaatttagatcaggtcaaaccagagtcagtgcgtgagaagattcttgctcacctcgaagacctcaaattaagccgcgaattgtcccgtgtacgcaccgatttgccgctcgaagttgatttccaacgccgccgcgaacctgactgggagggtcttaaagcgtttttagagcgtcttgaatttggttcgctcttgcatgaattcggccttttagaaagcccgttaccagccgaagaagcaccttggccaccgcccgagggcgcgtttttaggttaccgtttgagtcgcccggaaccgatgtgggccgaattactggctcttgcagcgtctgcccagggacgtgtgtatcgcgcggaagaccctcatggtgcgctccgcggcctcttcgaagtccgtggactccttgccaaagacttagctgttgttgcattgcgcgaaggtcttgatttacctccgactgatgatccaatgcttcttgcgtacctcttggacccgtcaaacacgacgcccgaaggcgtagcccgtcgttacggcggcgagtggaccgaagatgcagcgaaacgcgcgttattggccgaacgtttgcacgccaatttattaggacgtttgcaaggcgaggaacgtctcctctggctttacgaagaagtggagaaaccattgagtcgcgtgctcgcgcatatggaagctaccggtgtcaaattagacgtggcgtatttggagaatctcagccttgaagttgctgcccacatgcgccgcttggaggaagaagtattccgtttagcaggccgttcctttcgccttaattctcgcgatcagttagaacgtgtgttgttcgatgaacttggtctccctcctatcggcaagacagagaagaccggtaaacgtagcacttcagcggcggttttagaagctcttcgcgaagtccatcccattgtggacaagatcttgcaataccgcgaactcgcgaaattgaaaggcacctatattgaccgtcttccggcattagtccacccgaaaacgggacgcctccatacccgcttcaaccaaacagccacggcgaccggtcgtttgtcctcctctgatccaaaccttcagaatattccagtacgtaccccattgggccagaagatccgccgtgcgtttgtagctgaggagggttggcgtttagtggccctcgattatagccaaattgaattacgtgtccttgcccatctttctggcgatgagaacctcatccgcgtgtttcaggaaggcaaagacattcacactcaaacggcaagctggatgtttggattatcagctgaagcgatcgatcctttgatgcgtcgtgcagcgaagaccatcaatttcggtgttctctacggtatgagtgcctttcgtttgtcgcaggaattaggcattccctatgaagaagctcaggcgttcattcagaaatactttcaaagctatcccaaagttaaagcatggatcgagaagactctcgaagaaggccgcacacgtggttacgtagagaccttatttggacgtcgccgctatgttcccgatttaaacgctcgcgtgaaaggcaagcgtgaagccgccgaacgcatggcgttcaacatgcctgtacagggcacggcagctgacctcatgaaacttgcaatggtgcgcctttttccacaattgcgtgaagttggtgcccgcatgctcttgcaggtccacgatgaactcttgttagaagcgccaaaagagcgtgcggaagaggtggcagccctcgcgaaagaagttatggaaggcgtgtggcccttagcggtgcctcttgaagtcgaagttggtattggcgaggattggctggctgccaaagga

SEQ ID NO: 3630 - protein, 841 aa, synthetic construct; identical to SEQ ID NO: 3382
  REGION 1..841: note = Variant of DNA polymerase I from Thermus sp. strain 2.9

SEQ ID NO: 3631 - DNA, 2523 bp, synthetic construct
  misc_feature 1..2523: note = Variant of DNA polymerase I from Thermus sp. strain 2.9
  source 1..2523: mol_type = other DNA
atgcaccatcatcatcatcatggcggtagcggcgtgttaccggtgttcgagcctaaaggtcgcgtgcttctggttgatggccatcatctcgcgtatcgtaacttctttgccctgaaaggattaaccaccagcagcggcgagccggtacagggtgtctacggctttgcaaagtcgctcctgaaagctctgaaagaagacggtgatgtggtgattgttgtctttgatgcgaaagcgccaagttttcgccacgaagcgtacgaagcttacaaagccgggcgtgctccaacgccggaagactttcctcgccaattggcgcttatgaaggaattagtggatttgcttggcctcgaacgcttggaagttcccggtttcgaggcagacgacgtattagcgactctcgcaaagaaagccgaacgtgagggctatgaagtccagatcttgacagcagatcgcgatcttttccagcttttatctccgcgcatctcggtgttacacccggaagggcatcgtatcaccccggaatggctctgggagaaatatggtttgcgtcccgaacaatgggtggattttcgcgccttagcaggcgatccgagcgacaatattccgggagttaaaggtatcggcgagaagacggcgctcaagctccttaaagaatgggggtcgttggagaacttgcttaagaatttagatcaggtcaaaccagagtcagtgcgtgagaagattcttgctcacctcgaagacctcaaattaagccgcgaattgtcccgtgtacgcaccgatttgccgctcgaagttgatttccaacgccgccgcgaacctgactgggagggtcttaaagcgtttttagagcgtcttgaatttggttcgctcttgcatgaattcggccttttagaaagcccgttaccagccgaagaagcaccttggccaccgcccgagggcgcgtttttaggttaccgtttgagtcgcccggaaccgatgtgggccgaattactggctcttgcagcgtctgcccagggacgtgtgtatcgcgcggaagaccctcatggtgcgctccgcggcctcttcgaagtccgtggactccttgccaaagacttagctgttgttgcattgcgcgaaggtcttgatttacctccgactgatgatccaatgcttcttgcgtacctcttggacccgtcaaacgggacgcccgaaggcgtagcccgtcgttacggcggcgagtggaccgaagatgcagcgaaacgcgcgttattggccgaacgtttgcacgccaatttattaggacgtttgcaaggcgaggaacgtctcctctggctttacgaagaagtggagaaaccattgagtcgcgtgctcgcgcatatggaagctaccggtgtcaaattagacgtggcgtatttggagaatctcagccttgaagttgctgcccacatgcgccgcttggaggaagaagtattccgtttagcaggccgttcctttcgccttaattctcgcgatcagttagaacgtgtgttgttcgatgaacttggtctccctcctatcggcaagacagagaagaccggtaaacgtagcacttcagcggcggttttagaagctcttcgcgaagtccatcccattgtggacaagatcttgcaataccgcgaactcgcgaaattgaaaggcacctatattgaccgtcttccggcattagtccacccgaaaacgggacgcctccatacccgcttcaaccaaacagccacggcgaccggtcgtttgtcctcctctgatccaaaccttcagaatattccagtacgtaccccattgggccagaagatccgccgtgcgtttgtagctgaggagggttggcgtttagtggccctcgattatagccaaattgaattacgtgtccttgcccatctttctggcgatgagaacctcatccgcgtgtttcaggaaggcaaagacattcacactcaaacggcaagctggatgtttggattatcagctgaagcgatcgatcctttgatgcgtcgtgcagcgaagaccatcaatttcggtgttctctacggtatgagtgcctttcgtttgtcgcaggaattaggcattccctatgaagaagctcaggcgttcattcagaaatactttcaaagctatcccaaagttaaagcatggatcgagaagactctcgaagaaggccgcacacgtggttacgtagagaccttatttggacgtcgccgctatgttcccgatttaaacgctcgcgtgaaaggcaagcgtgaagccgccgaacgcatggcgttcaacatgcctgtacagggcacggcagctgacctcatgaaacttgcaatggtgcgcctttttccacaattgcgtgaagttggtgcccgcatgctcttgcaggtccacgatgaactcttgttagaagcgccaaaagagcgtgcggaagaggtggcagccctcgcgaaagaagttatggaaggcgtgtggcccttagcggtgcctcttgaagtcgaagttggtattggcgaggattggctggctgccaaagga

SEQ ID NO: 3632 - protein, 841 aa, synthetic construct
  REGION 1..841: note = Variant of DNA polymerase I from Thermus sp. strain 2.9
MHHHHHHGGSGVLPVFEPKGRVLLVDGHHLAYRNFFALKGLTTSSGEPVQGVYGFAKSLLKALKEDGDVVIVVFDAKAPSFRHEAYEAYKAGRAPTPEDFPRQLALMKELVDLLGLERLEVPGFEADDVLATLAKKAEREGYEVQILTADRDLFQLLSPRISVLHPEGHRITPEWLWEKYGLRPEQWVDFRALAGDPSDNIPGVKGIGEKTALKLLKEWGSLENLLKNLDQVKPESVREKILAHLEDLKLSRELSRVRTDLPLEVDFQRRREPDWEGLKAFLERLEFGSLLHEFGLLESPLPAEEAPWPPPEGAFLGYRLSRPEPMWAELLALAASAQGRVYRAEDPHGALRGLFEVRGLLAKDLAVVALREGLDLPPTDDPMLLAYLLDPSNGTPEGVARRYGGEWTEDAAKRALLAERLHANLLGRLQGEERLLWLYEEVEKPLSRVLAHMEATGVKLDVAYLENLSLEVAAHMRRLEEEVFRLAGRSFRLNSRDQLERVLFDELGLPPIGKTEKTGKRSTSAAVLEALREVHPIVDKILQYRELAKLKGTYIDRLPALVHPKTGRLHTRFNQTATATGRLSSSDPNLQNIPVRTPLGQKIRRAFVAEEGWRLVALDYSQIELRVLAHLSGDENLIRVFQEGKDIHTQTASWMFGLSAEAIDPLMRRAAKTINFGVLYGMSAFRLSQELGIPYEEAQAFIQKYFQSYPKVKAWIEKTLEEGRTRGYVETLFGRRRYVPDLNARVKGKREAAERMAFNMPVQGTAADLMKLAMVRLFPQLREVGARMLLQVHDELLLEAPKERAEEVAALAKEVMEGVWPLAVPLEVEVGIGEDWLAAKG

SEQ ID NO: 3633 - DNA, 2523 bp, synthetic construct
  misc_feature 1..2523: note = Variant of DNA polymerase I from Thermus sp. strain 2.9
  source 1..2523: mol_type = other DNA
atgcaccatcatcatcatcatggcggtagcggcgtgttagaggtgttcgagcctaaaggtcgcgtgcttctggttgatggccatcatctcgcgtatcgtaacttctttgccctgaaaggattaaccaccagcagcggcgagccggtacagggtgtctacggctttgcaaagtcgctcctgaaagctctgaaagaagacggtgatgtggtgattgttgtctttgatgcgaaagcgccaagttttcgccacgaagcgtacgaagcttacaaagccgggcgtgctccaacgccggaagactttcctcgccaattggcgcttatgaaggaattagtggatttgcttggcctcgaacgcttggaagttcccggtttcgaggcagacgacgtattagcgactctcgcaaagaaagccgaacgtgagggctatgaagtccagatcttgacagcagatcgcgatcttttccagcttttatctccgcgcatctcggtgttacacccggatgggcatcgtatcaccccggaatggctctgggagaaatatggtttgcgtcccgaacaatgggtggattttcgcgccttagcaggcgatccgagcgacaatattccgggagttaaaggtatcggcgagaagacggcgctcaagctccttaaagaatgggggtcgttggagaacttgcttaagaatttagatcaggtcaaaccagagtcagtgcgtgagaagattcttgctcacctcgaagacctcaagttaagccgcgaattgtcccgtgtacgcaccgatttgccgctcgaagttgatttccaacgccgccgcgaacctgactgggagggtcttaaagcgtttttagagcgtcttgaatttggttcgctcttgcatgaattcggccttttagaaagcccgttaccagccgaagaagcaccttggccaccgcccgagggcgcgtttttaggttaccgtttgagtcgcccggaaccgatgtgggccgaattactggctcttgcagcgtctgcccagggacgtgtgtatcgcgcggaagaccctcatggtgcgctccgcggcctcttcgaagtccgtggactccttgccaaagacttagctgttgttgcattgcgcgaaggtcttgatttacctccgactgatgatccaatgcttcttgcgtacctcttggacccgtcaaacacgacgcccgaaggcgtagcccgtcgttacggcggcgagtggaccgaagatgcagcgaaacgcgcgttattggccgaacgtttgcacgccaatttattaggacgtttgcaaggcgaggaacgtctcctctggctttacgaagaagtggagaaaccattgagtcgcgtgctcgcgcatatggaagctaccggtgtcaaattagacgtggcgtatttggagaatctcagccttgaagttgctgcccacatgcgccgcttggaggaagaagtattccgtttagcaggccgttcctttcgccttaattctcgcgatcagttagaacgtgtgttgttcgatgaacttggtctccctcctatcggcaagacagagaagaccggtaaacgtagcacttcagcggcggttttagaagctcttcgcgaagtccatcccattgtggacaagatcttgcaataccgcgaactcgcgaaattgaaaggcacctatattgaccgtcttccggcattagtccacccgaaaacgggacgcctccatacccgcttcaaccaaacagccacggcgaccggtcgtttgtcctcctctgatccaaaccttcagaatattccagtacgtaccccattgggccagaagatccgccgtgcgtttgtagctgaggagggttggcgtttagtggccctcgattatagccaaattgaattacgtgtccttgcccatctttctggcgatgagaacctcatccgcgtgtttgaggaaggcaaagacattcacactcaaacggcaagctggatgtttggattatcagctgaagcgatcgatcctttgatgcgtcgtgcagcgaagaccatcaatttcggtgttctctacggtatgagtgcctttcgtttgtcgcaggaattaggcattccctatgaagaagctcaggcgttcattcagaaatactttcaaagctatcccaaagttaaagcatggatcgagaagactctcgaagaaggccgcacccgtggttacgtagagaccttatttggacgtcgccgctatgttcccgatttaaacgctcgcgtgaaaggcaagcgtgaagccgccgaacgcatggcgttcaacatgcctgtacagggcacggcagctgacctcatgaaacttgcaatggtgcgcctttttccacaattgcgtgaagttggtgcccgcatgctcttgcaggtccacgatgaactcttgttagaagcgccaaaagagcgtgcggaagaggtggcagccctcgcgaaagaagttatggaaggcgtgtggcccttagcggtgcctcttgaagtcgaagttggtattggcgaggattggctggctgccaaagga

SEQ ID NO: 3634 - protein, 841 aa, synthetic construct
  REGION 1..841: note = Variant of DNA polymerase I from Thermus sp. strain 2.9
MHHHHHHGGSGVLEVFEPKGRVLLVDGHHLAYRNFFALKGLTTSSGEPVQGVYGFAKSLLKALKEDGDVVIVVFDAKAPSFRHEAYEAYKAGRAPTPEDFPRQLALMKELVDLLGLERLEVPGFEADDVLATLAKKAEREGYEVQILTADRDLFQLLSPRISVLHPDGHRITPEWLWEKYGLRPEQWVDFRALAGDPSDNIPGVKGIGEKTALKLLKEWGSLENLLKNLDQVKPESVREKILAHLEDLKLSRELSRVRTDLPLEVDFQRRREPDWEGLKAFLERLEFGSLLHEFGLLESPLPAEEAPWPPPEGAFLGYRLSRPEPMWAELLALAASAQGRVYRAEDPHGALRGLFEVRGLLAKDLAVVALREGLDLPPTDDPMLLAYLLDPSNTTPEGVARRYGGEWTEDAAKRALLAERLHANLLGRLQGEERLLWLYEEVEKPLSRVLAHMEATGVKLDVAYLENLSLEVAAHMRRLEEEVFRLAGRSFRLNSRDQLERVLFDELGLPPIGKTEKTGKRSTSAAVLEALREVHPIVDKILQYRELAKLKGTYIDRLPALVHPKTGRLHTRFNQTATATGRLSSSDPNLQNIPVRTPLGQKIRRAFVAEEGWRLVALDYSQIELRVLAHLSGDENLIRVFEEGKDIHTQTASWMFGLSAEAIDPLMRRAAKTINFGVLYGMSAFRLSQELGIPYEEAQAFIQKYFQSYPKVKAWIEKTLEEGRTRGYVETLFGRRRYVPDLNARVKGKREAAERMAFNMPVQGTAADLMKLAMVRLFPQLREVGARMLLQVHDELLLEAPKERAEEVAALAKEVMEGVWPLAVPLEVEVGIGEDWLAAKG

SEQ ID NO: 3635 - DNA, 2523 bp, synthetic construct
  misc_feature 1..2523: note = Variant of DNA polymerase I from Thermus sp. strain 2.9
  source 1..2523: mol_type = other DNA
atgcaccatcatcatcatcatggcggtagcggcgtgttaccggtgttcgagcctaaaggtcgcgtgcttctggttgatggccatcatctcgcgtatcgtaacttctttgccctgaaaggattaaccaccagcagcggcgagccggtacagggtgtctacggctttgcaaagtcgctcctgaaagctctgaaagaagacggtgatgtggtgattgttgtctttgatgcgaaagcgccaagttttcgccacgaagcgtacgaagcttacaaagccgggcgtgctccaacgccggaagactttcctcgccaattggcgcttatgaaggaattagtggatttgcttggcctcgaacgcttggaagttcccggtttcgaggcagacgacgtattagcgactctcgcaaagaaagccgaacgtgagggctatgaagtccagatcttgacagcagatcgcgatcttttccagcttttatctccgcgcatctcggtgttacacccggaagggcatcgtatcaccccggaatggctctgggagaaatatggtttgcgtcccgaacaatgggtggattttcgcgccttagcaggcgatccgagcgacaatattccgggagttaaaggtatcggcgagaagacggcgctcaagctccttaaagaatgggggtcgttggagaacttgcttaagaatttagatcaggtcaaaccagagtcagtgcgtgagaagattcttgctcacctcgaagacctcaaattaagccgcgaattgtcccgtgtacgcaccgatttgccgctcgaagttgatttccaacgccgccgcgaacctgactgggagggtcttaaagcgtttttagagcgtcttgaatttggttcgctcttgcatgaattcggccttttagaaagcccgttaccagccgaagaagcaccttggccaccgcccgagggcgcgtttttaggttaccgtttgagtcgcccggaaccgatgtgggccgaattactggctcttgcagcgtctgcccagggacgtgtgtatcgcgcggaagaccctcatggtgcgctccgcggcctcttcgaagtccgtggactccttgccaaagacttagctgttgttgcattgcgcgaaggtcttgatttacctccgactgatgatccaatgcttcttgcgtacctcttggacccgtcaaacacgacgcccgaaggcgtagcccgtcgttacggcggcgagtggaccgaagatgcagcgaaacgcgcgttattggccgaacgtttgcacgccaatttattaggacgtttgcaaggcgaggaacgtctcctctggctttacgaagaagtggagaaaccattgagtcgcgtgctcgcgcatatggaagctaccggtgtcaaattagacgtggcgtatttggagaatctcagccttgaagttgctgcccacatgcgccgcttggaggaagaagtattccgtttagcaggccgttcctttcgccttaattctcgcgatcagttagaacgtgtgttgttcgatgaacttggtctccctcctatcggcaagacagagaagaccggtaaacgtagcacttcagcggcggttttagaagctcttcgcgaagtccatcccattgtggacaagatcttgcaataccgcgaactcgcgaaattgaaaggcacctatattgaccgtcttccggcattagtccacccgaaaacgggacgcctccatacccgcttcaaccaaacagccacggcgaccggtcgtttgtcctcctctgatccaaaccttcagaatattccagtacgtaccccattgggccagaagatccgccgtgcgtttgtagctgaggagggttggcgtttagtggccctcgattatagccaaattgaattacgtgtccttgcccatctttctggcgatgagaacctcatccgcgtgtttcaggaaggcaaagacattcacactcaaacggcaagctggatgtttggattatcagctgaagcgatcgatcctttgatgcgtcgtgcagcgaagaccatcaatttcggtgttctctacggtatgagtgcctttcgtttgtcgcaggaattaggcattccctatgaagaagctcaggcgttcattcagaaatactttcaaagctatcccaaagttaaagcatggatcgagaagactctcgaagaaggccgcacacgtggttacgtagagaccttatttggacgtcgccgctatgttcccgatttaaacgctcgcgtgaaaggcaagcgtgaagccgccgaacgcatggcgttcaacatgcctgtacagggcacggcagctgacctcatgaaacttgcaatggtgcgcctttttccacaattgcgtgaagttggtgcccgcatgctcttgcaggtccacgatgaactcttgttagaagcgccaaaagagcgtgcggaagaggtggcagccctcgcgaaagaagttatggaatctgtgtggcccttagcggtgcctcttgaagtcgaagttggtattggcgaggattggctggctgccaaagga

SEQ ID NO: 3636 - protein, 841 aa, synthetic construct
  REGION 1..841: note = Variant of DNA polymerase I from Thermus sp. strain 2.9
MHHHHHHGGSGVLPVFEPKGRVLLVDGHHLAYRNFFALKGLTTSSGEPVQGVYGFAKSLLKALKEDGDVVIVVFDAKAPSFRHEAYEAYKAGRAPTPEDFPRQLALMKELVDLLGLERLEVPGFEADDVLATLAKKAEREGYEVQILTADRDLFQLLSPRISVLHPEGHRITPEWLWEKYGLRPEQWVDFRALAGDPSDNIPGVKGIGEKTALKLLKEWGSLENLLKNLDQVKPESVREKILAHLEDLKLSRELSRVRTDLPLEVDFQRRREPDWEGLKAFLERLEFGSLLHEFGLLESPLPAEEAPWPPPEGAFLGYRLSRPEPMWAELLALAASAQGRVYRAEDPHGALRGLFEVRGLLAKDLAVVALREGLDLPPTDDPMLLAYLLDPSNTTPEGVARRYGGEWTEDAAKRALLAERLHANLLGRLQGEERLLWLYEEVEKPLSRVLAHMEATGVKLDVAYLENLSLEVAAHMRRLEEEVFRLAGRSFRLNSRDQLERVLFDELGLPPIGKTEKTGKRSTSAAVLEALREVHPIVDKILQYRELAKLKGTYIDRLPALVHPKTGRLHTRFNQTATATGRLSSSDPNLQNIPVRTPLGQKIRRAFVAEEGWRLVALDYSQIELRVLAHLSGDENLIRVFQEGKDIHTQTASWMFGLSAEAIDPLMRRAAKTINFGVLYGMSAFRLSQELGIPYEEAQAFIQKYFQSYPKVKAWIEKTLEEGRTRGYVETLFGRRRYVPDLNARVKGKREAAERMAFNMPVQGTAADLMKLAMVRLFPQLREVGARMLLQVHDELLLEAPKERAEEVAALAKEVMESVWPLAVPLEVEVGIGEDWLAAKG

SEQ ID NO: 3637 - DNA, 2523 bp, synthetic construct
  misc_feature 1..2523: note = Variant of DNA polymerase I from Thermus sp. strain 2.9
  source 1..2523: mol_type = other DNA
atgcaccatcatcatcatcatggcggtagcggcgtgttaccggtgttcgagcctaaaggtcgcgtgcttctggttgatggccatcatctcgcgtatcgtaacttctttgccctgaaaggattaaccaccagcagcggcgagccggtacagggtgtctacggctttgcaaagtcgctcctgaaagctctgaaagaagacggtgatgtggtgattgttgtctttgatgcgaaagcgccaagttttcgccacgaagcgtacgaagcttacaaagccgggcgtgctccaacgccggaagactttcctcgccaattggcgcttatgaaggaattagtggatttgcttggcctcgaacgcttggaagttcccggtttcgaggcagacgacgtattagcgactctcgcaaagaaagccgaacgtgagggctatgaagtccagatcttgacagcagatcgcgatcttttccagcttttatctccgcgcatctcggtgttacacccggaagggcatcgtatcaccccggaatggctctgggagaaatatggtttgcgtcccgaacaatgggtggattttcgcgccttagcaggcgatccgagcgacaatattccgggagttaaaggtatcggcgagaagacggcgctcaagctccttaaagaatgggggtcgttggagaacttgcttaagaatttagatcaggtcaaaccagagtcagtgcgtgagaagattcttgctcacctcgaagacctcaaattaagccgcgaattgtcccgtgtacgcaccgatttgccgctcgaagttgatttccaacgccgccgcgaacctgactgggagggtcttaaagcgtttttagagcgtcttgaatttggttcgctcttgcatgaattcggccttttagaaagcccgttaccagccgaagaagcaccttggccaccgcccgagggcgcgtttttaggttaccgtttgagtcgcccggaaccgatgtgggccgaattactggctcttgcagcgtctgcccagggacgtgtgtatcgcgcggaagaccctcatggtgcgctccgcggcctcttcgaagtccgtggactccttgccaaagacttagctgttgttgcattgcgcgaaggtcttgatttacctccgactgatgatccaatgcttcttgcgtacctcttggacccgtcaaacacgacgcccgaaggcgtagcccgtcgttactcgggcgagtggaccgaagatgcagcgaaacgcgcgttattggccgaacgtttgcacgccaatttattaggacgtttgcaaggcgaggaacgtctcctctggctttacgaagaagtggagaaaccattgagtcgcgtgctcgcgcatatggaagctaccggtgtcaaattagacgtggcgtatttggagaatctcagccttgaagttgctgcccacatgcgccgcttggaggaagaagtattccgtttagcaggccgttcctttcgccttaattctcgcgatcagttagaacgtgtgttgttcgatgaacttggtctccctcctatcggcaagacagagaagaccggtaaacgtagcacttcagcggcggttttagaagctcttcgcgaagtccatcccattgtggacaagatcttgcaataccgcgaactcgcgaaattgaaaggcacctatattgaccgtcttccggcattagtccacccgaaaacgggacgcctccatacccgcttcaaccaaacagccacggcgaccggtcgtttgtcctcctctgatccaaaccttcagaatattccagtacgtaccccattgggccagaagatccgccgtgcgtttgtagctgaggagggttggcgtttagtggccctcgattatagccaaattgaattacgtgtccttgcccatctttctggcgatgagaacctcatccgcgtgtttcaggaaggcaaagacattcacactcaaacggcaagctggatgtttggattatcagctgaagcgatcgatcctttgatgcgtcgtgcagcgaagaccatcaatttcggtgttctctacggtatgagtgcctttcgtttgtcgcaggaattaggcattccctatgaagaagctcaggcgttcattcagaaatactttcaaagctatcccaaagttaaagcatggatcgagaagactctcgaagaaggccgcacacgtggttacgtagagaccttatttggacgtcgccgctatgttcccgatttaaacgctcgcgtgaaaggcaagcgtgaagccgccgaacgcatggcgttcaacatgcctgtacagggcacggcagctgacctcatgaaacttgcaatggtgcgcctttttccacaattgcgtgaagttggtgcccgcatgctcttgcaggtccacgatgaactcttgttagaagcgccaaaagagcgtgcggaagaggtggcagccctcgcgaaagaagttatggaaggcgtgtggcccttagcggtgcctcttgaagtcgaagttggtattggcgaggattggctggctgccaaagga

SEQ ID NO: 3638 - protein, 841 aa, synthetic construct
  REGION 1..841: note = Variant of DNA polymerase I from Thermus sp. strain 2.9
MHHHHHHGGSGVLPVFEPKGRVLLVDGHHLAYRNFFALKGLTTSSGEPVQGVYGFAKSLLKALKEDGDVVIVVFDAKAPSFRHEAYEAYKAGRAPTPEDFPRQLALMKELVDLLGLERLEVPGFEADDVLATLAKKAEREGYEVQILTADRDLFQLLSPRISVLHPEGHRITPEWLWEKYGLRPEQWVDFRALAGDPSDNIPGVKGIGEKTALKLLKEWGSLENLLKNLDQVKPESVREKILAHLEDLKLSRELSRVRTDLPLEVDFQRRREPDWEGLKAFLERLEFGSLLHEFGLLESPLPAEEAPWPPPEGAFLGYRLSRPEPMWAELLALAASAQGRVYRAEDPHGALRGLFEVRGLLAKDLAVVALREGLDLPPTDDPMLLAYLLDPSNTTPEGVARRYSGEWTEDAAKRALLAERLHANLLGRLQGEERLLWLYEEVEKPLSRVLAHMEATGVKLDVAYLENLSLEVAAHMRRLEEEVFRLAGRSFRLNSRDQLERVLFDELGLPPIGKTEKTGKRSTSAAVLEALREVHPIVDKILQYRELAKLKGTYIDRLPALVHPKTGRLHTRFNQTATATGRLSSSDPNLQNIPVRTPLGQKIRRAFVAEEGWRLVALDYSQIELRVLAHLSGDENLIRVFQEGKDIHTQTASWMFGLSAEAIDPLMRRAAKTINFGVLYGMSAFRLSQELGIPYEEAQAFIQKYFQSYPKVKAWIEKTLEEGRTRGYVETLFGRRRYVPDLNARVKGKREAAERMAFNMPVQGTAADLMKLAMVRLFPQLREVGARMLLQVHDELLLEAPKERAEEVAALAKEVMEGVWPLAVPLEVEVGIGEDWLAAKG

SEQ ID NO: 3639 - DNA, 2523 bp, synthetic construct
  misc_feature 1..2523: note = Variant of DNA polymerase I from Thermus sp. strain 2.9
  source 1..2523: mol_type = other DNA
atgcaccatcatcatcatcatggcggtagcggcgtgttaccggtgttcgagcctaaaggtcgcgtgcttctggttgatggccatcatctcgcgtatcgtaacttctttgccctgaaaggattaaccaccagcagcggcgagccggtacagggtgtctacggctttgcaaagtcgctcctgaaagctctgaaagaagacggtgatgtggtgattgttgtctttgatgcgaaagcgccaagttttcgccacgaagcgtacgaagcttacaaagccgggcgtgctccaacgccggaagactttcctcgccaattggcgcttatgaaggaattagtggatttgcttggcctcgaacgcttggaagttcccggtttcgaggcagacgacgtattagcgactctcgcaaagaaagccgaacgtgagggctatgaagtccagatcttgacagcagatcgcgatcttttccagcttttatctccgcgcatctcggtgttacacccggaagggcatcgtatcaccccggaatggctcagggagaaatatggtttgcgtcccgaacaatgggtggattttcgcgccttagcaggcgatccgagcgacaatattccgggagttaaaggtatcggcgagaagacggcgctcaagctccttaaagaatgggggtcgttggagaacttgcttaagaatttagatcaggtcaaaccagagtcagtgcgtgagaagattcttgctcacctcgaagacctcaaattaagccgcgaattgtcccgtgtacgcaccgatttgccgctcgaagttgatttccaacgccgccgcgaacctgactgggagggtcttaaagcgtttttagagcgtcttgaatttggttcgctcttgcatgaattcggccttttagaaagcccgttaccagccgaagaagcaccttggccaccgcccgagggcgcgtttttaggttaccgtttgagtcgcccggaaccgatgtgggccgaattactggctcttgcagcgtctgcccagggacgtgtgtatcgcgcggaagaccctcatggtgcgctccgcggcctcttcgaagtccgtggactccttgccaaagacttagctgttgttgcattgcgcgaaggtcttgatttacctccgactgatgatccaatgcttcttgcgtacctcttggacccgtcaaacacgacgcccgaaggcgtagcccgtcgttacggcggcgagtggaccgaagatgcagcgaaacgcgcgttattggccgaacgtttgcacgccaatttattaggacgtttgcaaggcgaggaacgtctcctctggctttacgaagaagtggagaaaccattgagtcgcgtgctcgcgcatatggaagctaccggtgtcaaattagacgtggcgtatttggagaatctcagccttgaagttgctgcccacatgcgccgcttggaggaagaagtattccgtttagcaggccgttcctttcgccttaattctcgcgatcagttagaacgtgtgttgttcgatgaacttggtctccctcctatcggcaagacagagaagaccggtaaacgtagcacttcagcggcggttttagaagctcttcgcgaagtccatcccattgtggacaagatcttgcaataccgcgaactcgcgaaattgaaaggcacctatattgaccgtcttccggcattagtccacccgaaaacgggacgcctccatacccgcttcaaccaaacagccacggcgaccggtcgtttgtcctcctctgatccaaaccttcagaatattccagtacgtaccccattgggccagaagatccgccgtgcgtttgtagctgaggagggttggcgtttagtggccctcgattatagccaaattgaattacgtgtccttgcccatctttctggcgatgagaacctcatccgcgtgtttcaggaaggcaaagacattcacactcaaacggcaagctggatgtttggattatcagctgaagcgatcgatcctttgatgcgtcgtgcagcgaagaccatcaatttcggtgttctctacggtatgagtgcctttcgtttgtcgcaggaattaggcattccctatgaagaagctcaggcgttcattcagaaatactttcaaagctatcccaaagttaaagcatggatcgagaagactctcgaagaaggccgcacacgtggttacgtagagaccttatttggacgtcgccgctatgttcccgatttaaacgctcgcgtgaaaggcaagcgtgaagccgccgaacgcatggcgttcaacatgcctgtacagggcacggcagctgacctcatgaaacttgcaatggtgcgcctttttccacaattgcgtgaagttggtgcccgcatgctcttgcaggtccacgatgaactcttgttagaagcgccaaaagagcgtgcggaagaggtggcagccctcgcgaaagaagttatggaaggcgtgtggcccttagcggtgcctcttgaagtcgaagttggtattggcgaggattggctggctgccaaagga

SEQ ID NO: 3640 - protein, 841 aa, synthetic construct
  REGION 1..841: note = Variant of DNA polymerase I from Thermus sp. strain 2.9
MHHHHHHGGSGVLPVFEPKGRVLLVDGHHLAYRNFFALKGLTTSSGEPVQGVYGFAKSLLKALKEDGDVVIVVFDAKAPSFRHEAYEAYKAGRAPTPEDFPRQLALMKELVDLLGLERLEVPGFEADDVLATLAKKAEREGYEVQILTADRDLFQLLSPRISVLHPEGHRITPEWLREKYGLRPEQWVDFRALAGDPSDNIPGVKGIGEKTALKLLKEWGSLENLLKNLDQVKPESVREKILAHLEDLKLSRELSRVRTDLPLEVDFQRRREPDWEGLKAFLERLEFGSLLHEFGLLESPLPAEEAPWPPPEGAFLGYRLSRPEPMWAELLALAASAQGRVYRAEDPHGALRGLFEVRGLLAKDLAVVALREGLDLPPTDDPMLLAYLLDPSNTTPEGVARRYGGEWTEDAAKRALLAERLHANLLGRLQGEERLLWLYEEVEKPLSRVLAHMEATGVKLDVAYLENLSLEVAAHMRRLEEEVFRLAGRSFRLNSRDQLERVLFDELGLPPIGKTEKTGKRSTSAAVLEALREVHPIVDKILQYRELAKLKGTYIDRLPALVHPKTGRLHTRFNQTATATGRLSSSDPNLQNIPVRTPLGQKIRRAFVAEEGWRLVALDYSQIELRVLAHLSGDENLIRVFQEGKDIHTQTASWMFGLSAEAIDPLMRRAAKTINFGVLYGMSAFRLSQELGIPYEEAQAFIQKYFQSYPKVKAWIEKTLEEGRTRGYVETLFGRRRYVPDLNARVKGKREAAERMAFNMPVQGTAADLMKLAMVRLFPQLREVGARMLLQVHDELLLEAPKERAEEVAALAKEVMEGVWPLAVPLEVEVGIGEDWLAAKG

SEQ ID NO: 3641 - DNA, 2523 bp, synthetic construct
  misc_feature 1..2523: note = Variant of DNA polymerase I from Thermus sp. strain 2.9
  source 1..2523: mol_type = other DNA
atgcaccatcatcatcatcatggcggtagcggcgtgttaccggtgttcgagcctaaaggtcgcgtgcttctggttgatggccattggctcgcgtatcgtaacttctttgccctgaaaggattaaccaccagcagcggcgagccggtacagggtgtctacggctttgcaaagtcgctcctgaaagctctgaaagaagacggtgatgtggtgattgttgtctttgatgcgaaagcgccaagttttcgccacgaagcgtacgaagcttacaaagccgggcgtgctccaacgccggaagactttcctcgccaattggcgcttatgaaggaattagtggatttgcttggcctcgaacgcttggaagttcccggtttcgaggcagacgacgtattagcgactctcgcaaagaaagccgaacgtgagggctatgaagtccagatcttgacagcagatcgcgatcttttccagcttttatctccgcgcatctcggtgttacacccggaagggcatcgtatcaccccggaatggctctgggagaaatatggtttgcgtcccgaacaatgggtggattttcgcgccttagcaggcgatccgagcgacaatattccgggagttaaaggtatcggcgagaagacggcgctcaagctccttaaagaatgggggtcgttggagaacttgcttaagaatttagatcaggtcaaaccagagtcagtgcgtgagaagattcttgctcacctcgaagacctcaaattaagccgcgaattgtcccgtgtacgcaccgatttgccgctcgaagttgatttccaacgccgccgcgaacctgactgggagggtcttaaagcgtttttagagcgtcttgaatttggttcgctcttgcatgaattcggccttttagaaagcccgttaccagccgaagaagcaccttggccaccgcccgagggcgcgtttttaggttaccgtttgagtcgcccggaaccgatgtgggccgaattactggctcttgcagcgtctgcccagggacgtgtgtatcgcgcggaagaccctcatggtgcgctccgcggcctcttcgaagtccgtggactccttgccaaagacttagctgttgttgcattgcgcgaaggtcttgatttacctccgactgatgatccaatgcttcttgcgtacctcttggacccgtcaaacacgacgcccgaaggcgtagcccgtcgttacggcggcgagtggaccgaagatgcagcgaaacgcgcgttattggccgaacgtttgcacgccaatttattaggacgtttgcaaggcgaggaacgtctcctctggctttacgaagaagtggagaaaccattgagtcgcgtgctcgcgcatatggaagctaccggtgtcaaattagacgtggcgtatttggagaatctcagccttgaagttgctgcccacatgcgccgcttggaggaagaagtattccgtttagcaggccgttcctttcgccttaattctcgcgatcagttagaacgtgtgttgttcgatgaacttggtctccctcctatcggcaagacagagaagaccggtaaacgtagcacttcagcggcggttttagaagctcttcgcgaagtccatcccattgtggacaagatcttgcaataccgcgaactcgcgaaattgaaaggcacctatattgaccgtcttccggcattagtccacccgaaaacgggacgcctccatacccgcttcaaccaaacagccacggcgaccggtcgtttgtcctcctctgatccaaaccttcagaatattccagtacgtaccccattgggccagaagatccgccgtgcgtttgtagctgaggagggttggcgtttagtggccctcgattatagccaaattgaattacgtgtccttgcccatctttctggcgatgagaacctcatccgcgtgtttcaggaaggcaaagacattcacactcaaacggcaagctggatgtttggattatcagctgaagcgatcgatcctttgatgcgtcgtgcagcgaagaccatcaatttcggtgttctctacggtatgagtgcctttcgtttgtcgcaggaattaggcattccctatgaagaagctcaggcgttcattcagaaatactttcaaagctatcccaaagttaaagcatggatcgagaagactctcgaagaaggccgcacacgtggttacgtagagaccttatttggacgtcgccgctatgttcccgatttaaacgctcgcgtgaaaggcaagcgtgaagccgccgaacgcatggcgttcaacatgcctgtacagggcacggcagctgacctcatgaaacttgcaatggtgcgcctttttccacaattgcgtgaagttggtgcccgcatgctcttgcaggtccacgatgaactcttgttagaagcgccaaaagagcgtgcggaagaggtggcagccctcgcgaaagaagttatggaaggcgtgtggcccttagcggtgcctcttgaagtcgaagttggtattggcgaggattggctggctgccaaagga

SEQ ID NO: 3642 - protein, 841 aa, synthetic construct
  REGION 1..841: note = Variant of DNA polymerase I from Thermus sp. strain 2.9
MHHHHHHGGSGVLPVFEPKGRVLLVDGHWLAYRNFFALKGLTTSSGEPVQGVYGFAKSLLKALKEDGDVVIVVFDAKAPSFRHEAYEAYKAGRAPTPEDFPRQLALMKELVDLLGLERLEVPGFEADDVLATLAKKAEREGYEVQILTADRDLFQLLSPRISVLHPEGHRITPEWLWEKYGLRPEQWVDFRALAGDPSDNIPGVKGIGEKTALKLLKEWGSLENLLKNLDQVKPESVREKILAHLEDLKLSRELSRVRTDLPLEVDFQRRREPDWEGLKAFLERLEFGSLLHEFGLLESPLPAEEAPWPPPEGAFLGYRLSRPEPMWAELLALAASAQGRVYRAEDPHGALRGLFEVRGLLAKDLAVVALREGLDLPPTDDPMLLAYLLDPSNTTPEGVARRYGGEWTEDAAKRALLAERLHANLLGRLQGEERLLWLYEEVEKPLSRVLAHMEATGVKLDVAYLENLSLEVAAHMRRLEEEVFRLAGRSFRLNSRDQLERVLFDELGLPPIGKTEKTGKRSTSAAVLEALREVHPIVDKILQYRELAKLKGTYIDRLPALVHPKTGRLHTRFNQTATATGRLSSSDPNLQNIPVRTPLGQKIRRAFVAEEGWRLVALDYSQIELRVLAHLSGDENLIRVFQEGKDIHTQTASWMFGLSAEAIDPLMRRAAKTINFGVLYGMSAFRLSQELGIPYEEAQAFIQKYFQSYPKVKAWIEKTLEEGRTRGYVETLFGRRRYVPDLNARVKGKREAAERMAFNMPVQGTAADLMKLAMVRLFPQLREVGARMLLQVHDELLLEAPKERAEEVAALAKEVMEGVWPLAVPLEVEVGIGEDWLAAKG

SEQ ID NO: 3643 - DNA, 2523 bp, synthetic construct
  misc_feature 1..2523: note = Variant of DNA polymerase I from Thermus sp. strain 2.9
  source 1..2523: mol_type = other DNA
atgcaccatcatcatcatcatggcggtagcggcgtgttaccggtgttcgagcctaaaggtcgcgtgcttctggttgatggccatcatctcgcgtatcgtaacttctttgccctgaaaggattaaccaccagcagcggcgagccggtacagggtgtctacggctttgcaaagtcgctcctgaaagctctgaaagaagacggtgatgtggtgattgttgtctttgatgcgaaagcgccaagttttcgccacgaagcgtacgaagcttacaaagccgggcgtgctccaacgccggaagactttcctcgccaattggcgcttatgaaggaattagtggatttgcttggcctcgaacgcttggaagttcccggtttcgaggcagacgacgtattagcgactctcgcaaagaaagccgaacgtgagggctatgaagtccagatcttgacagcagatcgcgatcttttccagcttttatctccgcgcatctcggtgttacacccggaagggcatcgtatcaccccggaatggctctgggagaaatatggtttgcgtcccgaacaatgggtggattttcgcgccttagcaggcgatccgagcgacaatattccgggagttaaaggtatcggcgagaagacggcgctcaagctccttaaagaatgggggtcgttggagaacttgcttaagaatttagatcaggtcaaaccagagtcagtgcgtgagaagattcttgctcacctcgaagacctcaaattaagccgcgaattgtcccgtgtacgcaccgatttgccgctcgaagttgatttccaacgccgccgcgaacctgactgggagggtcttaaagcgtttttagagcgtcttgaatttggttcgctcttgcatgaattcggccttttagaaagcccgttaccagccgaagaagcaccttggccaccgcccgagggcgcgtttttaggttaccgtttgagtcgcccggaaccgatgtgggccgaattactggctcttgcagcgtctgcccagggacgtgtgtatcgcgcggaagaccctcatggtgcgctccgcggcctcttcgaagtccgtggactccttgccaaagacttagctgttgttgcattgcgcgaaggtcttgatttacctccgactgatgatccaatgcttcttgcgtacctcttggacccgtcaaacacgacgcccgaaggcgtagcccgtcgttacggcggcgagtggaccgaagatgcagcgaaacgcgcgttattggccgaacgtttgcacgccaatttattaggacgtttgcaaggcgaggaacgtctcctctggctttacgaagaagtggagaaacctatgagtcgcgtgctcgcgcatatggaagctaccggtgtcaaattagacgtggcgtatttggagaatctcagccttgaagttgctgcccacatgcgccgcttggaggaagaagtattccgtttagcaggccgttcctttcgccttaattctcgcgatcagttagaacgtgtgttgttcgatgaacttggtctccctcctatcggcaagacagagaagaccggtaaacgtagcacttcagcggcggttttagaagctcttcgcgaagtccatcccattgtggacaagatcttgcaataccgcgaactcgcgaaattgaaaggcacctatattgaccgtcttccggcattagtccacccgaaaacgggacgcctccatacccgcttcaaccaaacagccacggcgaccggtcgtttgtcctcctctgatccaaaccttcagaatattccagtacgtaccccattgggccagaagatccgccgtgcgtttgtagctgaggagggttggcgtttagtggccctcgattatagccaaattgaattacgtgtccttgcccatctttctggcgatgagaacctcatccgcgtgtttcaggaaggcaaagacattcacactcaaacggcaagctggatgtttggattatcagctgaagcgatcgatcctttgatgcgtcgtgcagcgaagaccatcaatttcggtgttctctacggtatgagtgcctttcgtttgtcgcaggaattaggcattccctatgaagaagctcaggcgttcattcagaaatactttcaaagctatcccaaagttaaagcatggatcgagaagactctcgaagaaggccgcacacgtggttacgtagagaccttatttggacgtcgccgctatgttcccgatttaaacgctcgcgtgaaaggcaagcgtgaagccgccgaacgcatggcgttcaacatgcctgtacagggcacggcagctgacctcatgaaacttgcaatggtgcgcctttttccacaattgcgtgaagttggtgcccgcatgctcttgcaggtccacgatgaactcttgttagaagcgccaaaagagcgtgcggaagaggtggcagccatcgcgaaagaagttatggaaggcgtgtggcccttagcggtgcctcttgaagtcgaagttggtattggcgaggattggctggctgccaaagga

SEQ ID NO: 3644 - protein, 841 aa, synthetic construct
  REGION 1..841: note = Variant of DNA polymerase I from Thermus sp. strain 2.9
MHHHHHHGGSGVLPVFEPKGRVLLVDGHHLAYRNFFALKGLTTSSGEPVQGVYGFAKSLLKALKEDGDVVIVVFDAKAPSFRHEAYEAYKAGRAPTPEDFPRQLALMKELVDLLGLERLEVPGFEADDVLATLAKKAEREGYEVQILTADRDLFQLLSPRISVLHPEGHRITPEWLWEKYGLRPEQWVDFRALAGDPSDNIPGVKGIGEKTALKLLKEWGSLENLLKNLDQVKPESVREKILAHLEDLKLSRELSRVRTDLPLEVDFQRRREPDWEGLKAFLERLEFGSLLHEFGLLESPLPAEEAPWPPPEGAFLGYRLSRPEPMWAELLALAASAQGRVYRAEDPHGALRGLFEVRGLLAKDLAVVALREGLDLPPTDDPMLLAYLLDPSNTTPEGVARRYGGEWTEDAAKRALLAERLHANLLGRLQGEERLLWLYEEVEKPMSRVLAHMEATGVKLDVAYLENLSLEVAAHMRRLEEEVFRLAGRSFRLNSRDQLERVLFDELGLPPIGKTEKTGKRSTSAAVLEALREVHPIVDKILQYRELAKLKGTYIDRLPALVHPKTGRLHTRFNQTATATGRLSSSDPNLQNIPVRTPLGQKIRRAFVAEEGWRLVALDYSQIELRVLAHLSGDENLIRVFQEGKDIHTQTASWMFGLSAEAIDPLMRRAAKTINFGVLYGMSAFRLSQELGIPYEEAQAFIQKYFQSYPKVKAWIEKTLEEGRTRGYVETLFGRRRYVPDLNARVKGKREAAERMAFNMPVQGTAADLMKLAMVRLFPQLREVGARMLLQVHDELLLEAPKERAEEVAAIAKEVMEGVWPLAVPLEVEVGIGEDWLAAKG

SEQ ID NO: 3645 - DNA, 2523 bp, synthetic construct
  misc_feature 1..2523: note = Variant of DNA polymerase I from Thermus sp. strain 2.9
  source 1..2523: mol_type = other DNA
atgcaccatcatcatcatcatggcggtagcggcgtgttaccggtgttcgagcctaaaggtcgcgtgcttctggttgatggccatcatctcgcgtatcgtaacttctttgccctgaaaggattaaccaccagcagcggcgagccggtacagggtgtctacggctttgcaaagtcgctcctgaaagctctgaaagaagacggtgatgtggtgattgttgtctttgatgcgaaagcgccaagttttcgccacgaagcgtacgaagcttacaaagccgggcgtgctccaacgccggaagactttcctcgccaattggcgcttatgaaggaattagtggatttgcttggcctcgaacgcttggaagttcccggtttcgaggcagacgacgtattagcgactctcgcaaagaaagccgaacgtgagggctatgaagtccagatcttgacagcagatcgcgatcttttccagcttttatctccgcgcatctcggtgttacacccggaagggcatcgtatcaccccggaatggctctgggagaaatatggtttgcgtcccgaacaatgggtggattttcgcgccttagcaggcgatccgagcgacaatattccgggagttaaaggtatcggcgagaagacggcgctcaagctccttaaagaatgggggtcgttggagaacttgcttaagaatttagatcaggtcaaaccagagtcagtgcgtgagaagattcttgctcacctcgaagacctcaaattaagccgcgaattgtcccgtgtacgcaccgatttgccgctcgaagttgatttccaacgccgccgcgaacctgactgggagggtcttaaagcgtttttagagcgtcttgaatttggttcgctcttgcatgaattcggccttttagaaagcccgttaccagccgaagaagcaccttggccaccgcccgagggcgcgtttttaggttaccgtttgagtcgcccggaaccgatgtgggccgaattactggctcttgcagcgtctgcccagggacgtgtgtatcgcgcggaagaccctcatggtgcgctccgcggcctcttcgaagtccgtggactccttgccaaagacttagctgttgttgcattgcgcgaaggtcttgatttacctccgactgatgatccaatgcttcttgcgtacctcttggacccgtcaaacacgacgcccgaaggcgtagcccgtcgttacggcggcgagtggaccgaagatgcagcgaaacgcgcgttattggccgaacgtttgcacgcaaatttattaggacgtttgcaaggcgaggaacgtctcctctggctttacgaagaagtggagaaaccattgagtcgcgtgctcgcccatatggaagctaccggtgtcaaattagacgtggcgtatttggagaatctcagccttgaagttgctgcccacatgcgccgcttggaggaagaagtattccgtttagcaggccgttcctttcgccttaattctcgcgatcagttagaacgtgtgttgttcgatgaacttggtctccctcctatcggcaagacagagaagaccggtaaacgtagcacttcagcggcggttttagaagctcttcgcgaagtccatcccattgtggacaagatcttgcaataccgcgaactcgcgaaattgaaaggcacctatattgaccgtcttccggcattagtccacccgaaaacgggacgcctccatacccgcttcaaccaaacagccacggcgaccggtcgtttgtcctcctctgatccaaaccttcagaatattccagtacgtaccccattgggccagaagatccgccgtgcgtttgtagctgaggagggttggcgtttagtggccctcgattatcgtcaaattgaattacgtgtccttgcccatctttctggcgatgagaacctcatccgcgtgtttcaggaaggcaaagacattcacactcaaacggcaagctggatgtttggattaggcgctgaagcgatcgatcctttgatgcgtcgtgcagcgaagaccatcaatttcggtgttctctacggtatgagtgcctttcgtttgtcgcaggaattaggcattccctatgaagaagctcaggcgttcattcagaaatactttcaaagctatcccaaagttaaagcatggatcgagaagactctcgaagaaggccgcacacgtggttacgtagagaccttatttggacgtcgccgctatgttcccgatttaaacgctcgcgtgaaaggcaagcgtgaagccgccgaacgcatggcgttcaacatgcctgtacagggcacggcagctgacctcatgaaacttgcaatggtgcgcctttttccacaattgcgtgaagttggtgcccgcatgctcttgcaggtccacgatgaactcttgttagaagcgccaaaagagcgtgcggaagaggtggcagccctcgcgaaagaagttatggaaggcgtgtggcccttagcggtgcctcttgaagtcgaagttggtattggcgaggattggctggctgccaaagga

SEQ ID NO: 3646 - protein, 841 aa, synthetic construct
  REGION 1..841: note = Variant of DNA polymerase I from Thermus sp. strain 2.9
MHHHHHHGGSGVLPVFEPKGRVLLVDGHHLAYRNFFALKGLTTSSGEPVQGVYGFAKSLLKALKEDGDVVIVVFDAKAPSFRHEAYEAYKAGRAPTPEDFPRQLALMKELVDLLGLERLEVPGFEADDVLATLAKKAEREGYEVQILTADRDLFQLLSPRISVLHPEGHRITPEWLWEKYGLRPEQWVDFRALAGDPSDNIPGVKGIGEKTALKLLKEWGSLENLLKNLDQVKPESVREKILAHLEDLKLSRELSRVRTDLPLEVDFQRRREPDWEGLKAFLERLEFGSLLHEFGLLESPLPAEEAPWPPPEGAFLGYRLSRPEPMWAELLALAASAQGRVYRAEDPHGALRGLFEVRGLLAKDLAVVALREGLDLPPTDDPMLLAYLLDPSNTTPEGVARRYGGEWTEDAAKRALLAERLHANLLGRLQGEERLLWLYEEVEKPLSRVLAHMEATGVKLDVAYLENLSLEVAAHMRRLEEEVFRLAGRSFRLNSRDQLERVLFDELGLPPIGKTEKTGKRSTSAAVLEALREVHPIVDKILQYRELAKLKGTYIDRLPALVHPKTGRLHTRFNQTATATGRLSSSDPNLQNIPVRTPLGQKIRRAFVAEEGWRLVALDYRQIELRVLAHLSGDENLIRVFQEGKDIHTQTASWMFGLGAEAIDPLMRRAAKTINFGVLYGMSAFRLSQELGIPYEEAQAFIQKYFQSYPKVKAWIEKTLEEGRTRGYVETLFGRRRYVPDLNARVKGKREAAERMAFNMPVQGTAADLMKLAMVRLFPQLREVGARMLLQVHDELLLEAPKERAEEVAALAKEVMEGVWPLAVPLEVEVGIGEDWLAAKG

SEQ ID NO: 3647 - DNA, 2523 bp, synthetic construct; identical to SEQ ID NO: 3519
  misc_feature 1..2523: note = Variant of DNA polymerase I from Thermus sp. strain 2.9
  source 1..2523: mol_type = other DNA

SEQ ID NO: 3648 - protein, 841 aa, synthetic construct; identical to SEQ ID NO: 3520
  REGION 1..841: note = Variant of DNA polymerase I from Thermus sp. strain 2.9

SEQ ID NO: 3649 - DNA, 2523 bp, synthetic construct
  misc_feature 1..2523: note = Variant of DNA polymerase I from Thermus sp. strain 2.9
  source 1..2523: mol_type = other DNA
atgcaccatcatcatcatcatggcggtagcggcgtgttaccggtgttcgagcctaaaggtcgcgtgcttctggttgatggccatcatctcgcgtatcgtaacttctttgccctgaaaggattaaccaccagcagcggcgagccggtacagggtgtctacggctttgcaaagtcgctcctgaaagctctgaaagaagacggtgatgtggtgattgttgtctttgatgcgaaagcgccaagttttcgccacgaagcgtacgaagcttacaaagccgggcgtgctccaacgccggaagactttcctcgccaattggcgcttatgaaggaattagtggatttgcttggcctcgaacgcttggaagttcccggtttcgaggcagacgacgtattagcgactctcgcaaagaaagccgaacgtgagggctatgaagtccagatcttgacagcagatcgcgatcttttccagcttttatctccgcgcatctcggtgttacacccggaagggcatcgtatcaccccggaatggctctgggagaaatatggtttgcgtcccgaacaatgggtggattttcgcgccttagcaggcgatccgagcgacaatattccgggagttaaaggtatcggcgagaagacggcgctcaagctccttaaagaatgggggtcgttggagaacttgcttaagaatttagatcaggtcaaaccagagtcagtgcgtgagaagattcttgctcacctcgaagacctcaaattaagccgcgaattgtcccgtgtacgcaccgatttgccgctcgaagttgatttccaacgccgccgcgaacctgactgggagggtcttaaagcgtttttagagcgtcttgaatttggttcgctcttgcatgaattcggccttttagaaagcccgttaccagccgaagaagcaccttggccaccgcccgagggcgcgtttttaggttaccgtttgagtcgcccggaaccgatgtgggccgaattactggctcttgcagcgtctgcccagggacgtgtgtatcgcgcggaagaccctcatggtgcgctccgcggcctcttcgaagtccgtggactccttgccaaagacttagctgttgttgcattgcgcgaaggtcttgatttacctccgactgatgatccaatgcttcttgcgtacctcttggacccgtcaaacacgacgcccgaaggcgtagcccgtcgttacggcggcgagtggaccgaagatgcagcgaaacgcgcgttattggccgaacgtttgcacgccaatttattaggacgtttgcaaggcgaggaacgtctccattggctttacgaagaagtggagaaaccattgagtcgcgtgctcgcgcatatggaagctaccggtgtcaaattagacgtggcgtatttggagaatctcagccttgaagttgctgcccacatgcgccgcttggaggaagaagtattccgtttagcaggccgttcctttcgccttaattctcgcgatcagttagaacgtgtgttgttcgatgaacttggtctccctcctatcggcaagacagagaagaccggtaaacgtagcacttcagcggcggttttagaagctcttcgcgaagtccatcccattgtggacaagatcttgcaataccgcgaactcgcgaaattgaaaggcacctatattgaccgtcttccggcattagtccacccgaaaacgggacgcctccatacccgcttcaaccaaacagccacggcgaccggtcgtttgtcctcctctgatccaaaccttcagaatattccagtacgtaccccattgggccagaagatccgccgtgcgtttgtagctgaggagggttggcgtttagtggccctcgattatagccaaattgaattacgtgtccttgcccatctttctggcgatgagaacctcatccgcgtgtttcaggaaggcaaagacattcacactcaaacggcaagctggatgtttggattatcagctgaagcgatcgatcctttgatgcgtcgtgcagcgaagaccatcaatttcggtgttctctacggtatgagtgcctttcgtttgtcgcaggaattaggcattccctatgaagaagctcaggcgttcattcagaaatactttcaaagctatcccaaagttaaagcatggatcgagaagactctcgaagaaggccgcacacgtggttacgtagagaccttatttggacgtcgccgctatgttcccgatttaaacgctcgcgtgaaaggcaagcgtgaagccgccgaacgcatggcgttcaacatgcctgtacagggcacggcagctgacctcatgaaacttgcaatggtgcgcctttttccacaattgcgtgaagttggtgcccgcatgctcttgcaggtccacgatgaactcttgttagaagcgccaaaagagcgtgcggaagaggtggcagccctcgcgaaagaagttatggaaggcgtgtggcccttagcggtgcctcttgaagtcgaagttggtattggcgaggattggctggctgccaaagga

SEQ ID NO: 3650 - protein, 841 aa, synthetic construct
  REGION 1..841: note = Variant of DNA polymerase I from Thermus sp. strain 2.9
MHHHHHHGGSGVLPVFEPKGRVLLVDGHHLAYRNFFALKGLTTSSGEPVQGVYGFAKSLLKALKEDGDVVIVVFDAKAPSFRHEAYEAYKAGRAPTPEDFPRQLALMKELVDLLGLERLEVPGFEADDVLATLAKKAEREGYEVQILTADRDLFQLLSPRISVLHPEGHRITPEWLWEKYGLRPEQWVDFRALAGDPSDNIPGVKGIGEKTALKLLKEWGSLENLLKNLDQVKPESVREKILAHLEDLKLSRELSRVRTDLPLEVDFQRRREPDWEGLKAFLERLEFGSLLHEFGLLESPLPAEEAPWPPPEGAFLGYRLSRPEPMWAELLALAASAQGRVYRAEDPHGALRGLFEVRGLLAKDLAVVALREGLDLPPTDDPMLLAYLLDPSNTTPEGVARRYGGEWTEDAAKRALLAERLHANLLGRLQGEERLHWLYEEVEKPLSRVLAHMEATGVKLDVAYLENLSLEVAAHMRRLEEEVFRLAGRSFRLNSRDQLERVLFDELGLPPIGKTEKTGKRSTSAAVLEALREVHPIVDKILQYRELAKLKGTYIDRLPALVHPKTGRLHTRFNQTATATGRLSSSDPNLQNIPVRTPLGQKIRRAFVAEEGWRLVALDYSQIELRVLAHLSGDENLIRVFQEGKDIHTQTASWMFGLSAEAIDPLMRRAAKTINFGVLYGMSAFRLSQELGIPYEEAQAFIQKYFQSYPKVKAWIEKTLEEGRTRGYVETLFGRRRYVPDLNARVKGKREAAERMAFNMPVQGTAADLMKLAMVRLFPQLREVGARMLLQVHDELLLEAPKERAEEVAALAKEVMEGVWPLAVPLEVEVGIGEDWLAAKG

SEQ ID NO: 3651 - DNA, 2523 bp, synthetic construct
  misc_feature 1..2523: note = Variant of DNA polymerase I from Thermus sp. strain 2.9
  source 1..2523: mol_type = other DNA
atgcaccatcatcatcatcatggcggtagcggcgtgttaccggtgttcgagcctaaaggtcgcgtgcttctggttgatggccatcatctcgcgtatcgtaacttctttgccctgaaaggattaaccaccagcagcggcgagccggtacagggtgtctacggctttgcaaagtcgctcctgaaagctctgaaagaagacggtgatgtggtgattgttgtctttgatgcgaaagcgccaagttttcgccacgaagcgtacgaagcttacaaagccgggcgtgctccaacgccggaagggtttcctcgccaattggcgcttatgaaggaattagtggatttgcttggcctcgaacgcttggaagttcccggtttcgaggcagacgacgtattagcgactctcgcaaagaaagccgaacgtgagggctatgaagtccagatcttgacagcagatcgcgatcttttccagcttttatctccgcgcatctcggtgttacacccggaagggcatcgtatcaccccggaatggctctgggagaaatatggtttgcgtcccgaacaatgggtggattttcgcgccttagcaggcgatccgagcgacaatattccgggagttaaaggtatcggcgagaagacggcgctcaagctccttaaagaatgggggtcgttggagaacttgcttaagaatttagatcaggtcaaaccagagtcagtgcgtgagaagattcttgctcacctcgaagacctcaaattaagccgcgaattgtcccgtgtacgcaccgatttgccgctcgaagttgatttccaacgccgccgcgaacctgactgggagggtcttaaagcgtttttagagcgtcttgaatttggttcgctcttgcatgaattcggccttttagaaagcccgttaccagccgaagaagcaccttggccaccgcccgagggcgcgtttttaggttaccgtttgagtcgcccggaaccgatgtgggccgaattactggctcttgcagcgtctgcccagggacgtgtgtatcgcgcggaagaccctcatggtgcgctccgcggcctcttcgaagtccgtggactccttgccaaagacttagctgttgttgcattgcgcgaaggtcttgatttacctccgactgatgatccaatgcttcttgcgtacctcttggacccgtcaaacacgacgcccgaaggcgtagcccgtcgttacggcggcgagtggaccgaagatgcagcgaaacgcgcgttattggccgaacgtttgcacgccaatttattaggacgtttgcaaggcgaggaacgtctcctctggctttacgaagaagtggagaaaccattgagtcgcgtgctcgcgcatatggaagctaccggtgtcaaattagacgtggcgtatttggagaatctcagccttgaagttgctgcccacatgcgccgcttggaggaagaagtattccgtttagcaggccgttcctttcgccttaattctcgcgatcagttagaacgtgtgttgttcgatgaacttggtctccctcctatcggcaagacagagaagaccggtaaacgtagcacttcagcggcggttttagaagctcttcgcgaagtccatcccattgtggacaagatcttgcaataccgcgaactcgcgaaattgaaaggcacctatattgaccgtcttccggcattagtccacccgaaaacgggacgcctccatacccgcttcaaccaaacagccacggcgaccggtcgtttgtcctcctctgatccaaaccttcagaatattccagtacgtaccccattgggccagaagatccgccgtgcgtttgtagctgaggagggttggcgtttagtggccctcgattatagccaaattgaattacgtgtccttgcccatctttctggcgatgagaacctcatccgcgtgtttcaggaaggcaaagacattcacactcaaacggcaagctggatgtttggattatcagctgaagcgatcgatcctttgatgcgtcgtgcagcgaagaccatcaatttcggtgttctctacggtatgagtgcctttcgtttgtcgcaggaattaggcattccctatgaagaagctcaggcgttcattcagaaatactttcaaagctatcccaaagttaaagcatggatcgagaagactctcgaagaaggccgcacacgtggttacgtagagaccttatttggacgtcgccgctatgttcccgatttaaacgctcgcgtgaaaggcaagcgtgaagccgccgaacgcatggcgttcaacatgcctgtacagggcacggcagctgacctcatgaaacttgcaatggtgcgcctttttccacaattgcgtgaagttggtgcccgcatgctcttgcaggtccacgatgaactcttgttagaagcgccaaaagagcgtgcggaagaggtggcagccctcgcgaaagaagttatggaaggcgtgtggcccttagcggtgcctcttgaagtcgaagttggtattggcgaggattggctggctgccaaagga

SEQ ID NO: 3652 - protein, 841 aa, synthetic construct
  REGION 1..841: note = Variant of DNA polymerase I from Thermus sp. strain 2.9
MHHHHHHGGSGVLPVFEPKGRVLLVDGHHLAYRNFFALKGLTTSSGEPVQGVYGFAKSLLKALKEDGDVVIVVFDAKAPSFRHEAYEAYKAGRAPTPEGFPRQLALMKELVDLLGLERLEVPGFEADDVLATLAKKAEREGYEVQILTADRDLFQLLSPRISVLHPEGHRITPEWLWEKYGLRPEQWVDFRALAGDPSDNIPGVKGIGEKTALKLLKEWGSLENLLKNLDQVKPESVREKILAHLEDLKLSRELSRVRTDLPLEVDFQRRREPDWEGLKAFLERLEFGSLLHEFGLLESPLPAEEAPWPPPEGAFLGYRLSRPEPMWAELLALAASAQGRVYRAEDPHGALRGLFEVRGLLAKDLAVVALREGLDLPPTDDPMLLAYLLDPSNTTPEGVARRYGGEWTEDAAKRALLAERLHANLLGRLQGEERLLWLYEEVEKPLSRVLAHMEATGVKLDVAYLENLSLEVAAHMRRLEEEVFRLAGRSFRLNSRDQLERVLFDELGLPPIGKTEKTGKRSTSAAVLEALREVHPIVDKILQYRELAKLKGTYIDRLPALVHPKTGRLHTRFNQTATATGRLSSSDPNLQNIPVRTPLGQKIRRAFVAEEGWRLVALDYSQIELRVLAHLSGDENLIRVFQEGKDIHTQTASWMFGLSAEAIDPLMRRAAKTINFGVLYGMSAFRLSQELGIPYEEAQAFIQKYFQSYPKVKAWIEKTLEEGRTRGYVETLFGRRRYVPDLNARVKGKREAAERMAFNMPVQGTAADLMKLAMVRLFPQLREVGARMLLQVHDELLLEAPKERAEEVAALAKEVMEGVWPLAVPLEVEVGIGEDWLAAKG

SEQ ID NO: 3653 - DNA, 2523 bp, synthetic construct
  misc_feature 1..2523: note = Variant of DNA polymerase I from Thermus sp. strain 2.9
  source 1..2523: mol_type = other DNA
atgcaccatcatcatcatcatggcggtagcggcgtgttagaggtgttcgagcctaaaggtcgcgtgcttctggttgatggccatcatctcgcgtatcgtaacttctttgccctgaaaggattaaccaccagcagcggcgagccggtacagggtgtctacggctttgcaaagtcgctcctgaaagctctgaaagaagacggtgatgtggtgattgttgtctttgatgcgaaagcgccaagttttcgccacgaagcgtacgaagcttacaaagccgggcgtgctccaacgccggaagactttcctcgccaattggcgcttatgaaggaattagtggatttgcttggcctcgaacgcttggaagttcccggtttcgaggcagacgacgtattagcgactctcgcaaagaaagccgaagacgagggctatgaagtccagatcttgacagcagatcgcgatcttttccagcttttatctccgcgcatctcggtgttacacccggaagggcatcgtatcaccccggaatggctctgggagaaatatggtttgcgtcccgaacaatgggtggattttcgcgccttagcaggcgatccgagcgacaatattccgggagttaaaggtatcggcgagaagacggcgctcaagctccttaaagaatgggggtcgttggagaacttgcttaagaatttagatcaggtcaaaccagagtcagtgcgtgagaagattcttgctcacctcgaagacctcaaattaagccgcgaattgtcccgtgtacgcaccgatttgccgctcgaagttgatttccaacgccgccgcgaacctgactgggagggtcttaaagcgtttttagagcgtcttgaatttggttcgctcttgcatgaattcggccttttagaaagcccgttaccagccgaagaagcaccttggccaccgcccgagggcgcgtttttaggttaccgtttgagtcgcccggaaccgatgtgggccgaattactggctcttgcagcgtctgcccagggacgtgtgtatcgcgcggaagaccctcatggtgcgctccgcggcctcttcgaagtccgtggactccttgccaaagacttagctgttgttgcattgcgcgaaggtcttgatttacctccgactgatgatccaatgcttcttgcgtacctcttggacccgtcaaacacgacgcctgaaggcgtagcccgtcgttacggcggcgagtggaccgaagatgcagcgaaacgcgcgttattggccgaacgtttgcacgccaatttattaggacgtttgcaaggcgaggaacgtctcctctggctttacgaagaagtggagaaaccattgagtcgcgtgctcgcgcatatggaagctaccggtgtcaaattagacgtggcgtatttggagaatctcagccttgaagttgctgcccacatgcgccgcttggaggaagaagtattccgtttagcaggccgttcctttcgccttaattctcgcgatcagttagaacgtgtgttgttcgatgaacttggtctccctcctatcggcaagacagagaagaccggtaaacgtagcacttcagcggcggttttagaagctcttcgcgaagtccatcccattgtggacaagatcttgcaataccgcgaactcgcgaaattgaaaggcacctatattgaccgtcttccggcattagtccacccgaaaacgggacgcctccatacccgcttcaaccaaacagccacggcgaccggtcgtttgtcctcctctgatccaaaccttcagaatattccagtacgtaccccgttgggccagaagatccgccgtgcgtttgtagctgaggagggttggcgtttagtggccctcgattatagccaaattgaattacgtgtccttgcccatctttctggcgatgagaacctcatccgcgtgtttcaggaaggcaaagacattcacactcaaacggcaagctggatgtttggattatcagctgaagcgatcgatcctttgatgcgtcgtgcagcgaagaccatcaatttcggtgttctctacggtatgagtgcctttcgtttgtcgcaggaattaggcattccctatgaagaagctcaggcgttcattcagaaatactttcaaagctatcccaaagttaaagcatggatcgagaagactctcgaagaaggccgccaccgtggttacgtagagaccttatttggacgtcgccgctatgttcccgatttaaacgctcgcgtgaaaggcaagcgtgaagccgccgaacgcatggcgttcaacatgcctgtacagggcacggcagctgacctcatgaaacttgcaatggtgcgcctttttccacaattgcgtgaagttggtgcccgcatgctcttgcaggtccacgatgaactcttgttagaagcgccaaaagagcgtgcggaagaggtggcagccctcgcgaaagaagttatggaaggcgtgtggcccttagcggtgcctcttgaagtcgaagttggtattggcgaggattggctggctgccaaagga

SEQ ID NO: 3654 - protein, 841 aa, synthetic construct
  REGION 1..841: note = Variant of DNA polymerase I from Thermus sp. strain 2.9
MHHHHHHGGSGVLEVFEPKGRVLLVDGHHLAYRNFFALKGLTTSSGEPVQGVYGFAKSLLKALKEDGDVVIVVFDAKAPSFRHEAYEAYKAGRAPTPEDFPRQLALMKELVDLLGLERLEVPGFEADDVLATLAKKAEDEGYEVQILTADRDLFQLLSPRISVLHPEGHRITPEWLWEKYGLRPEQWVDFRALAGDPSDNIPGVKGIGEKTALKLLKEWGSLENLLKNLDQVKPESVREKILAHLEDLKLSRELSRVRTDLPLEVDFQRRREPDWEGLKAFLERLEFGSLLHEFGLLESPLPAEEAPWPPPEGAFLGYRLSRPEPMWAELLALAASAQGRVYRAEDPHGALRGLFEVRGLLAKDLAVVALREGLDLPPTDDPMLLAYLLDPSNTTPEGVARRYGGEWTEDAAKRALLAERLHANLLGRLQGEERLLWLYEEVEKPLSRVLAHMEATGVKLDVAYLENLSLEVAAHMRRLEEEVFRLAGRSFRLNSRDQLERVLFDELGLPPIGKTEKTGKRSTSAAVLEALREVHPIVDKILQYRELAKLKGTYIDRLPALVHPKTGRLHTRFNQTATATGRLSSSDPNLQNIPVRTPLGQKIRRAFVAEEGWRLVALDYSQIELRVLAHLSGDENLIRVFQEGKDIHTQTASWMFGLSAEAIDPLMRRAAKTINFGVLYGMSAFRLSQELGIPYEEAQAFIQKYFQSYPKVKAWIEKTLEEGRHRGYVETLFGRRRYVPDLNARVKGKREAAERMAFNMPVQGTAADLMKLAMVRLFPQLREVGARMLLQVHDELLLEAPKERAEEVAALAKEVMEGVWPLAVPLEVEVGIGEDWLAAKG

SEQ ID NO: 3655 - DNA, 2523 bp, synthetic construct
  misc_feature 1..2523: note = Variant of DNA polymerase I from Thermus sp. strain 2.9
  source 1..2523: mol_type = other DNA
atgcaccatcatcatcatcatggcggtagcggcgtgttaccggtgttcgagcctaaaggtcgcgtgcttctggttgatggccatcatctcgcgtatcgtaacttctttgccctgaaaggattaaccaccagcagcggcgagccggtacagggtgtctacggctttgcaaagtcgctcctgaaagctctgaaagaagacggtgatgtggtgattgttgtctttgatgcgaaagcgccaagttttcgccacgaagcgtacgaagcttacaaagccgggcgtgctccaacgccggaagactttcctcgccaattggcgcttatgaaggaattagtggatttgcttggcctcgaacgcttggaagttcccggtttcgaggcagacgacgtattagcgactctcgcaaagaaagccgaacgtgagggctatgaagtccagatcttgacagcagatcgcgatcttttccagcttttatctccgcgcatctcggtgttacacccggaagggcatcgtatcaccccggaatggctctgggagaaatatggtttgcgtcccgaacaatgggtggattttcgcgccttagcaggcgatccgagcgacaatattccgggagttaaaggtatcggcgagaagacggcgctcaagctccttaaagaatgggggtcgttggagaacttgcttatgaatttagatcaggtcaaaccagagtcagtgcgtgagaagattcttgctcacctcgaagacctcaaattaagccgcgaattgtcccgtgtacgcaccgatttgccgctcgaagttgatttccaacgccgccgcgaacctgactgggagggtcttaaagcgtttttagagcgtcttgaatttggttcgctcttgcatgaattcggccttttagaaagcccgttaccagccgaagaagcaccttggccaccgcccgagggcgcgtttttaggttaccgtttgagtcgcccggaaccgatgtgggccgaattactggctcttgcagcgtctgcccagggacgtgtgtatcgcgcggaagaccctcatggtgcgctccgcggcctcttcgaagtccgtggactccttgccaaagacttagctgttgttgcattgcgcgaaggtcttgatttacctccgactgatgatccaatgcttcttgcgtacctcttggacccgtcaaacacgacgcccgaaggcgtagcccgtcgttacggcggcgagtggaccgaagatgcagcgaaacgcgcgttattggccgaacgtttgcacgccaatttattaggacgtttgcaaggcgaggaacgtctcctctggctttacgaagaagtggagaaaccattgagtcgcgtgctcgcgcatatggaagctaccggtgtcaaattagacgtggcgtatttggagaatctcagccttgaagttgctgcccacatgcgccgcttggaggaagaagtattccgtttagcaggccgttcctttcgccttaattctcgcgatcagttagaacgtgtgttgttcgatgaacttggtctccctcctatcggcaagacagagaagaccggtaaacgtagcacttcagcggcggttttagaagctcttcgcgaagtccatcccattgtggacaagatcttgcaataccgcgaactcgcgaaattgaaaggcacctatattgaccgtcttccggcattagtccacccgaaaacgggacgcctccatacccgcttcaaccaaacagccacggcgaccggtcgtttgtcctcctctgatccaaaccttcagaatattccagtacgtaccccattgggccagaagatccgccgtgcgtttgtagctgaggagggttggcgtttagtggccctcgattatagccaaattgaattacgtgtccttgcccatctttctggcgatgagaacctcatccgcgtgtttcaggaaggcaaagacattcacactcaaacggcaagctggatgtttggattatcagctgaagcgatcgatcctttgatgcgtcgtgcagcgaagaccatcaatttcggtgttctctacggtatgagtgcctttcgtttgtcgcaggaattaggcattccctatgaagaagctcaggcgttcattcagaaatactttcaaagctatcccaaagttaaagcatggatcgagaagactctcgaagaaggccgcacacgtggttacgtagagaccttatttggacgtcgccgctatgttcccgatttaaacgctcgcgtgaaaggcaagcgtgaagccgccgaacgcatggcgttcaacatgcctgtacagggcacggcagctgacctcatgaaacttgcaatggtgcgcctttttccacaattgcgtgaagttggtgcccgcatgctcttgcaggtccacgatgaactcttgttagaagcgccaaaagagcgtgcggaagaggtggcagccctcgcgaaagaagttatggaaggcgtgtggcccttagcggtgcctcttgaagtcgaagttggtattggcgaggattggctggctgccaaagga

SEQ ID NO: 3656 - protein, 841 aa, synthetic construct
  REGION 1..841: note = Variant of DNA polymerase I from Thermus sp. strain 2.9
MHHHHHHGGSGVLPVFEPKGRVLLVDGHHLAYRNFFALKGLTTSSGEPVQGVYGFAKSLLKALKEDGDVVIVVFDAKAPSFRHEAYEAYKAGRAPTPEDFPRQLALMKELVDLLGLERLEVPGFEADDVLATLAKKAEREGYEVQILTADRDLFQLLSPRISVLHPEGHRITPEWLWEKYGLRPEQWVDFRALAGDPSDNIPGVKGIGEKTALKLLKEWGSLENLLMNLDQVKPESVREKILAHLEDLKLSRELSRVRTDLPLEVDFQRRREPDWEGLKAFLERLEFGSLLHEFGLLESPLPAEEAPWPPPEGAFLGYRLSRPEPMWAELLALAASAQGRVYRAEDPHGALRGLFEVRGLLAKDLAVVALREGLDLPPTDDPMLLAYLLDPSNTTPEGVARRYGGEWTEDAAKRALLAERLHANLLGRLQGEERLLWLYEEVEKPLSRVLAHMEATGVKLDVAYLENLSLEVAAHMRRLEEEVFRLAGRSFRLNSRDQLERVLFDELGLPPIGKTEKTGKRSTSAAVLEALREVHPIVDKILQYRELAKLKGTYIDRLPALVHPKTGRLHTRFNQTATATGRLSSSDPNLQNIPVRTPLGQKIRRAFVAEEGWRLVALDYSQIELRVLAHLSGDENLIRVFQEGKDIHTQTASWMFGLSAEAIDPLMRRAAKTINFGVLYGMSAFRLSQELGIPYEEAQAFIQKYFQSYPKVKAWIEKTLEEGRTRGYVETLFGRRRYVPDLNARVKGKREAAERMAFNMPVQGTAADLMKLAMVRLFPQLREVGARMLLQVHDELLLEAPKERAEEVAALAKEVMEGVWPLAVPLEVEVGIGEDWLAAKG

SEQ ID NO: 3657 - DNA, 2523 bp, synthetic construct
  misc_feature 1..2523: note = Variant of DNA polymerase I from Thermus sp. strain 2.9
  source 1..2523: mol_type = other DNA
atgcaccatcatcatcatcatggcggtagcggcgtgttaccggtgttcgagcctaaaggtcgcgtgcttctggttgatggccatcatctcgcgtatcgtaacttctttgccctgaaaggattaaccaccagcagcggcgagccggtacagggtgtctacggctttgcaaagtcgctcctgaaagctctgaaagaagacggtgatgtggtgattgttgtctttgatgcgaaagcgccaagttttcgccacgaagcgtacgaagcttacaaagccgggcgtgctccaacgccggaagactttcctcgccaattggcgcttatgaaggaattagtggatttgcttggcctcgaacgcttggaagttaatggtttcgaggcagacgacgtattagcgactctcgcaaagaaagccgaacgtgagggctatgaagtccagatcttgacagcagatcgcgatcttttccagcttttatctccgcgcatctcggtgttacacccggaagggcatcgtatcaccccggaatggctctgggagaaatatggtttgcgtcccgaacaatgggtggattttcgcgccttagcaggcgatccgagcgacaatattccgggagttaaaggtatcggcgagaagacggcgctcaagctccttaaagaatgggggtcgttggagaacttgcttaagaatttagatcaggtcaaaccagagtcagtgcgtgagaagattcttgctcacctcgaagacctcaaattaagccgcgaattgtcccgtgtacgcaccgatttgccgctcgaagttgatttccaacgccgccgcgaacctgactgggagggtcttaaagcgtttttagagcgtcttgaatttggttcgctcttgcatgaattcggccttttagaaagcccgttaccagccgaagaagcaccttggccaccgcccgagggcgcgtttttaggttaccgtttgagtcgcccggaaccgatgtgggccgaattactggctcttgcagcgtctgcccagggacgtgtgtatcgcgcggaagaccctcatggtgcgctccgcggcctcttcgaagtccgtggactccttgccaaagacttagctgttgttgcattgcgcgaaggtcttgatttacctccgactgatgatccaatgcttcttgcgtacctcttggacccgtcaaacacgacgcccgaaggcgtagcccgtcgttacggcggcgagtggaccgaagatgcagcgaaacgcgcgttattggccgaacgtttgcacgccaatttattaggacgtttgcaaggcgaggaacgtctcctctggctttacgaagaagtggagaaaccattgagtcgcgtgctcgcgcatatggaagctaccggtgtcaaattagacgtggcgtatttggagaatctcagccttgaagttgctgcccacatgcgccgcttggaggaagaagtattccgtttagcaggccgttcctttcgccttaattctcgcgatcagttagaacgtgtgttgttcgatgaacttggtctccctcctatcggcaagacagagaagaccggtaaacgtagcacttcagcggcggttttagaagctcttcgcgaagtccatcccattgtggacaagatcttgcaataccgcgaactcgcgaaattgaaaggcacctatattgaccgtcttccggcattagtccacccgaaaacgggacgcctccatacccgcttcaaccaaacagccacggcgaccggtcgtttgtcctcctctgatccaaaccttcagaatattccagtacgtaccccattgggccagaagatccgccgtgcgtttgtagctgaggagggttggcgtttagtggccctcgattatagccaaattgaattacgtgtccttgcccatctttctggcgatgagaacctcatccgcgtgtttcaggaaggcaaagacattcacactcaaacggcaagctggatgtttggattatcagctgaagcgatcgatcctttgatgcgtcgtgcagcgaagaccatcaatttcggtgttctctacggtatgagtgcctttcgtttgtcgcaggaattaggcattccctatgaagaagctcaggcgttcattcagaaatactttcaaagctatcccaaagttaaagcatggatcgagaagactctcgaagaaggccgcacacgtggttacgtagagaccttatttggacgtcgccgctatgttcccgatttaaacgctcgcgtgaaaggcaagcgtgaagccgccgaacgcatggcgttcaacatgcctgtacagggcacggcagctgacctcatgaaacttgcaatggtgcgcctttttccacaattgcgtgaagttggtgcccgcatgctcttgcaggtccacgatgaactcttgttagaagcgccaaaagagcgtgcggaagaggtggcagccctcgcgaaagaagttatggaaggcgtgtggcccttagcggtgcctcttgaagtcgaagttggtattggcgaggattggctggctgccaaagga

SEQ ID NO: 3658 - protein, 841 aa, synthetic construct
  REGION 1..841: note = Variant of DNA polymerase I from Thermus sp. strain 2.9
MHHHHHHGGSGVLPVFEPKGRVLLVDGHHLAYRNFFALKGLTTSSGEPVQGVYGFAKSLLKALKEDGDVVIVVFDAKAPSFRHEAYEAYKAGRAPTPEDFPRQLALMKELVDLLGLERLEVNGFEADDVLATLAKKAEREGYEVQILTADRDLFQLLSPRISVLHPEGHRITPEWLWEKYGLRPEQWVDFRALAGDPSDNIPGVKGIGEKTALKLLKEWGSLENLLKNLDQVKPESVREKILAHLEDLKLSRELSRVRTDLPLEVDFQRRREPDWEGLKAFLERLEFGSLLHEFGLLESPLPAEEAPWPPPEGAFLGYRLSRPEPMWAELLALAASAQGRVYRAEDPHGALRGLFEVRGLLAKDLAVVALREGLDLPPTDDPMLLAYLLDPSNTTPEGVARRYGGEWTEDAAKRALLAERLHANLLGRLQGEERLLWLYEEVEKPLSRVLAHMEATGVKLDVAYLENLSLEVAAHMRRLEEEVFRLAGRSFRLNSRDQLERVLFDELGLPPIGKTEKTGKRSTSAAVLEALREVHPIVDKILQYRELAKLKGTYIDRLPALVHPKTGRLHTRFNQTATATGRLSSSDPNLQNIPVRTPLGQKIRRAFVAEEGWRLVALDYSQIELRVLAHLSGDENLIRVFQEGKDIHTQTASWMFGLSAEAIDPLMRRAAKTINFGVLYGMSAFRLSQELGIPYEEAQAFIQKYFQSYPKVKAWIEKTLEEGRTRGYVETLFGRRRYVPDLNARVKGKREAAERMAFNMPVQGTAADLMKLAMVRLFPQLREVGARMLLQVHDELLLEAPKERAEEVAALAKEVMEGVWPLAVPLEVEVGIGEDWLAAKG

SEQ ID NO: 3659 - DNA, 2523 bp, synthetic construct
  misc_feature 1..2523: note = Variant of DNA polymerase I from Thermus sp. strain 2.9
  source 1..2523: mol_type = other DNA
atgcaccatcatcatcatcatggcggtagcggcgtgttaccggtgttcgagcctaaaggtcgcgtgcttctggttgatggccatcatctcgcgtatcgtaacttctttgccctgaaaggattaaccaccagcctgggcgagccggtacagggtgtctacggctttgcaaagtcgctcctgaaagctctgaaagaagacggtgatgtggtgattgttgtctttgatgcgaaagcgccaagttttcgccacgaagcgtacgaagcttacaaagccgggcgtgctccaacgccggaagactttcctcgccaattggcgcttatgaaggaattagtggatttgcttggcctcgaacgcttggaagttcccggtttcgaggcagacgacgtattagcgactctcgcaaagaaagccgaacgtgagggctatgaagtccagatcttgacagcagatcgcgatcttttccagcttttatctccgcgcatctcggtgttacacccggaagggcatcgtatcaccccggaatggctctgggagaaatatggtttgcgtcccgaacaatgggtggattttcgcgccttagcaggcgatccgagcgacaatattccgggagttaaaggtatcggcgagaagacggcgctcaagctccttaaagaatgggggtcgttggagaacttgcttaagaatttagatcaggtcaaaccagagtcagtgcgtgagaagattcttgctcacctcgaagacctcaaattaagccgcgaattgtcccgtgtacgcaccgatttgccgctcgaagttgatttcggtcgccgccgcgaacctgactgggagggtcttaaagcgtttttagagcgtcttgaatttggttcgctcttgcatgaattcggccttttagaaaacccgttactggccgaagaagcaccttggcccccgcccgagggcgcgtttttaggttaccgtttgactcgcccggaaccgatgtgggccgaattactggctcttgcagcgtctgcccagggacgtgtgtatcgcgcggaagaccctcatggtgcgctccgcggcctcttcgaagtccgtggactccttgccaaagacttagctgttgttgcattgcgcgaaggtcttgatttacctccgactgatgatccaatgcttcttgcgtacctcttggacccgtcaaacacgacgcccgaaggcgtagcccgtcgttacggcggcgagtggaccgaagatgcagcgaaacgcgcgttattggccgaacgtttgcacgccaatttattaggacgtttgcaaggcgaggaacgtctcctctggctttacgaagaagtggagaaaccattgagtcgcgtgctcgcccatatggaagctaccggtgtcaaattagacgtggcgtatttggagaatctcagccttgaagttgctgcccacatgcgccgcttggaggaagaagtattccgtttagcaggccgttcctttcgccttaattctcgcgatcagttagaacgtgtgttgttcgatgaacttggtctccctcctatcggcaagacagagaagaccggtaaacgtagcacttcagcggcggttttagaagctcttcgcgaagtccatcccattgtggacaagatcttgcaataccgcgaactcgcgaaattgaaaggcacctatattgaccgtcttccggcattagtccacccgaaaacgggacgcctccatacccgcttcaaccaaacagccacggcgaccggtcgtttgtcctcctctgatccaaaccttcagaatattccagtacgtaccccattgggccagaagatccgccgtgcgtttgtagctgaggagggttggcgtttagtggccctcgattatcgtcaaattgaattacgtgtccttgcccatctttctggcgatgagaacctcatccgcgtgtttcaggaaggcaaagacattcacactcaaacggcaagctggatgtttggattaggcgctgaagcgatcgatcctttgatgcgtcgtgcagcgaagaccatcaatttcggtgttctctacggtatgagtgcctttcgtttgtcgcaggaattaggcattccctatgaagaagctcaggcgttcattcagaaatactttcaaagctatcccaaagttaaagcatggatcgagaagactctcgaggaaggccgcacacgtggttacgtagagaccttatttggacgtcgccgctatgttcccgatttaaacgctcgcgtgaaaggcaagcgtgaagccgccgaacgcatggcgttcaacatgcctgtacagggcacggcagctgacctcatgaaacttgcaatggtgcgcctttttccacaattgcgtgaagttggtgcccgcatgctcttgcaggtccacgatgaactcttgttagaagcgccaaaagagcgtgcggaagaggtggcagccctcgcgaaagaagttatggaaggcgtgtggcccttagcggtgcctcttgaagtcgaagttggtattggcgaggattggctggctgccaaagga

SEQ ID NO: 3660 - protein, 841 aa, synthetic construct
  REGION 1..841: note = Variant of DNA polymerase I from Thermus sp. strain 2.9
MHHHHHHGGSGVLPVFEPKGRVLLVDGHHLAYRNFFALKGLTTSLGEPVQGVYGFAKSLLKALKEDGDVVIVVFDAKAPSFRHEAYEAYKAGRAPTPEDFPRQLALMKELVDLLGLERLEVPGFEADDVLATLAKKAEREGYEVQILTADRDLFQLLSPRISVLHPEGHRITPEWLWEKYGLRPEQWVDFRALAGDPSDNIPGVKGIGEKTALKLLKEWGSLENLLKNLDQVKPESVREKILAHLEDLKLSRELSRVRTDLPLEVDFGRRREPDWEGLKAFLERLEFGSLLHEFGLLENPLLAEEAPWPPPEGAFLGYRLTRPEPMWAELLALAASAQGRVYRAEDPHGALRGLFEVRGLLAKDLAVVALREGLDLPPTDDPMLLAYLLDPSNTTPEGVARRYGGEWTEDAAKRALLAERLHANLLGRLQGEERLLWLYEEVEKPLSRVLAHMEATGVKLDVAYLENLSLEVAAHMRRLEEEVFRLAGRSFRLNSRDQLERVLFDELGLPPIGKTEKTGKRSTSAAVLEALREVHPIVDKILQYRELAKLKGTYIDRLPALVHPKTGRLHTRFNQTATATGRLSSSDPNLQNIPVRTPLGQKIRRAFVAEEGWRLVALDYRQIELRVLAHLSGDENLIRVFQEGKDIHTQTASWMFGLGAEAIDPLMRRAAKTINFGVLYGMSAFRLSQELGIPYEEAQAFIQKYFQSYPKVKAWIEKTLEEGRTRGYVETLFGRRRYVPDLNARVKGKREAAERMAFNMPVQGTAADLMKLAMVRLFPQLREVGARMLLQVHDELLLEAPKERAEEVAALAKEVMEGVWPLAVPLEVEVGIGEDWLAAKG

SEQ ID NO: 3661 - DNA, 2523 bp, synthetic construct
  misc_feature 1..2523: note = Variant of DNA polymerase I from Thermus sp. strain 2.9
  source 1..2523: mol_type = other DNA
atgcaccatcatcatcatcatggcggtagcggcgtgttagaggtgttcgagcctaaaggtcgcgtgcttctggttgatggccatcatctcgcgtatcgtaacttctttgccctgaaaggattaaccaccagcagcggcgagccggtacagggtgtctacggctttgcaaagtcgctcctgaaagctctgaaagaagacggtgatgtggtgattgttgtctttgatgcgaaagcgccaagttttcgccacgaagcgtacgaagcttacaaagccgggcgtgctcctacgccggaagactttcctcgccaattggcgcttatgaaggaattagtggatttgcttggcctcgaacgcttggaagttcccggtttcgaggcagacgacgtattagcgactctcgcaaagaaagccgaacgtgagggctatgaagtccagatcttgacagcagatcgcgatcttttccagcttttatctccgcgcatctcggtgttacacccggatgggcatcgtatcaccccggaatggctctgggagaaatatggtttgcgtcccgaacaatgggtggattttcgcgccttagcaggcgatccgagcgacaatattccgggagttaaaggtatcggcgagaagacggcgctcaagctccttaaagaatgggggtcgttggagaacttgcttaagaatttagatcaggtcaaaccagagtcagtgcgtgagaagattcttgctcacctcgaagacctcaaattaagccgcgaattgtcccgtgtacgcaccgatttgccgctcgaagttgatttccaacgccgccgcgaacctgactgggagggtcttaaagcgtttttagagcgtcttgaatttggttcgctcttgcatgaattcggccttttagaaagcccgttaccagccgaagaagcaccttggccaccgcccgagggcgcgtttttaggttaccgtttgagtcgcccggaaccgatgtgggccgaattactggctcttgcagcgtctgcccagggacgtgtgtatcgcgcggaagaccctcatggtgcgctccgcggcctcttcgaagtccgtggactccttgccaaagacttagctgttgttgcattgcgcgaaggtcttgatttacctccgactgatgatccaatgcttcttgcgtacctcttggacccgtcaaacacgacgcccgaaggcgtagcccgtcgttacggcggcgagtggaccgaagatgcagcgaaacgcgcgttattggccgaacgtttgcacgccaatttattaggacgtttgcaaggcgaggagcgtctcctctggctttacgaagaagtggagaaaccattgagtcgcgtgctcgcgcatatggaagctaccggtgtcaaattagacgtggcgtatttggagaatctcagccttgaagttgctgcccacatgcgccgcttggaggaagaagtattccgtttagcaggccgttcctttcgccttaattctcgcgatcagttagaacgtgtgttgttcgatgaacttggtctccctcctatcggcaagacagagaagaccggtaaacgtagcacttcagcggcggttttagaagctcttcgcgaagtccatcccattgtggacaagatcttgcaataccgcgaactcgcgaaattgaaaggcacctatattgaccgtcttccggcattagtccacccgaaaacgggacgcctccatacccgcttcaaccaaacagccacggcgaccggtcgtttgtcctcctctgatccaaaccttcagaatattccagtacgtaccccgttgggccagaagatccgccgtgcgtttgtagctgaggagggttggcgtttagtggccctcgattatagccaaattgaattacgtgtccttgcccatctttctggcgatgagaacctcatccgcgtgtttgaggaaggcaaagacattcacactcaaacggcaagctggatgtttggattatcagctgaagcgatcgatcctttgatgcgtcgtgcagcgaagaccatcaatttcggtgttctctacggtatgagtgcctttcgtttgtcgcaggaattaggcattccctatgaagaagctcaggcgttcattcagaaatactttcaaagctatcccaaagttaaagcatggatcgagaagactctcgaagaaggccgcacccgtggttacgtagagaccttatttggacgtcgccgctatgttcccgatttaaacgctcgcgtgaaaggcaagcgtgaagccgccgaacgcatggcgttcaacatgcctgtacagggcacggcagctgacctcatgaaacttgcaatggtgcgcctttttccacaattgcgtgaagttggtgcccgcatgctcttgcaggtccacgatgaactcttgttagaagcgccaaaagagcgtgcggaagaggtggcagccctcgcgaaagaagttatggaaggcgtgtggcccttagcggtgcctcttgaagtcgaagttggtattggcgaggattggctggctgccaaagga

SEQ ID NO: 3662 - protein, 841 aa, synthetic construct; identical to SEQ ID NO: 3634
  REGION 1..841: note = Variant of DNA polymerase I from Thermus sp. strain 2.9

SEQ ID NO: 3663 - DNA, 2523 bp, synthetic construct
  misc_feature 1..2523: note = Variant of DNA polymerase I from Thermus sp. strain 2.9
  source 1..2523: mol_type = other DNA
atgcaccatcatcatcatcatggcggtagcggcgtgttagaggtgttcgagcctaaaggtcgcgtgcttctggttgatggccatcatctcgcgtatcgtaacttctttgccctgaaaggattaaccaccagcagcggcgagccggtacagggtgtctacggctttgcaaagtcgctcctgaaagctctgaaagaagacggtgatgtggtgattgttgtctttgatgcgaaagcgccaagttttcgccacgaagcgtacgaagcttacaaagccgggcgtgctcctacgccggaagactttcctcgccaattggcgcttatgaaggaattagtggatttgcttggcctcgaacgcttggaagttcccggtttcgaggcagacgacgtattagcgactctcgcaaagaaagccgaacgcgagggctatgaagtccagatcttgacagcagatcgcgatcttttccagcttttatctccgcgcatctcggtgttacacccggatgggcatcgtatcaccccggaatggctctgggagaaatatggtttgcgtcccgaacaatgggtggattttcgcgccttagcaggcgatcctagcgacaatattccgggagttaaaggtatcggcgagaagacggcgctcaagctccttaaagaatgggggtcgttggagaacttgcttaagaatttagatcaggtcaaaccagagtcagtgcgtgagaagattcttgctcacctcgaagacctcaaattaagccgcgaattgtcccgtgtacgcaccgatttgccgctcgaagttgatttccaacgccgccgcgaacctgactgggagggtcttaaagcgtttttagagcgtcttgaatttggttcgctcttgcatgaattcggccttttagaaagcccgttaccagccgaagaagcaccttggccaccgcccgagggcgcgtttttaggttaccgtttgagtcgcccggaaccgatgtgggccgaattactggctcttgcagcgtctgcccagggacgtgtgtatcgcgcggaagaccctcatggtgcgctccgcggcctcttcgaagtccgtggactccttgccaaagacttagctgttgttgcattgcgcgaaggtcttgatttacctccgactgatgatccaatgcttcttgcgtacctcttggacccgtcaaacacgacgcccgaaggcgtagcccgtcgttacggcggcgagtggaccgaagatgcagcgaaacgcgcgttattggccgaacgtttgcacgccaatttattaggacgtttgcaaggcgaggagcgtctcctctggctttacgaagaagtggagaaaccattgagtcgcgtgctcgcgcatatggaagctaccggtgtcaaattagacgtggcgtatttggagaatctcagccttgaagttgctgcccacatgcgccgcttggaggaagaagtattccgtttagcaggccgttcctttcgccttaattctcgcgatcagttagaacgtgtgttgttcgatgaacttggtctccctcctatcggcaagacagagaagaccggtaaacgtagcacttcagcggcggttttagaagctcttcgcgaagtccatcccattgtggacaagatcttgcaataccgcgaactcgcgaaattgaaaggcacctatattgaccgtcttccggcattagtccacccgaaaacgggacgcctccatacccgcttcaaccaaacagccacggcgaccggtcgtttgtcctcctctgatccaaaccttcagaatattccagtacgtaccccgttgggccagaagatccgccgtgcgtttgtagctgaggagggttggcgtttagtggccctcgattatagccaaattgaattacgtgtccttgcccatctttctggcgatgagaacctcatccgcgtgtttgaggaaggcaaagacattcacactcaaacggcaagctggatgtttggattatcagctgaagcgatcgatcctttgatgcgtcgtgcagcgaagaccatcaatttcggtgttctctacggtatgagtgcctttcgtttgtcgcaggaattaggcattccctacgaagaagctcaggcgttcattcagaaatactttcaaagctatcccaaagttaaagcatggatcgagaagactctcgaagaaggccgcacccgtggttacgtagagaccttatttggacgtcgccgctatgttcccgatttaaacgctcgcgtgaaaggcaagcgtgaagccgccgaacgcatggcgttcaacatgcctgtacagggcacggcagctgacctcatgaaacttgcaatggtgcgcctttttccacaattgcgtgaagttggtgcccgcatgctcttgcaggtccacgatgaactcttgttagaagcgccaaaagagcgtgcggaagaggtggcagccctcgcgaaagaagttatggaaggcgtgtggcccttagcggtgcctcttgaagtcgaagttggtattggcgaggattggctggctgccaaagga

SEQ ID NO: 3664 - protein, 841 aa, synthetic construct; identical to SEQ ID NO: 3634
  REGION 1..841: note = Variant of DNA polymerase I from Thermus sp. strain 2.9

SEQ ID NO: 3665 - DNA, 2523 bp, synthetic construct; identical to SEQ ID NO: 3585
  misc_feature 1..2523: note = Variant of DNA polymerase I from Thermus sp. strain 2.9
  source 1..2523: mol_type = other DNA

SEQ ID NO: 3666 - protein, 841 aa, synthetic construct; identical to SEQ ID NO: 3586
  REGION 1..841: note = Variant of DNA polymerase I from Thermus sp. strain 2.9

SEQ ID NO: 3667 - DNA, 2523 bp, synthetic construct
  misc_feature 1..2523: note = Variant of DNA polymerase I from Thermus sp. strain 2.9
  source 1..2523: mol_type = other DNA
atgcaccatcatcatcatcatggcggtagcggcgtgttaccggtgttcgagcctaaaggtcgcgtgcttctggttgatggccatcatctcgcgtatcgtaacttctttgccctgaaaggattaaccaccagcagcggcgagccggtacagggtgtctacggctttgcaaagtcgctcctgaaagctctgaaagaagacggtgatgtggtgattgttgtctttgatgcgaaagcgccaagttttcgccacgaagcgtacgaagcttacaaagccgggcgtgctccaacgccggaagactttcctcgccaattggcgcttatgaaggaattagtggatttgcttggcctcgaacgcttggaagttcccggtttcgaggcagacgacgtattagcgactctcgcaaagaaagccgaacgtgagggctatgaagtccagatcttgacagcagatcgcgatcttttccagcttttatctccgcgcatctcggtgttacacccggaagggcatcgtatcaccccggaatggctctgggagaaatatggtttgcgtcccgaacaatgggtggattttcgcgccttagcaggcgatccgagcgacaatattccgggagttaaaggtatcggcgagaagacggcgctcaagctccttaaagaatgggggtcgttggagaacttgcttaagaatttagatcaggtcaaaccagagtcagtgcgtgagaagattcttgctcacctcgaagacctcaaattaagccgcgaattgtcccgtgtacgcaccgatttgccgctcgaagttgatttccaacgccgccgcgaacctgactgggagggtcttaaagcgtttttagagcgtcttgaatttggttcgctcttgcatgaattcggccttttagaaagcccgttaccagccgaagaagcaccttggccaccgcccgagtcagcgtttttaggttaccgtttgagtcgcccggaaccgatgtgggccgaattactggctcttgcagcgtctgcccagggacgtgtgtatcgcgcggaagaccctcatggtgcgctccgcggcctcttcgaagtccgtggactccttgccaaagacttagctgttgttgcattgcgcgaaggtcttgatttacctccgactgatgatccaatgcttcttgcgtacctcttggacccgtcaaacacgacgcccgaaggcgtagcccgtcgttacggcggcgagtggaccgaagatgcagcgaaacgcgcgttattggccgaacgtttgcacgccaatttattaggacgtttgcaaggcgaggaacgtctcctctggctttacgaagaagtggagaaaccattgagtcgcgtgctcgcgcatatggaagctaccggtgtcaaattagacgtggcgtatttggagaatctcagccttgaagttgctgcccacatgcgccgcttggaggaagaagtattccgtttagcaggccgttcctttcgccttaattctcgcgatcagttagaacgtgtgttgttcgatgaacttggtctccctcctatcggcaagacagagaagaccggtaaacgtagcacttcagcggcggttttagaagctcttcgcgaagtccatcccattgtggacaagatcttgcaataccgcgaactcgcgaaattgaaaggcacctatattgaccgtcttccggcattagtccacccgaaaacgggacgcctccatacccgcttcaaccaaacagccacggcgaccggtcgtttgtcctcctctgatccaaaccttcagaatattccagtacgtaccccattgggccagaagatccgccgtgcgtttgtagctgaggagggttggcgtttagtggccctcgattatagccaaattgaattacgtgtccttgcccatctttctggcgatgagaacctcatccgcgtgtttcaggaaggcaaagacattcacactcaaacggcaagctggatgtttggattatcagctgaagcgatcgatcctttgatgcgtcgtgcagcgaagaccatcaatttcggtgttctctacggtatgagtgcctttcgtttgtcgcaggaattaggcattccctatgaagaagctcaggcgttcattcagaaatactttcaaagctatcccaaagttaaagcatggatcgagaagactctcgaagaaggccgcacacgtggttacgtagagaccttatttggacgtcgccgctatgttcccgatttaaacgctcgcgtgaaaggcaagcgtgaagccgccgaacgcatggcgttcaacatgcctgtacagggcacggcagctgacctcatgaaacttgcaatggtgcgcctttttccacaattgcgtgaagttggtgcccgcatgctcttgcaggtccacgatgaactcttgttagaagcgccaaaagagcgtgcggaagaggtggcagccctcgcgaaagaagttatggaaggcgtgtggcccttagcggtgcctcttgaagtcgaagttggtattggcgaggattggctggctgccaaagga

SEQ ID NO: 3668 - protein, 841 aa, synthetic construct; identical to SEQ ID NO: 3330
  REGION 1..841: note = Variant of DNA polymerase I from Thermus sp. strain 2.9

SEQ ID NO: 3669 - DNA, 2523 bp, synthetic construct
  misc_feature 1..2523: note = Variant of DNA polymerase I from Thermus sp. strain 2.9
  source 1..2523: mol_type = other DNA
atgcaccatcatcatcatcatggcggtagcggcgtgttaccggtgttcgagcctaaaggtcgcgtgcttctggttgatggccatcatctcgcgtatcgtaacttctttgccctgaaaggattaaccaccagcagcggcgagccggtacagggtgtctacggctttgcaaagtcgctcctgaaagctctgaaagaagacggtgatgtggtgattgttgtctttgatgcgaaagcgccaagttttcgccacgaagcgtacgaagcttacaaagccgggcgtgctccaacgccggaagactttcctcgccaattggcgcttatgaaggaattagtggatttgcttggcctcgaacgcttggaagttcccggtttcgaggcagacgacgtattagcgactctcgcaaagaaagccgaacgtgagggctatgaagtccagatcttgacagcagatcgcgatcttttccagcttttatctccgcgcatctcggtgttacacccggaagggcatcgtatcaccccggaatggctctgggagaaatatggtttgcgtcccgaacaatgggtggattttcgcgccttagcaggcgatccgagcgacaatattccgggagttaaaggtatcggcgagaagacggcgctcaagctccttaaagaatgggggtcgttggagaacttgcttaagaatttagatcaggtcaaaccagagtcagtgcgtgagaagattcttgctcacctcgaagacctcaaattaagccgcgaattgtcccgtgtacgcaccgatttgccgctcgaagttgatttccaacgccgccgcgaacctgactgggagggtcttaaagcgtttttagagcgtcttgaatttggttcgctcttgcatgaattcggccttttagaaagcccgttaccagccgaagaagcaccttggccaccgcccgagggcgcgtttttaggttaccgtttgagtcgcccggaaccgatgtgggccgaattactggctcttgcagcgtctgcccagggacgtgtgtatcgcgcggaagaccctcatggtgcgctccgcggcctcttcgaagtccgtggactccttgccaaagacttagctgttgttgcattgcgcgaaggtcttgatttacctccgactgatgatccaatgcttcttgcgtacctcttggacccgtcaaacacgacgcccgaaggcgtagcccgtcgttacggcggcgagtggaccgaagatgcagcgaaacgcgcgttattggccgaacgtttgcacgccaatttattatctcgtttgcaaggcgaggaacgtctcctctggctttacgaagaagtggagaaaccattgagtcgcgtgctcgcgcatatggaagctaccggtgtcaaattagacgtggcgtatttggagaatctcagccttgaagttgctgcccacatgcgccgcttggaggaagaagtattccgtttagcaggccgttcctttcgccttaattctcgcgatcagttagaacgtgtgttgttcgatgaacttggtctccctcctatcggcaagacagagaagaccggtaaacgtagcacttcagcggcggttttagaagctcttcgcgaagtccatcccattgtggacaagatcttgcaataccgcgaactcgcgaaattgaaaggcacctatattgaccgtcttccggcattagtccacccgaaaacgggacgcctccatacccgcttcaaccaaacagccacggcgaccggtcgtttgtcctcctctgatccaaaccttcagaatattccagtacgtaccccattgggccagaagatccgccgtgcgtttgtagctgaggagggttggcgtttagtggccctcgattatagccaaattgaattacgtgtccttgcccatctttctggcgatgagaacctcatccgcgtgtttcaggaaggcaaagacattcacactcaaacggcaagctggatgtttggattatcagctgaagcgatcgatcctttgatgcgtcgtgcagcgaagaccatcaatttcggtgttctctacggtatgagtgcctttcgtttgtcgcaggaattaggcattccctatgaagaagctcaggcgttcattcagaaatactttcaaagctatcccaaagttaaagcatggatcgagaagactctcgaagaaggccgcacacgtggttacgtagagaccttatttggacgtcgccgctatgttcccgatttaaacgctcgcgtgaaaggcaagcgtgaagccgccgaacgcatggcgttcaacatgcctgtacagggcacggcagctgacctcatgaaacttgcaatggtgcgcctttttccacaattgcgtgaagttggtgcccgcatgctcttgcaggtccacgatgaactcttgttagaagcgccaaaagagcgtgcggaagaggtggcagccctcgcgaaagaagttatggaaggcgtgtggcccttagcggtgcctcttgaagtcgaagttggtattggcgaggattggctggctgccaaagga

SEQ ID NO: 3670 - protein, 841 aa, synthetic construct; identical to SEQ ID NO: 3592
  REGION 1..841: note = Variant of DNA polymerase I from Thermus sp. strain 2.9

SEQ ID NO: 3671 - DNA, 2523 bp, synthetic construct
  misc_feature 1..2523: note = Variant of DNA polymerase I from Thermus sp. strain 2.9
  source 1..2523: mol_type = other DNA
atgcaccatcatcatcatcatggcggtagcggcgtgttaccggtgttcgagcctaaaggtcgcgtgcttctggttgatggccatcatctcgcgtatcgtaacttctttgccctgaaaggattaaccaccagcagcggcgagccggtacagggtgtctacggctttgcaaagtcgctcctgaaagctctgaaagaagacggtgatgtggtgattgttgtctttgatgcgaaagcgccaagttttcgccacgaagcgtacgaagcttacaaagccgggcgtgctccaacgccggaagactttcctcgccaattggcgcttatgaaggaattagtggatttgcttggcctcgaacgcttggaagttcccggtttcgaggcagacgacgtattagcgactctcgcaaagaaagccgaacgtgagggctatgaagtccagatcttgacagcagatcgcgatcttttccagcttttatctccgcgcatctcggtgttacacccggaagggcatcgtatcaccccggaatggctctgggagaaatatggtttgcgtcccgaacaatgggtggattttcgcgccttagcaggcgatccgagcgacaatattccgggagttaaaggtatcggcgagaagacggcgctcaagctccttaaagaatgggggtcgttggagaacttgcttaagaatttagatcaggtcaaaccagagtcagtgcgtttgaagattcttgctcacctcgaagacctcaaattaagccgcgaattgtcccgtgtacgcaccgatttgccgctcgaagttgatttccaacgccgccgcgaacctgactgggagggtcttaaagcgtttttagagcgtcttgaatttggttcgctcttgcatgaattcggccttttagaaagcccgttaccagccgaagaagcaccttggccaccgcccgagggcgcgtttttaggttaccgtttgagtcgcccggaaccgatgtgggccgaattactggctcttgcagcgtctgcccagggacgtgtgtatcgcgcggaagaccctcatggtgcgctccgcggcctcttcgaagtccgtggactccttgccaaagacttagctgttgttgcattgcgcgaaggtcttgatttacctccgactgatgatccaatgcttcttgcgtacctcttggacccgtcaaacacgacgcccgaaggcgtagcccgtcgttacggcggcgagtggaccgaagatgcagcgaaacgcgcgttattggccgaacgtttgcacgccaatttattaggacgtttgcaaggcgaggaacgtctcctctggctttacgaagaagtggagaaaccattgagtcgcgtgctcgcgcatatggaagctaccggtgtcaaattagacgtggcgtatttggagaatctcagccttgaagttgctgcccacatgcgccgcttggaggaagaagtattccgtttagcaggccgttcctttcgccttaattctcgcgatcagttagaacgtgtgttgttcgatgaacttggtctccctcctatcggcaagacagagaagaccggtaaacgtagcacttcagcggcggttttagaagctcttcgcgaagtccatcccattgtggacaagatcttgcaataccgcgaactcgcgaaattgaaaggcacctatattgaccgtcttccggcattagtccacccgaaaacgggacgcctccatacccgcttcaaccaaacagccacggcgaccggtcgtttgtcctcctctgatccaaaccttcagaatattccagtacgtaccccattgggccagaagatccgccgtgcgtttgtagctgaggagggttggcgtttagtggccctcgattatagccaaattgaattacgtgtccttgcccatctttctggcgatgagaacctcatccgcgtgtttcaggaaggcaaagacattcacactcaaacggcaagctggatgtttggattatcagctgaagcgatcgatcctttgatgcgtcgtgcagcgaagaccatcaatttcggtgttctctacggtatgagtgcctttcgtttgtcgcaggaattaggcattccctatgaagaagctcaggcgttcattcagaaatactttcaaagctatcccaaagttaaagcatggatcgagaagactctcgaagaaggccgcacacgtggttacgtagagaccttatttggacgtcgccgctatgttcccgatttaaacgctcgcgtgaaaggcaagcgtgaagccgccgaacgcatggcgttcaacatgcctgtacagggcacggcagctgacctcatgaaacttgcaatggtgcgcctttttccacaattgcgtgaagttggtgcccgcatgctcttgcaggtccacgatgaactcttgttagaagcgccaaaagagcgtgcggaagaggtggcagccctcgcgaaagaagttatggaaggcgtgtggcccttagcggtgcctcttgaagtcgaagttggtattggcgaggattggctggctgccaaagga

SEQ ID NO: 3672 - protein, 841 aa, synthetic construct
  REGION 1..841: note = Variant of DNA polymerase I from Thermus sp. strain 2.9
MHHHHHHGGSGVLPVFEPKGRVLLVDGHHLAYRNFFALKGLTTSSGEPVQGVYGFAKSLLKALKEDGDVVIVVFDAKAPSFRHEAYEAYKAGRAPTPEDFPRQLALMKELVDLLGLERLEVPGFEADDVLATLAKKAEREGYEVQILTADRDLFQLLSPRISVLHPEGHRITPEWLWEKYGLRPEQWVDFRALAGDPSDNIPGVKGIGEKTALKLLKEWGSLENLLKNLDQVKPESVRLKILAHLEDLKLSRELSRVRTDLPLEVDFQRRREPDWEGLKAFLERLEFGSLLHEFGLLESPLPAEEAPWPPPEGAFLGYRLSRPEPMWAELLALAASAQGRVYRAEDPHGALRGLFEVRGLLAKDLAVVALREGLDLPPTDDPMLLAYLLDPSNTTPEGVARRYGGEWTEDAAKRALLAERLHANLLGRLQGEERLLWLYEEVEKPLSRVLAHMEATGVKLDVAYLENLSLEVAAHMRRLEEEVFRLAGRSFRLNSRDQLERVLFDELGLPPIGKTEKTGKRSTSAAVLEALREVHPIVDKILQYRELAKLKGTYIDRLPALVHPKTGRLHTRFNQTATATGRLSSSDPNLQNIPVRTPLGQKIRRAFVAEEGWRLVALDYSQIELRVLAHLSGDENLIRVFQEGKDIHTQTASWMFGLSAEAIDPLMRRAAKTINFGVLYGMSAFRLSQELGIPYEEAQAFIQKYFQSYPKVKAWIEKTLEEGRTRGYVETLFGRRRYVPDLNARVKGKREAAERMAFNMPVQGTAADLMKLAMVRLFPQLREVGARMLLQVHDELLLEAPKERAEEVAALAKEVMEGVWPLAVPLEVEVGIGEDWLAAKG

SEQ ID NO: 3673 - DNA, 2523 bp, synthetic construct
  misc_feature 1..2523: note = Variant of DNA polymerase I from Thermus sp. strain 2.9
  source 1..2523: mol_type = other DNA
atgcaccatggtcatcatcatggcggtagcggcgtgttaccggtgttcgagcctaaaggtcgcgtgcttctggttgatggccatcatctcgcgtatcgtaacttctttgccctgaaaggattaaccaccagcagcggcgagccggtacagggtgtctacggctttgcaaagtcgctcctgaaagctctgaaagaagacggtgatgtggtgattgttgtctttgatgcgaaagcgccaagttttcgccacgaagcgtacgaagcttacaaagccgggcgtgctccaacgccggaagactttcctcgccaattggcgcttatgaaggaattagtggatttgcttggcctcgaacgcttggaagttcccggtttcgaggcagacgacgtattagcgactctcgcaaagaaagccgaacgtgagggctatgaagtccagatcttgacagcagatcgcgatcttttccagcttttatctccgcgcatctcggtgttacacccggaagggcatcgtatcaccccggaatggctctgggagaaatatggtttgcgtcccgaacaatgggtggattttcgcgccttagcaggcgatccgagcgacaatattccgggagttaaaggtatcggcgagaagacggcgctcaagctccttaaagaatgggggtcgttggagaacttgcttaagaatttagatcaggtcaaaccagagtcagtgcgtgagaagattcttgctcacctcgaagacctcaaattaagccgcgaattgtcccgtgtacgcaccgatttgccgctcgaagttgatttccaacgccgccgcgaacctgactgggagggtcttaaagcgtttttagagcgtcttgaatttggttcgctcttgcatgaattcggccttttagaaagcccgttaccagccgaagaagcaccttggccaccgcccgagggcgcgtttttaggttaccgtttgagtcgcccggaaccgatgtgggccgaattactggctcttgcagcgtctgcccagggacgtgtgtatcgcgcggaagaccctcatggtgcgctccgcggcctcttcgaagtccgtggactccttgccaaagacttagctgttgttgcattgcgcgaaggtcttgatttacctccgactgatgatccaatgcttcttgcgtacctcttggacccgtcaaacacgacgcccgaaggcgtagcccgtcgttacggcggcgagtggaccgaagatgcagcgaaacgcgcgttattggccgaacgtttgcacgccaatttattaggacgtttgcaaggcgaggaacgtctcctctggctttacgaagaagtggagaaaccattgagtcgcgtgctcgcgcatatggaagctaccggtgtcaaattagacgtggcgtatttggagaatctcagccttgaagttgctgcccacatgcgccgcttggaggaagaagtattccgtttagcaggccgttcctttcgccttaattctcgcgatcagttagaacgtgtgttgttcgatgaacttggtctccctcctatcggcaagacagagaagaccggtaaacgtagcacttcagcggcggttttagaagctcttcgcgaagtccatcccattgtggacaagatcttgcaataccgcgaactcgcgaaattgaaaggcacctatattgaccgtcttccggcattagtccacccgaaaacgggacgcctccatacccgcttcaaccaaacagccacggcgaccggtcgtttgtcctcctctgatccaaaccttcagaatattccagtacgtaccccattgggccagaagatccgccgtgcgtttgtagctgaggagggttggcgtttagtggccctcgattatagccaaattgaattacgtgtccttgcccatctttctggcgatgagaacctcatccgcgtgtttcaggaaggcaaagacattcacactcaaacggcaagctggatgtttggattatcagctgaagcgatcgatcctttgatgcgtcgtgcagcgaagaccatcaatttcggtgttctctacggtatgagtgcctttcgtttgtcgcaggaattaggcattccctatgaagaagctcaggcgttcattcagaaatactttcaaagctatcccaaagttaaagcatggatcgagaagactctcgaagaaggccgcacacgtggttacgtagagaccttatttggacgtcgccgctatgttcccgatttaaacgctcgcgtgaaaggcaagcgtgaagccgccgaacgcatggcgttcaacatgcctgtacagggcacggcagctgacctcatgaaacttgcaatggtgcgcctttttccacaattgcgtgaagttggtgcccgcatgctcttgcaggtccacgatgaactcttgttagaagcgccaaaagagcgtgcggaagaggtggcagccctcgcgaaagaagttatggaaggcgtgtggcccttagcggtgcctcttgaagtcgaagttggtattggcgaggattggctggctgccaaagga

SEQ ID NO: 3674 - protein, 841 aa, synthetic construct; identical to SEQ ID NO: 3276
  REGION 1..841: note = Variant of DNA polymerase I from Thermus sp. strain 2.9

SEQ ID NO: 3675 - DNA, 2523 bp, synthetic construct
  misc_feature 1..2523: note = Variant of DNA polymerase I from Thermus sp. strain 2.9
  source 1..2523: mol_type = other DNA
atgcaccatcatcatcatcatggcggtagcggcgtgttagaggtgttcgagcctaaaggtcgcgtgcttctggttgatggccatcatctcgcgtatcgtaacttctttgccctgaaaggattaaccaccagcagcggcgagccggtacagggtgtctacggctttgcaaagtcgctcctgaaagctctgaaagaagacggtgatgtggtgattgttgtctttgatgcgaaagcgccaagttttcgccacgaagcgtacgaagcttacaaagccgggcgtgctccaacgccggaagactttcctcgccaattggcgcttatgaaggaattagtggatttgcttggcctcgaacgcttggaagttcccggtttcgaggcagacgacgtattagcgactctcgcaaagaaagccgaacgtgagggctatgaagtccagatcttgacagcagatcgcgatcttttccagcttttatctccgcgcatctcggtgttacacccggatgggcatcgtatcaccccggaatggctctgggagaaatatggtttgcgtcccgaacaatgggtggattttcgcgccttagcaggcgatccgagcgacaatattccgggagttaaaggtatcggcgagaagacggcgctcaagctccttaaagaatgggggtcgttggagaacttgcttaagaatttagatcaggtcaaaccagagtcagtgcgtgagaagattcttgctcacctcgaagacctcaaattaagccgcgaattgtcccgtgtacgcaccgatttgccgctcgaagttgatttccaacgccgccgcgaacctgactgggagggtcttaaagcgtttttagagcgtcttgaatttggttcgctcttgcatgaattcggccttttagaaagcccgttaccagccgaagaagcaccttggccaccgcccgagggcgcgtttttaggttaccgtttgagtcgcccggaaccgatgtgggccgaattactggctcttgcagcgtctgcccagggacgtgtgtatcgcgcggaagaccctcatggtgcgctccgcggcctcttcgaagtccgtggactccttgccaaagacttagctgttgttgcattgcgcgaaggtcttgatttacctccgactgatgatccaatgcttcttgcgtacctcttggacccgtcaaacacgacgcctgaaggcgtagcccgtcgttacggcggcgagtggaccgaagatgcagcgaaacgcgcgttattggccgaacgtttgcacgccaatttattaggacgtttgcaaggcgaggaacgtctcctctggctttacgaagaagtggagaaaccattgagtcgcgtgctcgcgcatatggaagctaccggtgtcaaattagacgtggcgtatttggagaatctcagccttgaagttgctgcccacatgcgccgcttggaggaagaagtattccgtttagcaggccgttcctttcgccttaattctcgcgatcagttagaacgtgtgttgttcgatgaacttggtctccctcctatcggcaagacagagaagaccggtaaacgtagcacttcagcggcggttttagaagctcttcgcgaagtccatcccattgtggacaagatcttgcaataccgcgaactcgcgaaattgaaaggcacctatattgaccgtcttccggcattagtccacccgaaaacgggacgcctccatacccgcttcaaccaaacagccacggcgaccggtcgtttgtcctcctctgatccaaaccttcagaatattccagtacgtaccccattgggccagaagatccgccgtgcgtttgtagctgaggagggttggcgtttagtggccctcgattatagccaaattgaattacgtgtccttgcccatctttctggcgatgagaacctcatccgcgtgtttcaggaaggcaaagacattcacactcaaacggcaagctggatgtttggattatcagctgaagcgatcgatcctttgatgcgtcgtgcagcgaagaccatcaatttcggtgttctctacggtatgagtgcctttcgtttgtcgcaggaattaggcattcccaaagaagaagctcaggcgttcattcagaaatactttcaaagctatcccaaagttaaagcatggatcgagaagactctcgaagaaggccgcacccgtggttacgtagagaccttatttggacgtcgccgctatgttcccgatttaaacgctcgcgtgaaaggcaagcgtgaagccgccgaacgcatggcgttcaacatgcctgtacagggcacggcagctgacctcatgaaacttgcaatggtgcgcctttttccacaattgcgtgaagttggtgcccgcatgctcttgcaggtccacgatgaactcttgttagaagcgccaaaagagcgtgcggaagaggtggcagccctcgcgaaagaagttatggaaggcgtgtggcccttagcggtgcctcttgaagtcgaagttggtattggcgaggattggctggctgccaaagga

SEQ ID NO: 3676 - protein, 841 aa, synthetic construct
  REGION 1..841: note = Variant of DNA polymerase I from Thermus sp. strain 2.9
MHHHHHHGGSGVLEVFEPKGRVLLVDGHHLAYRNFFALKGLTTSSGEPVQGVYGFAKSLLKALKEDGDVVIVVFDAKAPSFRHEAYEAYKAGRAPTPEDFPRQLALMKELVDLLGLERLEVPGFEADDVLATLAKKAEREGYEVQILTADRDLFQLLSPRISVLHPDGHRITPEWLWEKYGLRPEQWVDFRALAGDPSDNIPGVKGIGEKTALKLLKEWGSLENLLKNLDQVKPESVREKILAHLEDLKLSRELSRVRTDLPLEVDFQRRREPDWEGLKAFLERLEFGSLLHEFGLLESPLPAEEAPWPPPEGAFLGYRLSRPEPMWAELLALAASAQGRVYRAEDPHGALRGLFEVRGLLAKDLAVVALREGLDLPPTDDPMLLAYLLDPSNTTPEGVARRYGGEWTEDAAKRALLAERLHANLLGRLQGEERLLWLYEEVEKPLSRVLAHMEATGVKLDVAYLENLSLEVAAHMRRLEEEVFRLAGRSFRLNSRDQLERVLFDELGLPPIGKTEKTGKRSTSAAVLEALREVHPIVDKILQYRELAKLKGTYIDRLPALVHPKTGRLHTRFNQTATATGRLSSSDPNLQNIPVRTPLGQKIRRAFVAEEGWRLVALDYSQIELRVLAHLSGDENLIRVFQEGKDIHTQTASWMFGLSAEAIDPLMRRAAKTINFGVLYGMSAFRLSQELGIPKEEAQAFIQKYFQSYPKVKAWIEKTLEEGRTRGYVETLFGRRRYVPDLNARVKGKREAAERMAFNMPVQGTAADLMKLAMVRLFPQLREVGARMLLQVHDELLLEAPKERAEEVAALAKEVMEGVWPLAVPLEVEVGIGEDWLAAKG

SEQ ID NO: 3677 - DNA, 2523 bp, synthetic construct
  misc_feature 1..2523: note = Variant of DNA polymerase I from Thermus sp. strain 2.9
  source 1..2523: mol_type = other DNA
atgcaccatcatcatcatcatggcggtagcggcgtgttagaggtgttcgagcctaaaggtcgcgtgcttctggttgatggccatcatctcgcgtatcgtaacttctttgccctgaaaggattaaccaccagcagcggcgagccggtacatggtgtctacggctttgcaaagtcgctcctgaaagctctgaaagaagacggtgatgtggtgattgttgtctttgatgcgaaagcgccaagttttcgccacgaagcgtacgaagcttacaaagccgggcgtgctccaacgccggaagactttcctcgccaattggcgcttatgaaggaattagtggatttgcttggcctcgaacgcttggaagttcccggtttcgaggcagacgacgtattagcgactctcgcaaagaaagccgaacgtgagggctatgaagtccagatcttgacagcagatcgcgatcttttccagcttttatctccgcgcatctcggtgttacacccggaagggcatcgtatcaccccggaatggctctgggagaaatatggtttgcgtcccgaacaatgggtggattttcgcgccttagcaggcgatccgagcgacaatattccgggagttaaaggtatcggcgagaagacggcgctcaagctccttaaagaatgggggtcgttggagaacttgcttaagaatttagatcaggtcaaaccagagtcagtgcgtgagaagattcttgctcacctcgaagacctcaagttaagccgcgaattgtcccgtgtacgcaccgatttgccgctcgaagttgatttccaacgccgccgcgaacctgactgggagggtcttaaagcgtttttagagcgtcttgaatttggttcgctcttgcatgaattcggccttttagaaagcccgttaccagccgaagaagcaccttggccaccgcccgagggcgcgtttttaggttaccgtttgagtcgcccggaaccgatgtgggccgaattactggctcttgcagcgtctgcccagggacgtgtgtatcgcgcggaagaccctcatggtgcgctccgcggcctcttcgaagtccgtggactccttgccaaagacttagctgttgttgcattgcgcgaaggtcttgatttacctccgactgatgatccaatgcttcttgcgtacctcttggacccgtcaaacacgacgcccgaaggcgtagcccgtcgttacggcggcgagtggaccgaagatgcagcgaaacgcgcgttattggccgaacgtttgcacgccaatttattaggacgtttgcaaggcgaggagcgtctcctctggctttacgaagaagtggagaaaccattgagtcgcgtgctcgcgcatatggaagctaccggtgtcaaattagacgtggcgtatttggagaatctcagccttgaagttgctgcccacatgcgccgcttggaggaagaagtattccgtttagcaggccgttcctttcgccttaattctcgcgatcagttagaacgtgtgttgttcgatgaacttggtctccctcctatcggcaagacagagaagaccggtaaacgtagcacttcagcggcggttttagaagctcttcgcgaagtccatcccattgtggacaagatcttgcaataccgcgaactcgcgaaattgaaaggcacctatattgaccgtcttccggcattagtccacccgaaaacgggacgcctccatacccgcttcaaccaaacagccacggcgaccggtcgtttgtcctcctctgatccaaaccttcagaatattccagtacgtaccaaattgggccagaagatccgccgtgcgtttgtagctgaggagggttggcgtttagtggccctcgattatagccaaattgaattacgtgtccttgcccatctttctggcgatgagaacctcatccgcgtgtttcaggaaggcaaagacattcacactcaaacggcaagctggatgtttggattatcagctgaagcgatcgatcctttgatgcgtcgtgcagcgaagaccatcaatttcggtgttctctacggtatgagtgcctttcgtttgtcgcaggaattaggcattcccaaagaagaagctcaggcgttcattcagaaatactttcaaagctatcccaaagttaaagcatggatcgagaagactctcgaagaaggccgcacccgtggttacgtagagaccttatttggacgtcgccgctatgttcccgatttaaacgctcgcgtgaaaggcaagcgtgaagccgccgaacgcatggcgttcaacatgcctgtacagggcacggcagctgacctcatgaaacttgcaatggtgcgcctttttccacaattgcgtgaagttggtgcccgcatgctcttgcaggtccacgatgaactcttgttagaagcgccaaaagagcgtgcggaagaggtggcagccctcgcgaaagaagttatggaaggcgtgtggcccttagcggtgcctcttgaagtcgaagttggtattggcgaggattggctggctgccaaagga

SEQ ID NO: 3678 - protein, 841 aa, synthetic construct
  REGION 1..841: note = Variant of DNA polymerase I from Thermus sp. strain 2.9
MHHHHHHGGSGVLEVFEPKGRVLLVDGHHLAYRNFFALKGLTTSSGEPVHGVYGFAKSLLKALKEDGDVVIVVFDAKAPSFRHEAYEAYKAGRAPTPEDFPRQLALMKELVDLLGLERLEVPGFEADDVLATLAKKAEREGYEVQILTADRDLFQLLSPRISVLHPEGHRITPEWLWEKYGLRPEQWVDFRALAGDPSDNIPGVKGIGEKTALKLLKEWGSLENLLKNLDQVKPESVREKILAHLEDLKLSRELSRVRTDLPLEVDFQRRREPDWEGLKAFLERLEFGSLLHEFGLLESPLPAEEAPWPPPEGAFLGYRLSRPEPMWAELLALAASAQGRVYRAEDPHGALRGLFEVRGLLAKDLAVVALREGLDLPPTDDPMLLAYLLDPSNTTPEGVARRYGGEWTEDAAKRALLAERLHANLLGRLQGEERLLWLYEEVEKPLSRVLAHMEATGVKLDVAYLENLSLEVAAHMRRLEEEVFRLAGRSFRLNSRDQLERVLFDELGLPPIGKTEKTGKRSTSAAVLEALREVHPIVDKILQYRELAKLKGTYIDRLPALVHPKTGRLHTRFNQTATATGRLSSSDPNLQNIPVRTKLGQKIRRAFVAEEGWRLVALDYSQIELRVLAHLSGDENLIRVFQEGKDIHTQTASWMFGLSAEAIDPLMRRAAKTINFGVLYGMSAFRLSQELGIPKEEAQAFIQKYFQSYPKVKAWIEKTLEEGRTRGYVETLFGRRRYVPDLNARVKGKREAAERMAFNMPVQGTAADLMKLAMVRLFPQLREVGARMLLQVHDELLLEAPKERAEEVAALAKEVMEGVWPLAVPLEVEVGIGEDWLAAKG

SEQ ID NO: 3679 - DNA, 2523 bp, synthetic construct
  misc_feature 1..2523: note = Variant of DNA polymerase I from Thermus sp. strain 2.9
  source 1..2523: mol_type = other DNA
atgcaccatcatcatcatcatggcggtagcggcgtgttaccggtgttcgagcctaaaggtcgcgtgcttctggttgatggccatcatctcgcgtatcgtaacttctttgccctgaaaggattaaccaccagcagcggcgagccggtacagggtgtctacggctttgcaaagtcgctcctgaaagctctgaaagaagacggtgatgtggtgattgttgtctttgatgcgaaagcgccaagttttcgccacgaagcgtacgaagcttacaaagccgggcgtgctccaacgccggaagactttcctcgccaattggcgcttatgaaggaattagtggatttgcttggcctcgaacgcttggaagttcccggtttcgaggcagacgacgtattagcgactctcgcaaagaaagccgaacgtgagggctatgaagtccagatcttgacagcagatcgcgatcttttccagcttttatctccgcgcatctcggtgttacacccggaagggcatcgtatcaccccggaatggctctgggagaaatatggtttgcgtcccgaacaatgggtggattttcgcgccttagcaggcgatccgagcgacaatattccgggagttaaaggtatcggcgagaagacggcgctcaagctccttaaagaatgggggtcgttggagaacttgcttaagaatttagatcaggtcaaaccagagtcagtgcgtgagaagattcttgctcacctcgaagacctcaaattaagccgcgaattgtcccgtgtacgcaccgatttgccgctcgaagttgatttccaacgccgccgcgaacctgactgggagggtcttaaagcgtttttagagcgtcttgaatttggttcgctcttgcatgaattcggccttttagaaagcccgttaccagccgaagaagcaccttggccaccgcccgagggcgcgtttttaggttaccgtttgagtcgcccggaaccgatgtgggccgaattactggctcttgcagcgtctgcccagggacgtgtgtatcgcgcggaagaccctcatggtgcgctccgcggcctcttcgaagtccgtggactccttgccaaagacttagctgttgttgcattgcgcgaaggtcttgatttacctccgactgatgatccaatgcttcttgcgtacctcttggacccgtcaaacacgacgcccgaaggcgtagcccgtcgttacggcggcgagtggaccgaagatgcagcgaaacgcgcgttattggccgaacgtttgcacgccaatttattaggacgtttgcaaggcgaggaacgtctcctctggctttacgaagaagtggagaaaccattgagtcgcgtgctcgcgcatatggaagctaccggtgtcaaattagacgtggcgtatttggagaatctcagccttgaagttgctgcccacatgcgccgcttggaggaagaagtattccgtttagcaggccgttcctttcgccttaattctcgcgatcagttagaacgtgtgttgttcgatgaacttggtctccctcctatcggcaagacagagaagaccggtaaacgtagcacttcagcggcggttttagaagctcttcgcgaagtccatcccattgtggacaagatcttgcaataccgcgaactcgcgaaattgaaaggcacctatattgaccgtcttccggcattagtccacccgaaaacgggacgcctccatacccgcttcaaccaaacagccacggcgaccggtcgtttgtcctcctctgatccaaaccttcagaatattccagtacgtaccccattgggccagaagatccgccgtgcgtttgtagctgaggagggttggcgtttagtggccctcgattatagccaaattgaattacgtgtccttgcccatctttctggcgatgagaacctcatccgcgtgtttcaggaaggcaaagacattcacactcaaacggcaagctggatgtttggattatcagctgaagcgatcgatcctttgatgcgtcgtgcagcgaagaccatcaatttcggtgttctctacggtatgagtgcctttcgtttgtcgcaggaattaggcattccctatgaagaagctcaggcgttcattcagaaatactttcaaagctatcccaaagttaaagcatggatcgagaagactctcgaagaaggccgcacacgtggttacgtagagaccttatttggacgtcgccgctatgttcccgatttaaacgctcgcgtgaaaggcaagcgtgaagccgccgaacgcatggcgttcaacatgcctgtacagggcacggcagctgacctcatgaaacttgcaatggtgcgcctttttccacaattgcgtgaagttggtgcccgcatgctcttgcaggtccacgatgaactcttgttagaagcgccaaaagagcgtgcggaagaggtggcagccctcgcgaaagaagttatggaattggtgtggcccttagcggtgcctcttgaagtcgaagttggtattggcgaggattggctggctgccaaagga

SEQ ID NO: 3680 - protein, 841 aa, synthetic construct
  REGION 1..841: note = Variant of DNA polymerase I from Thermus sp. strain 2.9
MHHHHHHGGSGVLPVFEPKGRVLLVDGHHLAYRNFFALKGLTTSSGEPVQGVYGFAKSLLKALKEDGDVVIVVFDAKAPSFRHEAYEAYKAGRAPTPEDFPRQLALMKELVDLLGLERLEVPGFEADDVLATLAKKAEREGYEVQILTADRDLFQLLSPRISVLHPEGHRITPEWLWEKYGLRPEQWVDFRALAGDPSDNIPGVKGIGEKTALKLLKEWGSLENLLKNLDQVKPESVREKILAHLEDLKLSRELSRVRTDLPLEVDFQRRREPDWEGLKAFLERLEFGSLLHEFGLLESPLPAEEAPWPPPEGAFLGYRLSRPEPMWAELLALAASAQGRVYRAEDPHGALRGLFEVRGLLAKDLAVVALREGLDLPPTDDPMLLAYLLDPSNTTPEGVARRYGGEWTEDAAKRALLAERLHANLLGRLQGEERLLWLYEEVEKPLSRVLAHMEATGVKLDVAYLENLSLEVAAHMRRLEEEVFRLAGRSFRLNSRDQLERVLFDELGLPPIGKTEKTGKRSTSAAVLEALREVHPIVDKILQYRELAKLKGTYIDRLPALVHPKTGRLHTRFNQTATATGRLSSSDPNLQNIPVRTPLGQKIRRAFVAEEGWRLVALDYSQIELRVLAHLSGDENLIRVFQEGKDIHTQTASWMFGLSAEAIDPLMRRAAKTINFGVLYGMSAFRLSQELGIPYEEAQAFIQKYFQSYPKVKAWIEKTLEEGRTRGYVETLFGRRRYVPDLNARVKGKREAAERMAFNMPVQGTAADLMKLAMVRLFPQLREVGARMLLQVHDELLLEAPKERAEEVAALAKEVMELVWPLAVPLEVEVGIGEDWLAAKG

SEQ ID NO: 3681 - DNA, 2523 bp, synthetic construct
  misc_feature 1..2523: note = Variant of DNA polymerase I from Thermus sp. strain 2.9
  source 1..2523: mol_type = other DNA
atgcaccatcatcatcatcatggcggtagcggcgtgttacctgtgttcgagcctaaaggtcgcgtgcttctggttgatggccatcatctcgcgtatcgtaacttctttgccctgaaaggattaaccaccagcagcggcgagccggtacagggtgtctacggctttgcaaagtcgctcctgaaagctctgaaagaagacggtgatgtggtgattgttgtctttgatgcgaaagcgccaagttttcgccacgaagcgtacgaagcttacaaagccgggcgtgctgatacgccggaagactttcctcgccaattggcgcttatgaaggaattagtggatttgcttggcctcgaacgcttggaagttcccggtttcgaggcagacgacgtattagcgactctcgcaaagaaagccgaacgcgagggctatgaagtccagatcttgacagcagatcgcgatcttttccagcttttatctccgcgcatctcggtgttacacccggatgggcatcgtatcaccccggaatggctctgggagaaatatggtttgcgtcccgaacaatgggtggattttcgcgccttagcaggcgataaaagcgacaatattccgggagttaaaggtatcggcgagaagacggcgctcaagctccttaaagaatgggggtcgttggagaacttgcttaagaatttagatcaggtcaaaccagagtcagtgcgtgagaagattcttgctcacctcgaagacctcaaattaagccgcgaattgtcccgtgtacgcaccgatttgccgctcgaagttgatttccaacgccgccgcgaacctgactgggagggtcttaaagcgtttttagagcgtcttgaatttggttcgctcttgcatgaattcggccttttagaaagcccgttaccagccgaagaagcaccttggccaccgcccgagggcgcgtttttaggttaccgtttgagtcgcccggaaccgatgtgggccgaattactggctcttgcagcgtctgcccagggacgtgtgtatcgcgcggaagaccctcatggtgcgctccgcggcctcttcgaagtccgtggactccttgccaaagacttagctgttgttgcattgcgcgaaggtcttgatttacctccgactgatgatccaatgcttcttgcgtacctcttggacccgtcaaacacgacgcctgaaggcgtagcccgtcgttacggcggcgagtggaccgaagatgcagcgaaacgcgcgttattggccgaacgtttgcacgccaatttattaggacgtttgcaaggcgaggagcgtctcctctggctttacgaagaagtggagaaaccattgagtcgcgtgctcgcgcatatggaagctaccggtgtcaaattagacgtggcgtatttggagaatctcagccttgaagttgctgcccacatgcgccgcttggaggaagaagtattccgtttagcaggccgttcctttcgccttaattctcgcgatcagttagaacgtgtgttgttcgatgaacttggtctccctcctatcggcaagacagagaagaccggtaaacgtagcacttcagcggcggttttagaagctcttcgcgaagtccatcccattgtggacaagatcttgcaataccgcgaactcgcgaaattgaaaggcacctatattgaccgtcttccggcattagtccacccgaaaacgggacgcctccatacccgcttcaaccaaacagccacggcgaccggtcgtttgtcctcctctgatccaaaccttcagaatattccagtacgtaccaaattgggccagaagatccgccgtgcgtttgtagctgaggagggttggcgtttagtggccctcgattatagccaaattgaattacgtgtccttgcccatctttctggcgatgagaacctcatccgcgtgtttcaggaaggcaaagacattcacactcaaacggcaagctggatgtttggattatcagctgaagcgatcgatcctttgatgcgtcgtgcagcgaagaccatcaatttcggtgttctctacggtatgagtgcctttcgtttgtcgcaggaattaggcattcccaaagaagaagctcaggcgttcattcagaaatactttcaaagctatcccaaagttaaagcatggatcgagaagactctcgaagaaggccgccaccgtggttacgtagagaccttatttggacgtcgccgctatgttcccgatttaaacgctcgcgtgaaaggcaagcgtgaagccgccgaacgcatggcgttcaacatgcctgtacagggcacggcagctgacctcatgaaacttgcaatggtgcgcctttttccacaattgcgtgaagttggtgcccgcatgctcttgcaggtccacgatgaactcttgttagaagcgccaaaagagcgtgcggaagaggtggcagccctcgcgaaagaagttatggaaggcgtgtggcccttagcggtgcctcttgaagtcgaagttggtattggcgaggattggctggctgccaaagga

SEQ ID NO: 3682 - protein, 841 aa, synthetic construct
  REGION 1..841: note = Variant of DNA polymerase I from Thermus sp. strain 2.9
MHHHHHHGGSGVLPVFEPKGRVLLVDGHHLAYRNFFALKGLTTSSGEPVQGVYGFAKSLLKALKEDGDVVIVVFDAKAPSFRHEAYEAYKAGRADTPEDFPRQLALMKELVDLLGLERLEVPGFEADDVLATLAKKAEREGYEVQILTADRDLFQLLSPRISVLHPDGHRITPEWLWEKYGLRPEQWVDFRALAGDKSDNIPGVKGIGEKTALKLLKEWGSLENLLKNLDQVKPESVREKILAHLEDLKLSRELSRVRTDLPLEVDFQRRREPDWEGLKAFLERLEFGSLLHEFGLLESPLPAEEAPWPPPEGAFLGYRLSRPEPMWAELLALAASAQGRVYRAEDPHGALRGLFEVRGLLAKDLAVVALREGLDLPPTDDPMLLAYLLDPSNTTPEGVARRYGGEWTEDAAKRALLAERLHANLLGRLQGEERLLWLYEEVEKPLSRVLAHMEATGVKLDVAYLENLSLEVAAHMRRLEEEVFRLAGRSFRLNSRDQLERVLFDELGLPPIGKTEKTGKRSTSAAVLEALREVHPIVDKILQYRELAKLKGTYIDRLPALVHPKTGRLHTRFNQTATATGRLSSSDPNLQNIPVRTKLGQKIRRAFVAEEGWRLVALDYSQIELRVLAHLSGDENLIRVFQEGKDIHTQTASWMFGLSAEAIDPLMRRAAKTINFGVLYGMSAFRLSQELGIPKEEAQAFIQKYFQSYPKVKAWIEKTLEEGRHRGYVETLFGRRRYVPDLNARVKGKREAAERMAFNMPVQGTAADLMKLAMVRLFPQLREVGARMLLQVHDELLLEAPKERAEEVAALAKEVMEGVWPLAVPLEVEVGIGEDWLAAKG

SEQ ID NO: 3683 - DNA, 2523 bp, synthetic construct
  misc_feature 1..2523: note = Variant of DNA polymerase I from Thermus sp. strain 2.9
  source 1..2523: mol_type = other DNA
atgcaccatcatcatcatcatggcggtagcggcgtgttaccggtgttcgagcctaaaggtcgcgtgcttctggttgatggccatcatctcgcgtatcgtaacttctttgccctgaaaggattaaccaccagcagcggcgagccggtacagggtgtctacggctttgcaaagtcgctcctgaaagctctgaaagaagacggtgatgtggtgattgttgtctttgatgcgaaagcgccaagttttcgccacgaagcgtacgaagcttacaaagccgggcgtgctccaacgccggaagactttcctcgccaattggcgcttatgaaggaattagtggatttgcttggcctcgaacgcttggaagttcccggtttcgaggcagacgacgtattagcgactctcgcaaagaaagccgaacgtgagggctatgaagtccagatcttgacagcagatcgcgatcttttccagcttttatctccgcgcatctcggtgttacacccggaagggcatcgtatcaccccggaatggctctgggagaaatatggtttgcgtcccgaacaatgggtggattttcgcgccttagcaggcgatccgagcgacaatattccgggagttaaaggtatcggcgagaagacggcgctcaagctccttaaagaatgggggtcgttggagaacttgcttaagaatttagatcaggtcaaaccagagtcagtgcgtgagaagattcttgctcacctcgaagacctcaaattaagccgcgaattgtcccgtgtacgcaccgatttgccgctcgaagttgatttccaacgccgccgcgaacctgactgggagggtcttaaagcgtttttagagcgtcttgaatttggttcgctcttgcatgaattcggccttttagaaagcccgttaccagccgaagaagcaccttggccaccgcccgagggcgcgtttttaggttaccgtttgagtcgcccggaaccgatgtgggccgaattactggctcttgcagcgtctgcccagggacgtgtgtatcgcgcggaagaccctcataatgcgctccgcggcctcttcgaagtccgtggactccttgccaaagacttagctgttgttgcattgcgcgaaggtcttgatttacctccgactgatgatccaatgcttcttgcgtacctcttggacccgtcaaacacgacgcccgaaggcgtagcccgtcgttacggcggcgagtggaccgaagatgcagcgaaacgcgcgttattggccgaacgtttgcacgccaatttattaggacgtttgcaaggcgaggaacgtctcctctggctttacgaagaagtggagaaaccattgagtcgcgtgctcgcgcatatggaagctaccggtgtcaaattagacgtggcgtatttggagaatctcagccttgaagttgctgcccacatgcgccgcttggaggaagaagtattccgtttagcaggccgttcctttcgccttaattctcgcgatcagttagaacgtgtgttgttcgatgaacttggtctccctcctatcggcaagacagagaagaccggtaaacgtagcacttcagcggcggttttagaagctcttcgcgaagtccatcccattgtggacaagatcttgcaataccgcgaactcgcgaaattgaaaggcacctatattgaccgtcttccggcattagtccacccgaaaacgggacgcctccatacccgcttcaaccaaacagccacggcgaccggtcgtttgtcctcctctgatccaaaccttcagaatattccagtacgtaccccattgggccagaagatccgccgtgcgtttgtagctgaggagggttggcgtttagtggccctcgattatagccaaattgaattacgtgtccttgcccatctttctggcgatgagaacctcatccgcgtgtttcaggaaggcaaagacattcacactcaaacggcaagctggatgtttggattatcagctgaagcgatcgatcctttgatgcgtcgtgcagcgaagaccatcaatttcggtgttctctacggtatgagtgcctttcgtttgtcgcaggaattaggcattccctatgaagaagctcaggcgttcattcagaaatactttcaaagctatcccaaagttaaagcatggatcgagaagactctcgaagaaggccgcacacgtggttacgtagagaccttatttggacgtcgccgctatgttcccgatttaaacgctcgcgtgaaaggcaagcgtgaagccgccgaacgcatggcgttcaacatgcctgtacagggcacggcagctgacctcatgaaacttgcaatggtgcgcctttttccacaattgcgtgaagttggtgcccgcatgctcttgcaggtccacgatgaactcttgttagaagcgccaaaagagcgtgcggaagaggtggcagccctcgcgaaagaagttatggaaggcgtgtggcccttagcggtgcctcttgaagtcgaagttggtattggcgaggattggctggctgccaaagga

SEQ ID NO: 3684 - protein, 841 aa, synthetic construct
  REGION 1..841: note = Variant of DNA polymerase I from Thermus sp. strain 2.9
MHHHHHHGGSGVLPVFEPKGRVLLVDGHHLAYRNFFALKGLTTSSGEPVQGVYGFAKSLLKALKEDGDVVIVVFDAKAPSFRHEAYEAYKAGRAPTPEDFPRQLALMKELVDLLGLERLEVPGFEADDVLATLAKKAEREGYEVQILTADRDLFQLLSPRISVLHPEGHRITPEWLWEKYGLRPEQWVDFRALAGDPSDNIPGVKGIGEKTALKLLKEWGSLENLLKNLDQVKPESVREKILAHLEDLKLSRELSRVRTDLPLEVDFQRRREPDWEGLKAFLERLEFGSLLHEFGLLESPLPAEEAPWPPPEGAFLGYRLSRPEPMWAELLALAASAQGRVYRAEDPHNALRGLFEVRGLLAKDLAVVALREGLDLPPTDDPMLLAYLLDPSNTTPEGVARRYGGEWTEDAAKRALLAERLHANLLGRLQGEERLLWLYEEVEKPLSRVLAHMEATGVKLDVAYLENLSLEVAAHMRRLEEEVFRLAGRSFRLNSRDQLERVLFDELGLPPIGKTEKTGKRSTSAAVLEALREVHPIVDKILQYRELAKLKGTYIDRLPALVHPKTGRLHTRFNQTATATGRLSSSDPNLQNIPVRTPLGQKIRRAFVAEEGWRLVALDYSQIELRVLAHLSGDENLIRVFQEGKDIHTQTASWMFGLSAEAIDPLMRRAAKTINFGVLYGMSAFRLSQELGIPYEEAQAFIQKYFQSYPKVKAWIEKTLEEGRTRGYVETLFGRRRYVPDLNARVKGKREAAERMAFNMPVQGTAADLMKLAMVRLFPQLREVGARMLLQVHDELLLEAPKERAEEVAALAKEVMEGVWPLAVPLEVEVGIGEDWLAAKG

SEQ ID NO: 3685 - DNA, 2523 bp, synthetic construct
  misc_feature 1..2523: note = Variant of DNA polymerase I from Thermus sp. strain 2.9
  source 1..2523: mol_type = other DNA
atgcaccatcatcatcatcatggcggtagcggcgtgttaccggtgttcgagcctaaaggtcgcgtgcttctggttgatggccatcatctcgcgtatcgtaacttctttgccctgaaaggattaaccaccagcagcggcgagccggtacagggtgtctacggctttgcaaagtcgctcctgaaagctctgaaagaagacggtgatgtggtgattgttgtctttgatgcgaaagcgccaagttttcgccacgaagcgtacgaagcttacaaagccgggcgtgctccaacgccggaagactttcctcgccaattggcgcttatgaaggaattagtggatttgcttggcctcgaacgcttggaagttcccggtttcgaggcagacgacgtattagcgactctcgcaaagaaagccgaacgtgagggctatgaagtccagatcttgacagcagatcgcgatcttttccagcttttatctccgcgcatctcggtgttacacccggaagggcatcgtatcaccccggaatggctctgggagaaatatggtttgcgtcccgaacaatgggtggattttcgcgccttagcaggcgatccgagcgacaatattccgggagttaaaggtatcggcgagaagacggcgctcaagctccttaaagaatgggggtcgttggagaacttgcttaagaatttagatcaggtcaaaccagagtcagtgcgtgagaagattcttgctcacctcgaagacctcaaattaagccgcgaattgtcccgtgtacgcaccgatttgccgctcgaagttgatttccaacgccgccgcgaacctgactgggagggtcttaaagcgtttttagagcgtcttgaatttggttcgctcttgcatgaattcggccttttagaagggccgttaccagccgaagaagcaccttggccaccgcccgagggcgcgtttttaggttaccgtttgagtcgcccggaaccgatgtgggccgaattactggctcttgcagcgtctgcccagggacgtgtgtatcgcgcggaagaccctcatggtgcgctccgcggcctcttcgaagtccgtggactccttgccaaagacttagctgttgttgcattgcgcgaaggtcttgatttacctccgactgatgatccaatgcttcttgcgtacctcttggacccgtcaaacacgacgcccgaaggcgtagcccgtcgttacggcggcgagtggaccgaagatgcagcgaaacgcgcgttattggccgaacgtttgcacgccaatttattaggacgtttgcaaggcgaggaacgtctcctctggctttacgaagaagtggagaaaccattgagtcgcgtgctcgcgcatatggaagctaccggtgtcaaattagacgtggcgtatttggagaatctcagccttgaagttgctgcccacatgcgccgcttggaggaagaagtattccgtttagcaggccgttcctttcgccttaattctcgcgatcagttagaacgtgtgttgttcgatgaacttggtctccctcctatcggcaagacagagaagaccggtaaacgtagcacttcagcggcggttttagaagctcttcgcgaagtccatcccattgtggacaagatcttgcaataccgcgaactcgcgaaattgaaaggcacctatattgaccgtcttccggcattagtccacccgaaaacgggacgcctccatacccgcttcaaccaaacagccacggcgaccggtcgtttgtcctcctctgatccaaaccttcagaatattccagtacgtaccccattgggccagaagatccgccgtgcgtttgtagctgaggagggttggcgtttagtggccctcgattatagccaaattgaattacgtgtccttgcccatctttctggcgatgagaacctcatccgcgtgtttcaggaaggcaaagacattcacactcaaacggcaagctggatgtttggattatcagctgaagcgatcgatcctttgatgcgtcgtgcagcgaagaccatcaatttcggtgttctctacggtatgagtgcctttcgtttgtcgcaggaattaggcattccctatgaagaagctcaggcgttcattcagaaatactttcaaagctatcccaaagttaaagcatggatcgagaagactctcgaagaaggccgcacacgtggttacgtagagaccttatttggacgtcgccgctatgttcccgatttaaacgctcgcgtgaaaggcaagcgtgaagccgccgaacgcatggcgttcaacatgcctgtacagggcacggcagctgacctcatgaaacttgcaatggtgcgcctttttccacaattgcgtgaagttggtgcccgcatgctcttgcaggtccacgatgaactcttgttagaagcgccaaaagagcgtgcggaagaggtggcagccctcgcgaaagaagttatggaaggcgtgtggcccttagcggtgcctcttgaagtcgaagttggtattggcgaggattggctggctgccaaagga

SEQ ID NO: 3686 - protein, 841 aa, synthetic construct
  REGION 1..841: note = Variant of DNA polymerase I from Thermus sp. strain 2.9
MHHHHHHGGSGVLPVFEPKGRVLLVDGHHLAYRNFFALKGLTTSSGEPVQGVYGFAKSLLKALKEDGDVVIVVFDAKAPSFRHEAYEAYKAGRAPTPEDFPRQLALMKELVDLLGLERLEVPGFEADDVLATLAKKAEREGYEVQILTADRDLFQLLSPRISVLHPEGHRITPEWLWEKYGLRPEQWVDFRALAGDPSDNIPGVKGIGEKTALKLLKEWGSLENLLKNLDQVKPESVREKILAHLEDLKLSRELSRVRTDLPLEVDFQRRREPDWEGLKAFLERLEFGSLLHEFGLLEGPLPAEEAPWPPPEGAFLGYRLSRPEPMWAELLALAASAQGRVYRAEDPHGALRGLFEVRGLLAKDLAVVALREGLDLPPTDDPMLLAYLLDPSNTTPEGVARRYGGEWTEDAAKRALLAERLHANLLGRLQGEERLLWLYEEVEKPLSRVLAHMEATGVKLDVAYLENLSLEVAAHMRRLEEEVFRLAGRSFRLNSRDQLERVLFDELGLPPIGKTEKTGKRSTSAAVLEALREVHPIVDKILQYRELAKLKGTYIDRLPALVHPKTGRLHTRFNQTATATGRLSSSDPNLQNIPVRTPLGQKIRRAFVAEEGWRLVALDYSQIELRVLAHLSGDENLIRVFQEGKDIHTQTASWMFGLSAEAIDPLMRRAAKTINFGVLYGMSAFRLSQELGIPYEEAQAFIQKYFQSYPKVKAWIEKTLEEGRTRGYVETLFGRRRYVPDLNARVKGKREAAERMAFNMPVQGTAADLMKLAMVRLFPQLREVGARMLLQVHDELLLEAPKERAEEVAALAKEVMEGVWPLAVPLEVEVGIGEDWLAAKG

SEQ ID NO: 3687 - DNA, 2523 bp, synthetic construct
  misc_feature 1..2523: note = Variant of DNA polymerase I from Thermus sp. strain 2.9
  source 1..2523: mol_type = other DNA
atgcaccatcatcatcatcatggcggtagcggcgtgttagaggtgttcgagcctaaaggtcgcgtgcttctggttgatggccatcatctcgcgtatcgtaacttctttgccctgaaaggattaaccaccagcagcggcgagccggtacagggtgtctacggctttgcaaagtcgctcctgaaagctctgaaagaagacggtgatgtggtgattgttgtctttgatgcgaaagcgccaagttttcgccacgaagcgtacgaagcttacaaagccgggcgtgctccaacgccggaagactttcctcgccaattggcgcttatgaaggaattagtggatttgcttggcctcgaacgcttggaagttcccggtttcgaggcagacgacgtattagcgactctcgcaaagaaagccgaacgcgagggctatgaagtccagatcttgacagcagatcgcgatcttttccagcttttatctccgcgcatctcggtgttacacccggaagggcatcgtatcaccccggaatggctctgggagaaatatggtttgcgtcccgaacaatgggtggattttcgcgccttagcaggcgatcctagcgacaatattccgggagttaaaggtatcggcgagaagacggcgctcaagctccttaaagaatgggggtcgttggagaacttgcttaagaatttagatcaggtcaaaccagagtcagtgcgtgagaagattcttgctcacctcgaagacctcgagttaagccgcgaattgtcccgtgtacgcaccgatttgccgctcgaagttgatttccaacgccgccgcgaacctgactgggagggtcttaaagcgtttttagagcgtcttgaatttggttcgctcttgcatgaattcggccttttagaaagcccgttaccagccgaagaagcaccttggccaccgcccgagggcgcgtttttaggttaccgtttgagtcgcccggaaccgatgtgggccgaattactggctcttgcagcgtctgcccagggacgtgtgtatcgcgcggaagaccctcatggtgcgctccgcggcctcttcgaagtccgtggactccttgccaaagacttagctgttgttgcattgcgcgaaggtcttgatttacctccgactgatgatccaatgcttcttgcgtacctcttggacccgtcaaacacgacgcctgaaggcgtagcccgtcgttacggcggcgagtggaccgaagatgcagcgaaacgcgcgttattggccgaacgtttgcacgccaatttattaggacgtttgcaaggcgaggaacgtctcctctggctttacgaagaagtggagaaaccattgagtcgcgtgctcgcgcatatggaagctaccggtgtcaaattagacgtggcgtatttggagaatctcagccttgaagttgctgcccacatgcgccgcttggaggaagaagtattccgtttagcaggccgttcctttcgccttaattctcgcgatcagttagaacgtgtgttgttcgatgaacttggtctccctcctatcggcaagacagagaagaccggtaaacgtagcacttcagcggcggttttagaagctcttcgcgaagtccatcccattgtggacaagatcttgcaataccgcgaactcgcgaaattgaaaggcacctatattgaccgtcttccggcattagtccacccgaaaacgggacgcctccatacccgcttcaaccaaacagccacggcgaccggtcgtttgtcctcctctgatccaaaccttcagaatattccagtacgtaccccgttgggccagaagatccgccgtgcgtttgtagctgaggagggttggcgtttagtggccctcgattatagccaaattgaattacgtgtccttgcccatctttctggcgatgagaacctcatccgcgtgtttgaggaaggcaaagacattcacactcaaacggcaagctggatgtttggattatcagctgaagcgatcgatcctttgatgcgtcgtgcagcgaagaccatcaatttcggtgttctctacggtatgagtgcctttcgtttgtcgcaggaattaggcattccctacgaagaagctcaggcgttcattcagaaatactttcaaagctatcccaaagttaaagcatggatcgagaagactctcgaagaaggccgcacccgtggttacgtagagaccttatttggacgtcgccgctatgttcccgatttaaacgctcgcgtgaaaggcaagcgtgaagccgccgaacgcatggcgttcaacatgcctgtacagggcacggcagctgacctcatgaaacttgcaatggtgcgcctttttccacaattgcgtgaagttggtgcccgcatgctcttgcaggtccacgatgaactcttgttagaagcgccaaaagagcgtgcggaagaggtggcagccctcgcgaaagaagttatggaaggcgtgtggcccttagcggtgcctcttgaagtcgaagttggtattggcgaggattggctggctgccaaagga

SEQ ID NO: 3688 - protein, 841 aa, synthetic construct
  REGION 1..841: note = Variant of DNA polymerase I from Thermus sp. strain 2.9
MHHHHHHGGSGVLEVFEPKGRVLLVDGHHLAYRNFFALKGLTTSSGEPVQGVYGFAKSLLKALKEDGDVVIVVFDAKAPSFRHEAYEAYKAGRAPTPEDFPRQLALMKELVDLLGLERLEVPGFEADDVLATLAKKAEREGYEVQILTADRDLFQLLSPRISVLHPEGHRITPEWLWEKYGLRPEQWVDFRALAGDPSDNIPGVKGIGEKTALKLLKEWGSLENLLKNLDQVKPESVREKILAHLEDLELSRELSRVRTDLPLEVDFQRRREPDWEGLKAFLERLEFGSLLHEFGLLESPLPAEEAPWPPPEGAFLGYRLSRPEPMWAELLALAASAQGRVYRAEDPHGALRGLFEVRGLLAKDLAVVALREGLDLPPTDDPMLLAYLLDPSNTTPEGVARRYGGEWTEDAAKRALLAERLHANLLGRLQGEERLLWLYEEVEKPLSRVLAHMEATGVKLDVAYLENLSLEVAAHMRRLEEEVFRLAGRSFRLNSRDQLERVLFDELGLPPIGKTEKTGKRSTSAAVLEALREVHPIVDKILQYRELAKLKGTYIDRLPALVHPKTGRLHTRFNQTATATGRLSSSDPNLQNIPVRTPLGQKIRRAFVAEEGWRLVALDYSQIELRVLAHLSGDENLIRVFEEGKDIHTQTASWMFGLSAEAIDPLMRRAAKTINFGVLYGMSAFRLSQELGIPYEEAQAFIQKYFQSYPKVKAWIEKTLEEGRTRGYVETLFGRRRYVPDLNARVKGKREAAERMAFNMPVQGTAADLMKLAMVRLFPQLREVGARMLLQVHDELLLEAPKERAEEVAALAKEVMEGVWPLAVPLEVEVGIGEDWLAAKG

SEQ ID NO: 3689 - DNA, 2523 bp, synthetic construct
  misc_feature 1..2523: note = Variant of DNA polymerase I from Thermus sp. strain 2.9
  source 1..2523: mol_type = other DNA
atgcaccatcatcatcatcatggcggtagcggcgtgttaccggtgttcgagcctaaaggtcgcgtgcttctggttgatggccatcatctcgcgtatcgtaacttctttgccctgaaaggattaaccaccagcagcggcgagccggtacagggtgtctacggctttgcaaagtcgctcctgaaagctctgaaagaagacggtgatgtggtgattgttgtctttgatgcgaaagcgccaagttttcgccacgaagcgtacgaagcttacaaagccgggcgtgctccaacgccggaagactttcctcgccaattggcgcttatgaaggaattagtggatttgcttggcctcgaacgcttggaagttcccggtttcgaggcagacgacgtattagcgactctcgcaaagaaagccgaacgtgagggctatgaagtccagatcttgacagcagatcgcgatcttttccagcttttatctccgcgcatctcggtgttacacccggaagggcatcgtatcaccccggaatggctctgggagaaatatggtttgcgtcccgaacaatgggtggattttcgcgccttagcaggcgatccgagcgacaatattccgggagttaaaggtatcggcgagaagacggcgctcaagctccttaaagaatgggggtcgttggagaacttgcttaagaatttagatcaggtcaaaccagagtcagtgcgtgagaagattcttgctcacctcgaagacctcaaattaagccgcgaattgtcccgtgtacgcaccgatttgccgctcgaagttgatttccaacgccgccgcgaacctgactgggagggtcttaaagcgtttttagagcgtcttgaatttggttcgctcttgcatgaattcggccttttagaaagcccgttaccagccgaagaagcaccttggccaccgcccgagggcgcgtttttaggttaccgtttgagtcgcccggaaccgatgtgggccgaattactggctcttgcagcgtctgcccagggacgtgtgtatcgcgcggaagaccctcatggtgcgctccgcggcctcttcgaagtccgtggactccttgccaaagacttagctgttgttgcattgcgcgaaggtcttgatttacctccgactgatgatccaatgcttcttgcgtacctcttggacccgtcaaacgatacgcccgaaggcgtagcccgtcgttacggcggcgagtggaccgaagatgcagcgaaacgcgcgttattggccgaacgtttgcacgccaatttattaggacgtttgcaaggcgaggaacgtctcctctggctttacgaagaagtggagaaaccattgagtcgcgtgctcgcgcatatggaagctaccggtgtcaaattagacgtggcgtatttggagaatctcagccttgaagttgctgcccacatgcgccgcttggaggaagaagtattccgtttagcaggccgttcctttcgccttaattctcgcgatcagttagaacgtgtgttgttcgatgaacttggtctccctcctatcggcaagacagagaagaccggtaaacgtagcacttcagcggcggttttagaagctcttcgcgaagtccatcccattgtggacaagatcttgcaataccgcgaactcgcgaaattgaaaggcacctatattgaccgtcttccggcattagtccacccgaaaacgggacgcctccatacccgcttcaaccaaacagccacggcgaccggtcgtttgtcctcctctgatccaaaccttcagaatattccagtacgtaccccattgggccagaagatccgccgtgcgtttgtagctgaggagggttggcgtttagtggccctcgattatagccaaattgaattacgtgtccttgcccatctttctggcgatgagaacctcatccgcgtgtttcaggaaggcaaagacattcacactcaaacggcaagctggatgtttggattatcagctgaagcgatcgatcctttgatgcgtcgtgcagcgaagaccatcaatttcggtgttctctacggtatgagtgcctttcgtttgtcgcaggaattaggcattccctatgaagaagctcaggcgttcattcagaaatactttcaaagctatcccaaagttaaagcatggatcgagaagactctcgaagaaggccgcacacgtggttacgtagagaccttatttggacgtcgccgctatgttcccgatttaaacgctcgcgtgaaaggcaagcgtgaagccgccgaacgcatggcgttcaacatgcctgtacagggcacggcagctgacctcatgaaacttgcaatggtgcgcctttttccacaattgcgtgaagttggtgcccgcatgctcttgcaggtccacgatgaactcttgttagaagcgccaaaagagcgtgcggaagaggtggcagccctcgcgaaagaagttatggaaggcgtgtggcccttagcggtgcctcttgaagtcgaagttggtattggcgaggattggctggctgccaaagga

SEQ ID NO: 3690 - protein, 841 aa, synthetic construct
  REGION 1..841: note = Variant of DNA polymerase I from Thermus sp. strain 2.9
MHHHHHHGGSGVLPVFEPKGRVLLVDGHHLAYRNFFALKGLTTSSGEPVQGVYGFAKSLLKALKEDGDVVIVVFDAKAPSFRHEAYEAYKAGRAPTPEDFPRQLALMKELVDLLGLERLEVPGFEADDVLATLAKKAEREGYEVQILTADRDLFQLLSPRISVLHPEGHRITPEWLWEKYGLRPEQWVDFRALAGDPSDNIPGVKGIGEKTALKLLKEWGSLENLLKNLDQVKPESVREKILAHLEDLKLSRELSRVRTDLPLEVDFQRRREPDWEGLKAFLERLEFGSLLHEFGLLESPLPAEEAPWPPPEGAFLGYRLSRPEPMWAELLALAASAQGRVYRAEDPHGALRGLFEVRGLLAKDLAVVALREGLDLPPTDDPMLLAYLLDPSNDTPEGVARRYGGEWTEDAAKRALLAERLHANLLGRLQGEERLLWLYEEVEKPLSRVLAHMEATGVKLDVAYLENLSLEVAAHMRRLEEEVFRLAGRSFRLNSRDQLERVLFDELGLPPIGKTEKTGKRSTSAAVLEALREVHPIVDKILQYRELAKLKGTYIDRLPALVHPKTGRLHTRFNQTATATGRLSSSDPNLQNIPVRTPLGQKIRRAFVAEEGWRLVALDYSQIELRVLAHLSGDENLIRVFQEGKDIHTQTASWMFGLSAEAIDPLMRRAAKTINFGVLYGMSAFRLSQELGIPYEEAQAFIQKYFQSYPKVKAWIEKTLEEGRTRGYVETLFGRRRYVPDLNARVKGKREAAERMAFNMPVQGTAADLMKLAMVRLFPQLREVGARMLLQVHDELLLEAPKERAEEVAALAKEVMEGVWPLAVPLEVEVGIGEDWLAAKG

SEQ ID NO: 3691 - DNA, 2523 bp, synthetic construct
  misc_feature 1..2523: note = Variant of DNA polymerase I from Thermus sp. strain 2.9
  source 1..2523: mol_type = other DNA
atgcaccatcatcatcatcatggcggtagcggcgtgttacctgtgttcgagcctaaaggtcgcgtgcttctggttgatggccatcatctcgcgtatcgtaacttctttgccctgaaaggattaaccaccagcagcggcgagccggtacagggtgtctacggctttgcaaagtcgctcctgaaagctctgaaagaagacggtgatgtggtgattgttgtctttgatgcgaaagcgccaagttttcgccacgaagcgtacgaagcttacaaagccgggcgtgctccaacgccggaagactttcctcgccaattggcgcttatgaaggaattagtggatttgcttggcctcgaacgcttggaagttcccggtttcgaggcagacgacgtattagcgactctcgcaaagaaagccgaacgtgagggctatgaagtccagatcttgacagcagatcgcgatcttttccagcttttatctccgcgcatctcggtgttacacccggaagggcatcgtatcaccccggaatggctctgggagaaatatggtttgcgtcccgaacaatgggtggattttcgcgccttagcaggcgatcctagcgacaatattccgggagttaaaggtatcggcgagaagacggcgctcaagctccttaaagaatgggggtcgttggagaacttgcttaagaatttagatcaggtcaaaccagagtcagtgcgtgagaagattcttgctcacctcgaagacctcaaattaagccgcgaattgtcccgtgtacgcaccgatttgccgctcgaagttgatttccaacgccgccgcgaacctgactgggagggtcttaaagcgtttttagagcgtcttgaatttggttcgctcttgcatgaattcggccttttagaaagcccgttaccagccgaagaagcaccttggccaccgcccgagggcgcgtttttaggttaccgtttgagtcgcccggaaccgatgtgggccgaattactggctcttgcagcgtctgcccagggacgtgtgtatcgcgcggaagaccctcatggtgcgctccgcggcctcttcgaagtccgtggactccttgccaaagacttagctgttgttgcattgcgcgaaggtcttgatttacctccgactgatgatccaatgcttcttgcgtacctcttggacccgtcaaacacgacgcctgaaggcgtagcccgtcgttacggcggcgagtggaccgaagatgcagcgaaacgcgcgttattggccgaacgtttgcacgccaatttattaggacgtttgcaaggcgaggaacgtctcctctggctttacgaagaagtggagaaaccattgagtcgcgtgctcgcgcatatggaagctaccggtgtcaaattagacgtggcgtatttggagaatctcagccttgaagttgctgcccacatgcgccgcttggaggaagaagtattccgtttagcaggccgttcctttcgccttaattctcgcgatcagttagaacgtgtgttgttcgatgaacttggtctccctcctatcggcaagacagagaagaccggtaaacgtagcacttcagcggcggttttagaagctcttcgcgaagtccatcccattgtggacaagatcttgcaataccgcgaactcgcgaaattgaaaggcacctatattgaccgtcttccggcattagtccacccgaaaacgggacgcctccatacccgcttcaaccaaacagccacggcgaccggtcgtttgtcctcctctgatccaaaccttcagaatattccagtacgtaccaaattgggccagaagatccgccgtgcgtttgtagctgaggagggttggcgtttagtggccctcgattatagccaaattgaattacgtgtccttgcccatctttctggcgatgagaacctcatccgcgtgtttcaggaaggcaaagacattcacactcaaacggcaagctggatgtttggattatcagctgaagcgatcgatcctttgatgcgtcgtgcagcgaagaccatcaatttcggtgttctctacggtatgagtgcctttcgtttgtcgcaggaattaggcattcccaaagaagaagctcaggcgttcattcagaaatactttcaaagctatcccaaagttaaagcatggatcgagaagactctcgaagaaggccgcacacgtggttacgtagagaccttatttggacgtcgccgctatgttcccgatttaaacgctcgcgtgaaaggcaagcgtgaagccgccgaacgcatggcgttcaacatgcctgtacagggcacggcagctgacctcatgaaacttgcaatggtgcgcctttttccacaattgcgtgaagttggtgcccgcatgctcttgcaggtccacgatgaactcttgttagaagcgccaaaagagcgtgcggaagaggtggcagccctcgcgaaagaagttatggaaggcgtgtggcccttagcggtgcctcttgaagtcgaagttggtattggcgaggattggctggctgccaaagga

SEQ ID NO: 3692 - protein, 841 aa, synthetic construct
  REGION 1..841: note = Variant of DNA polymerase I from Thermus sp. strain 2.9
MHHHHHHGGSGVLPVFEPKGRVLLVDGHHLAYRNFFALKGLTTSSGEPVQGVYGFAKSLLKALKEDGDVVIVVFDAKAPSFRHEAYEAYKAGRAPTPEDFPRQLALMKELVDLLGLERLEVPGFEADDVLATLAKKAEREGYEVQILTADRDLFQLLSPRISVLHPEGHRITPEWLWEKYGLRPEQWVDFRALAGDPSDNIPGVKGIGEKTALKLLKEWGSLENLLKNLDQVKPESVREKILAHLEDLKLSRELSRVRTDLPLEVDFQRRREPDWEGLKAFLERLEFGSLLHEFGLLESPLPAEEAPWPPPEGAFLGYRLSRPEPMWAELLALAASAQGRVYRAEDPHGALRGLFEVRGLLAKDLAVVALREGLDLPPTDDPMLLAYLLDPSNTTPEGVARRYGGEWTEDAAKRALLAERLHANLLGRLQGEERLLWLYEEVEKPLSRVLAHMEATGVKLDVAYLENLSLEVAAHMRRLEEEVFRLAGRSFRLNSRDQLERVLFDELGLPPIGKTEKTGKRSTSAAVLEALREVHPIVDKILQYRELAKLKGTYIDRLPALVHPKTGRLHTRFNQTATATGRLSSSDPNLQNIPVRTKLGQKIRRAFVAEEGWRLVALDYSQIELRVLAHLSGDENLIRVFQEGKDIHTQTASWMFGLSAEAIDPLMRRAAKTINFGVLYGMSAFRLSQELGIPKEEAQAFIQKYFQSYPKVKAWIEKTLEEGRTRGYVETLFGRRRYVPDLNARVKGKREAAERMAFNMPVQGTAADLMKLAMVRLFPQLREVGARMLLQVHDELLLEAPKERAEEVAALAKEVMEGVWPLAVPLEVEVGIGEDWLAAKG

SEQ ID NO: 3693 - DNA, 2523 bp, synthetic construct
  misc_feature 1..2523: note = Variant of DNA polymerase I from Thermus sp. strain 2.9
  source 1..2523: mol_type = other DNA
atgcaccatcatcatcatcatggcggtagcggcgtgttaccggtgttcgagcctaaaggtcgcgtgcttctggttgatggccatcatctcgcgtatcgtaacttctttgccctgaaaggattaaccaccagcagcggcgagccggtacagggtgtctacggctttgcaaagtcgctcctgaaagctctgaaagaagacggtgatgtggtgattgttgtctttgatgcgaaagcgccaagttttcgccacgaagcgtacgaagcttacaaagccgggcgtgctccaacgccggaagactttcctcgccaattggcgcttatgaaggaattagtggatttgcttggcctcgaacgcttggaagttattggtttcgaggcagacgacgtattagcgactctcgcaaagaaagccgaacgtgagggctatgaagtccagatcttgacagcagatcgcgatcttttccagcttttatctccgcgcatctcggtgttacacccggaagggcatcgtatcaccccggaatggctctgggagaaatatggtttgcgtcccgaacaatgggtggattttcgcgccttagcaggcgatccgagcgacaatattccgggagttaaaggtatcggcgagaagacggcgctcaagctccttaaagaatgggggtcgttggagaacttgcttaagaatttagatcaggtcaaaccagagtcagtgcgtgagaagattcttgctcacctcgaagacctcaaattaagccgcgaattgtcccgtgtacgcaccgatttgccgctcgaagttgatttccaacgccgccgcgaacctgactgggagggtcttaaagcgtttttagagcgtcttgaatttggttcgctcttgcatgaattcggccttttagaaagcccgttaccagccgaagaagcaccttggccaccgcccgagggcgcgtttttaggttaccgtttgagtcgcccggaaccgatgtgggccgaattactggctcttgcagcgtctgcccagggacgtgtgtatcgcgcggaagaccctcatggtgcgctccgcggcctcttcgaagtccgtggactccttgccaaagacttagctgttgttgcattgcgcgaaggtcttgatttacctccgactgatgatccaatgcttcttgcgtacctcttggacccgtcaaacacgacgcccgaaggcgtagcccgtcgttacggcggcgagtggaccgaagatgcagcgaaacgcgcgttattggccgaacgtttgcacgccaatttattaggacgtttgcaaggcgaggaacgtctcctctggctttacgaagaagtggagaaaccattgagtcgcgtgctcgcgcatatggaagctaccggtgtcaaattagacgtggcgtatttggagaatctcagccttgaagttgctgcccacatgcgccgcttggaggaagaagtattccgtttagcaggccgttcctttcgccttaattctcgcgatcagttagaacgtgtgttgttcgatgaacttggtctccctcctatcggcaagacagagaagaccggtaaacgtagcacttcagcggcggttttagaagctcttcgcgaagtccatcccattgtggacaagatcttgcaataccgcgaactcgcgaaattgaaaggcacctatattgaccgtcttccggcattagtccacccgaaaacgggacgcctccatacccgcttcaaccaaacagccacggcgaccggtcgtttgtcctcctctgatccaaaccttcagaatattccagtacgtaccccattgggccagaagatccgccgtgcgtttgtagctgaggagggttggcgtttagtggccctcgattatagccaaattgaattacgtgtccttgcccatctttctggcgatgagaacctcatccgcgtgtttcaggaaggcaaagacattcacactcaaacggcaagctggatgtttggattatcagctgaagcgatcgatcctttgatgcgtcgtgcagcgaagaccatcaatttcggtgttctctacggtatgagtgcctttcgtttgtcgcaggaattaggcattccctatgaagaagctcaggcgttcattcagaaatactttcaaagctatcccaaagttaaagcatggatcgagaagactctcgaagaaggccgcacacgtggttacgtagagaccttatttggacgtcgccgctatgttcccgatttaaacgctcgcgtgaaaggcaagcgtgaagccgccgaacgcatggcgttcaacatgcctgtacagggcacggcagctgacctcatgaaacttgcaatggtgcgcctttttccacaattgcgtgaagttggtgcccgcatgctcttgcaggtccacgatgaactcttgttagaagcgccaaaagagcgtgcggaagaggtggcagccctcgcgaaagaagttatggaaggcgtgtggcccttagcggtgcctcttgaagtcgaagttggtattggcgaggattggctggctgccaaagga

SEQ ID NO: 3694 - protein, 841 aa, synthetic construct
  REGION 1..841: note = Variant of DNA polymerase I from Thermus sp. strain 2.9
MHHHHHHGGSGVLPVFEPKGRVLLVDGHHLAYRNFFALKGLTTSSGEPVQGVYGFAKSLLKALKEDGDVVIVVFDAKAPSFRHEAYEAYKAGRAPTPEDFPRQLALMKELVDLLGLERLEVIGFEADDVLATLAKKAEREGYEVQILTADRDLFQLLSPRISVLHPEGHRITPEWLWEKYGLRPEQWVDFRALAGDPSDNIPGVKGIGEKTALKLLKEWGSLENLLKNLDQVKPESVREKILAHLEDLKLSRELSRVRTDLPLEVDFQRRREPDWEGLKAFLERLEFGSLLHEFGLLESPLPAEEAPWPPPEGAFLGYRLSRPEPMWAELLALAASAQGRVYRAEDPHGALRGLFEVRGLLAKDLAVVALREGLDLPPTDDPMLLAYLLDPSNTTPEGVARRYGGEWTEDAAKRALLAERLHANLLGRLQGEERLLWLYEEVEKPLSRVLAHMEATGVKLDVAYLENLSLEVAAHMRRLEEEVFRLAGRSFRLNSRDQLERVLFDELGLPPIGKTEKTGKRSTSAAVLEALREVHPIVDKILQYRELAKLKGTYIDRLPALVHPKTGRLHTRFNQTATATGRLSSSDPNLQNIPVRTPLGQKIRRAFVAEEGWRLVALDYSQIELRVLAHLSGDENLIRVFQEGKDIHTQTASWMFGLSAEAIDPLMRRAAKTINFGVLYGMSAFRLSQELGIPYEEAQAFIQKYFQSYPKVKAWIEKTLEEGRTRGYVETLFGRRRYVPDLNARVKGKREAAERMAFNMPVQGTAADLMKLAMVRLFPQLREVGARMLLQVHDELLLEAPKERAEEVAALAKEVMEGVWPLAVPLEVEVGIGEDWLAAKG

SEQ ID NO: 3695 - DNA, 2523 bp, synthetic construct
  misc_feature 1..2523: note = Variant of DNA polymerase I from Thermus sp. strain 2.9
  source 1..2523: mol_type = other DNA
atgcaccatcatcatcatcatggcggtagcggcgtgttaccggtgttcgagcctaaaggtcgcgtgcttctggttgatggccatcatctcgcgtatcgtaacttctttgccctgaaaggattaaccaccagcagcggcgagccggtacagggtgtctacggctttgcaaagtcgctcctgaaagctctgaaagaagacggtgatgtggtgattgttgtctttgatgcgaaagcgccaagttttcgccacgaagcgtacgaagcttacaaagccgggcgtgctccaacgccggaagactttcctcgccaattggcgcttatgaaggaattagtggatttgcttggcctcgaacgcttggaagttcccggtttcgaggcagacgacgtattagcgactctcgcaaagaaagccgaacgtgagggctatgaagtccagatcttgacagcagatcgcgatcttttccagcttttatctccgcgcatctcggtgttacacccggaagggcatcgtatcaccccggaatggctctgggagaaatatggtttgcgtcccgaacaatgggtggattttcgcgccttagcaggcgatccgagcgacaatattccgggagttaaaggtatcggcgagaagacggcgctcaagctccttaaagaatgggggtcgttggagaacttgcttaagaatttagatcaggtcaaaccagagtcagtgcgtgagaagattcttgctcacctcgaagacctcaaattaagccgcgaattgtcccgtgtacgcaccgatttgccgctcgaagttgatttccaacgccgccgcgaacctgactgggagggtcttaaagcgtttttagagcgtcttgaatttggttcgctcttgcatgaattcggccttttagaaagcccgttaccagccgaagaagcaccttggccaccgcccgagggcgcgtttttaggttaccgtttgagtcgcccggaaccgatgtgggccgaattactggctcttgcagcgtctgcccagggacgtgtgtatcgcgcggaagaccctcatggtgcgctccgcggcctcttcgaagtccgtggactccttgccaaagacttagctgttgttgcattgcgcgaaggtcttgatttacctccgactgatgatccaatgcttcttgcgtacctcttggacccgtcaaactgtacgcccgaaggcgtagcccgtcgttacggcggcgagtggaccgaagatgcagcgaaacgcgcgttattggccgaacgtttgcacgccaatttattaggacgtttgcaaggcgaggaacgtctcctctggctttacgaagaagtggagaaaccattgagtcgcgtgctcgcgcatatggaagctaccggtgtcaaattagacgtggcgtatttggagaatctcagccttgaagttgctgcccacatgcgccgcttggaggaagaagtattccgtttagcaggccgttcctttcgccttaattctcgcgatcagttagaacgtgtgttgttcgatgaacttggtctccctcctatcggcaagacagagaagaccggtaaacgtagcacttcagcggcggttttagaagctcttcgcgaagtccatcccattgtggacaagatcttgcaataccgcgaactcgcgaaattgaaaggcacctatattgaccgtcttccggcattagtccacccgaaaacgggacgcctccatacccgcttcaaccaaacagccacggcgaccggtcgtttgtcctcctctgatccaaaccttcagaatattccagtacgtaccccattgggccagaagatccgccgtgcgtttgtagctgaggagggttggcgtttagtggccctcgattatagccaaattgaattacgtgtccttgcccatctttctggcgatgagaacctcatccgcgtgtttcaggaaggcaaagacattcacactcaaacggcaagctggatgtttggattatcagctgaagcgatcgatcctttgatgcgtcgtgcagcgaagaccatcaatttcggtgttctctacggtatgagtgcctttcgtttgtcgcaggaattaggcattccctatgaagaagctcaggcgttcattcagaaatactttcaaagctatcccaaagttaaagcatggatcgagaagactctcgaagaaggccgcacacgtggttacgtagagaccttatttggacgtcgccgctatgttcccgatttaaacgctcgcgtgaaaggcaagcgtgaagccgccgaacgcatggcgttcaacatgcctgtacagggcacggcagctgacctcatgaaacttgcaatggtgcgcctttttccacaattgcgtgaagttggtgcccgcatgctcttgcaggtccacgatgaactcttgttagaagcgccaaaagagcgtgcggaagaggtggcagccctcgcgaaagaagttatggaaggcgtgtggcccttagcggtgcctcttgaagtcgaagttggtattggcgaggattggctggctgccaaagga

SEQ ID NO: 3696 - protein, 841 aa, synthetic construct
  REGION 1..841: note = Variant of DNA polymerase I from Thermus sp. strain 2.9
MHHHHHHGGSGVLPVFEPKGRVLLVDGHHLAYRNFFALKGLTTSSGEPVQGVYGFAKSLLKALKEDGDVVIVVFDAKAPSFRHEAYEAYKAGRAPTPEDFPRQLALMKELVDLLGLERLEVPGFEADDVLATLAKKAEREGYEVQILTADRDLFQLLSPRISVLHPEGHRITPEWLWEKYGLRPEQWVDFRALAGDPSDNIPGVKGIGEKTALKLLKEWGSLENLLKNLDQVKPESVREKILAHLEDLKLSRELSRVRTDLPLEVDFQRRREPDWEGLKAFLERLEFGSLLHEFGLLESPLPAEEAPWPPPEGAFLGYRLSRPEPMWAELLALAASAQGRVYRAEDPHGALRGLFEVRGLLAKDLAVVALREGLDLPPTDDPMLLAYLLDPSNCTPEGVARRYGGEWTEDAAKRALLAERLHANLLGRLQGEERLLWLYEEVEKPLSRVLAHMEATGVKLDVAYLENLSLEVAAHMRRLEEEVFRLAGRSFRLNSRDQLERVLFDELGLPPIGKTEKTGKRSTSAAVLEALREVHPIVDKILQYRELAKLKGTYIDRLPALVHPKTGRLHTRFNQTATATGRLSSSDPNLQNIPVRTPLGQKIRRAFVAEEGWRLVALDYSQIELRVLAHLSGDENLIRVFQEGKDIHTQTASWMFGLSAEAIDPLMRRAAKTINFGVLYGMSAFRLSQELGIPYEEAQAFIQKYFQSYPKVKAWIEKTLEEGRTRGYVETLFGRRRYVPDLNARVKGKREAAERMAFNMPVQGTAADLMKLAMVRLFPQLREVGARMLLQVHDELLLEAPKERAEEVAALAKEVMEGVWPLAVPLEVEVGIGEDWLAAKG

SEQ ID NO: 3697 - DNA, 2523 bp, synthetic construct; identical to SEQ ID NO: 3637
  misc_feature 1..2523: note = Variant of DNA polymerase I from Thermus sp. strain 2.9
  source 1..2523: mol_type = other DNA

SEQ ID NO: 3698 - protein, 841 aa, synthetic construct; identical to SEQ ID NO: 3638
  REGION 1..841: note = Variant of DNA polymerase I from Thermus sp. strain 2.9

SEQ ID NO: 3699 - DNA, 2523 bp, synthetic construct
  misc_feature 1..2523: note = Variant of DNA polymerase I from Thermus sp. strain 2.9
  source 1..2523: mol_type = other DNA
atgcaccatcatcatcatcatggcggtagcggcgtgttaccggtgttcgagcctaaaggtcgcgtgcttctggttgatggccatcatctcgcgtatcgtaacttctttgccctgaaaggattaaccaccagcagcggcgagccggtacagggtgtctacggctttgcaaagtcgctcctgaaagctctgaaagaagacggtgatgtggtgattgttgtctttgatgcgaaagcgccaagttttcgccacgaagcgtacgaagcttacaaagccgggcgtgctccaacgccggaagactttcctcgccaattggcgcttatgaaggaattagtggatttgcttggcctcgaacgcttggaagttcccggtttcgaggcagacgacgtattagcgactctcgcaaagaaagccgaacgtgagggctatgaagtccagatcttgacagcagatcgcgatcttttccagcttttatctccgcgcatctcggtgttacacccggaagggcatcgtatcaccccggaatggctctgggagaaatatggtttgcgtcccgaacaatgggtggattttcgcgccttagcaggcgatccgagcgacaatattccgggagttaaaggtatcggcgagaagacggcgctcaagctccttaaagaatgggggtcgttggagaacttgcttaagaatttagatcaggtcaaaccagagtcagtgcgtgagaagattcttgctcacctcgaagacctcaaattaagccgcgaattgtcccgtgtacgcaccgatttgccgctcgaagttgatttccaacgccgccgcgaacctgactgggagggtcttaaagcgtttttagagcgtcttgaatttggttcgctcttgcatgaattcggccttttagaaagcccgttaccagccgaagaagcaccttggccaccgcccgagggcgcgtttttaggttaccgtttgagtcgcccggaaccgatgtgggccgaattactggctcttgcagcgtctgcccagggacgtgtgtatcgcgcggaagaccctcatggtgcgctccgcggcctcttcgaagtccgtggactccttgccaaagacttagctgttgttgcattgcgcgaaggtcttgatttacctccgactgatgatccaatgcttcttgcgtacctcttggacccgtcaaacacgacgcccgaaggcgtagcccgtcgttacgtgggcgagtggaccgaagatgcagcgaaacgcgcgttattggccgaacgtttgcacgccaatttattaggacgtttgcaaggcgaggaacgtctcctctggctttacgaagaagtggagaaaccattgagtcgcgtgctcgcgcatatggaagctaccggtgtcaaattagacgtggcgtatttggagaatctcagccttgaagttgctgcccacatgcgccgcttggaggaagaagtattccgtttagcaggccgttcctttcgccttaattctcgcgatcagttagaacgtgtgttgttcgatgaacttggtctccctcctatcggcaagacagagaagaccggtaaacgtagcacttcagcggcggttttagaagctcttcgcgaagtccatcccattgtggacaagatcttgcaataccgcgaactcgcgaaattgaaaggcacctatattgaccgtcttccggcattagtccacccgaaaacgggacgcctccatacccgcttcaaccaaacagccacggcgaccggtcgtttgtcctcctctgatccaaaccttcagaatattccagtacgtaccccattgggccagaagatccgccgtgcgtttgtagctgaggagggttggcgtttagtggccctcgattatagccaaattgaattacgtgtccttgcccatctttctggcgatgagaacctcatccgcgtgtttcaggaaggcaaagacattcacactcaaacggcaagctggatgtttggattatcagctgaagcgatcgatcctttgatgcgtcgtgcagcgaagaccatcaatttcggtgttctctacggtatgagtgcctttcgtttgtcgcaggaattaggcattccctatgaagaagctcaggcgttcattcagaaatactttcaaagctatcccaaagttaaagcatggatcgagaagactctcgaagaaggccgcacacgtggttacgtagagaccttatttggacgtcgccgctatgttcccgatttaaacgctcgcgtgaaaggcaagcgtgaagccgccgaacgcatggcgttcaacatgcctgtacagggcacggcagctgacctcatgaaacttgcaatggtgcgcctttttccacaattgcgtgaagttggtgcccgcatgctcttgcaggtccacgatgaactcttgttagaagcgccaaaagagcgtgcggaagaggtggcagccctcgcgaaagaagttatggaaggcgtgtggcccttagcggtgcctcttgaagtcgaagttggtattggcgaggattggctggctgccaaagga

SEQ ID NO: 3700 - protein, 841 aa, synthetic construct
  REGION 1..841: note = Variant of DNA polymerase I from Thermus sp. strain 2.9
MHHHHHHGGSGVLPVFEPKGRVLLVDGHHLAYRNFFALKGLTTSSGEPVQGVYGFAKSLLKALKEDGDVVIVVFDAKAPSFRHEAYEAYKAGRAPTPEDFPRQLALMKELVDLLGLERLEVPGFEADDVLATLAKKAEREGYEVQILTADRDLFQLLSPRISVLHPEGHRITPEWLWEKYGLRPEQWVDFRALAGDPSDNIPGVKGIGEKTALKLLKEWGSLENLLKNLDQVKPESVREKILAHLEDLKLSRELSRVRTDLPLEVDFQRRREPDWEGLKAFLERLEFGSLLHEFGLLESPLPAEEAPWPPPEGAFLGYRLSRPEPMWAELLALAASAQGRVYRAEDPHGALRGLFEVRGLLAKDLAVVALREGLDLPPTDDPMLLAYLLDPSNTTPEGVARRYVGEWTEDAAKRALLAERLHANLLGRLQGEERLLWLYEEVEKPLSRVLAHMEATGVKLDVAYLENLSLEVAAHMRRLEEEVFRLAGRSFRLNSRDQLERVLFDELGLPPIGKTEKTGKRSTSAAVLEALREVHPIVDKILQYRELAKLKGTYIDRLPALVHPKTGRLHTRFNQTATATGRLSSSDPNLQNIPVRTPLGQKIRRAFVAEEGWRLVALDYSQIELRVLAHLSGDENLIRVFQEGKDIHTQTASWMFGLSAEAIDPLMRRAAKTINFGVLYGMSAFRLSQELGIPYEEAQAFIQKYFQSYPKVKAWIEKTLEEGRTRGYVETLFGRRRYVPDLNARVKGKREAAERMAFNMPVQGTAADLMKLAMVRLFPQLREVGARMLLQVHDELLLEAPKERAEEVAALAKEVMEGVWPLAVPLEVEVGIGEDWLAAKG

SEQ ID NO: 3701 - DNA, 2523 bp, synthetic construct
  misc_feature 1..2523: note = Variant of DNA polymerase I from Thermus sp. strain 2.9
  source 1..2523: mol_type = other DNA
atgcaccatcatcatcatcatggcggtagcggcgtgttaccggtgttcgagcctaaaggtcgcgtgcttctggttgatggccatcatctcgcgtatcgtaacttctttgccctgaaaggattaaccaccagcagcggcgagccggtacagggtgtctacggctttgcaaagtcgctcctgaaagctctgaaagaagacggtgatgtggtgattgttgtctttgatgcgaaagcgccaagttttcgccacgaagcgtacgaagcttacaaagccgggcgtgctccaacgccggaagactttcctcgccaattggcgcttatgaaggaattagtggatttgcttggcctcgaacgcttggaagttcccggtttcgaggcagacgacgtattagcgactctcgcaaagaaagccgaacgtgagggctatgaagtccagatcttgacagcagatcgcgatcttttccagcttttatctccgcgcatctcggtgttacacccggaagggcatcgtatcaccccggaatggctctgggagaaatatggtttgcgtcccgaacaatgggtggattttcgcgccttagcaggcgatccgagcgacaatattccgggagttaaaggtatcggcgagaagacggcgctcaagctccttaaagaatgggggtcgttggagaacttgcttaagaatttagatcaggtcaaaccagagtcagtgcgtgagaagattcttgctcacctcgaagacctcaaattaagccgcgaattgtcccgtgtacgcaccgatttgccgctcgaagttgatttccaacgccgccgcgaacctgactgggagggtcttaaagcgtttttagagcgtcttgaatttggttcgctcttgcatgaattcggccttttagaaagcccgttaccagccgaagaagcaccttggccaccgcccgagggcgcgtttttaggttaccgtttgagtcgcccggaaccgatgtgggccgaattactggctcttgcagcgtctgcccagggacgtgtgtatcgcgcggaagaccctcatggtgcgctccgcggcctcttcgaagtccgtggactccttgccaaagacttagctgttgttgcattgcgcgaaggtcttgatttacctccgactgatgatccaatgcttcttgcgtacctcttggacccgtcaaacacgacgcccgaaggcgtagcccgtcgttacggcggcgagtggaccgaagatgcagcgaaacgcgcgttattggccgaacgtttgcacgccaatttattaggacgtttgcaaggcgaggaacgtctcctctggctttacgaagaagtggagaaaccattgagtcgcgtgctcgcgcatatggaagctaccggtgtcaaattagacgtggcgtatttggagaatctcagccttgaagttgctgcccacatgcgccgcttggaggaagaagtattccgtttagcaggccgttcctttcgccttaattctcgcgatcagttagaacgtgtgttgttcgatgaacttggtctccctcctatcggcaagacagagaagaccggtaaacgtagcacttcagcggcggttttagaagctcttcgcgaagtccatcccattgtggacaagatcttgcaataccgcgaactcgcgaaattgaaaggcacctatattgaccgtcttccggcattagtccacccgaaaacgggacgcctccatacccgcttcaaccaaacagccacggcgaccggtcgtttgtcctcctctgatccaaaccttcagaatattccagtacgtaccccattgggccagaagatccgccgtgcgtttgtagctgaggagggttggcgtttagtggccctcgattatagccaaattgaattacgtgtccttgcccatctttctggcgatgagaacctcatccgcgtgtttcaggaaggcaaagacattcacactcaaacggcaagctggatgtttggattatcagctgaagcgatcgatcctttgatgcgtcgtgcagcgaagaccatcaatttcggtgttctctacggtatgagtgcctttcgtttgtcgcaggaattaggcattccctatgaagaagctcaggcgttcattcagaaatactttcaaagctatcccaaagttaaagcatggatcgagaagactctcgaagaaggccgcacacgtggttacgtagagaccttatttggacgtcgccgctatgttcccgatttaaacgctcgcgtgaaaggcaagcgtgaagccgccgaacgcatggcgttcaacatgcctgtacagggcacggcagctgacctcatgaaacttgcaatggtgcgcctttttccacaattgcgtgaagttggtgcccgcatgctcttgcaggtccacgatgaactcttgttagaagcgccaaaagagcgtgcggaagaggtggcatgtctcgcgaaagaagttatggaaggcgtgtggcccttagcggtgcctcttgaagtcgaagttggtattggcgaggattggctggctgccaaagga

SEQ ID NO: 3702 - protein, 841 aa, synthetic construct
  REGION 1..841: note = Variant of DNA polymerase I from Thermus sp. strain 2.9
MHHHHHHGGSGVLPVFEPKGRVLLVDGHHLAYRNFFALKGLTTSSGEPVQGVYGFAKSLLKALKEDGDVVIVVFDAKAPSFRHEAYEAYKAGRAPTPEDFPRQLALMKELVDLLGLERLEVPGFEADDVLATLAKKAEREGYEVQILTADRDLFQLLSPRISVLHPEGHRITPEWLWEKYGLRPEQWVDFRALAGDPSDNIPGVKGIGEKTALKLLKEWGSLENLLKNLDQVKPESVREKILAHLEDLKLSRELSRVRTDLPLEVDFQRRREPDWEGLKAFLERLEFGSLLHEFGLLESPLPAEEAPWPPPEGAFLGYRLSRPEPMWAELLALAASAQGRVYRAEDPHGALRGLFEVRGLLAKDLAVVALREGLDLPPTDDPMLLAYLLDPSNTTPEGVARRYGGEWTEDAAKRALLAERLHANLLGRLQGEERLLWLYEEVEKPLSRVLAHMEATGVKLDVAYLENLSLEVAAHMRRLEEEVFRLAGRSFRLNSRDQLERVLFDELGLPPIGKTEKTGKRSTSAAVLEALREVHPIVDKILQYRELAKLKGTYIDRLPALVHPKTGRLHTRFNQTATATGRLSSSDPNLQNIPVRTPLGQKIRRAFVAEEGWRLVALDYSQIELRVLAHLSGDENLIRVFQEGKDIHTQTASWMFGLSAEAIDPLMRRAAKTINFGVLYGMSAFRLSQELGIPYEEAQAFIQKYFQSYPKVKAWIEKTLEEGRTRGYVETLFGRRRYVPDLNARVKGKREAAERMAFNMPVQGTAADLMKLAMVRLFPQLREVGARMLLQVHDELLLEAPKERAEEVACLAKEVMEGVWPLAVPLEVEVGIGEDWLAAKG

SEQ ID NO: 3703 - DNA, 2523 bp, synthetic construct
  misc_feature 1..2523: note = Variant of DNA polymerase I from Thermus sp. strain 2.9
  source 1..2523: mol_type = other DNA
atgcaccatcatcatcatcatggcggtagcggcgtgttaccggtgttcgagcctaaaggtcgcgtgcttctggttgatggccatcatctcgcgtatcgtaacttctttgccctgaaaggattaaccaccagcagcggcgagccggtacagggtgtctacggctttgcaaagtcgctcctgaaagctctgaaagaagacggtgatgtggtgattgttgtctttgatgcgaaagcgccaagttttcgccacgaagcgtacgaagcttacaaagccgggcgtgctccaacgccggaagactttcctcgccaattggcgcttatgaaggaattagtggatttgcttggcctcgaacgcttggaagttcccggtttcgaggcagacgacgtattagcgactctcgcaaagaaagccgaacgtgagggctatgaagtccagatcttgacagcagatcgcgatcttttccagcttttatctccgcgcatctcggtgttacacccggaagggcatcgtatcaccccggaatggctctgggagaaatatggtttgcgtcccgaacaatgggtggattttcgcgccttagcaggcgatccgagcgacaatattccgggagttaaaggtatcggcgagaagacggcgctcaagctccttaaagaatgggggtcgttggagaacttgcttaagaatttagatcaggtcaaaccagagtcagtgcgtgagaagattcttgctcacctcgaagacctcaaattaagccgcgaattgtcccgtgtacgcaccgatttgccgctcgaagttgatttccaacgccgccgcgaacctgactgggagggtcttaaagcgtttttagagcgtcttgaatttggttcgctcttgcatgaattcggccttttagaaagcccgttaccagccgaagaagcaccttggccaccgcccgagggcgcgtttttaggttaccgtttgagtcgcccggaaccgatgtgggccgaattactggctcttgcagcgtctgcccagggacgtgtgtatcgcgcggaagaccctcatggtgcgctccgcggcctcttcgaagtccgtggactccttgccaaagacttagctgttgttgcattgcgcgaaggtcttgatttacctccgactgatgatccaatgcttcttgcgtacctcttggacccgtcaaacacgacgcccgaaggcgtagcccgtcgttacggcggcgagtggaccgaagatgcagcgaaacgcgcgttattggccgaacgtttgcacgccaatttattaggacgtttgcaaggcgaggaacgtctcgggtggctttacgaagaagtggagaaaccattgagtcgcgtgctcgcgcatatggaagctaccggtgtcaaattagacgtggcgtatttggagaatctcagccttgaagttgctgcccacatgcgccgcttggaggaagaagtattccgtttagcaggccgttcctttcgccttaattctcgcgatcagttagaacgtgtgttgttcgatgaacttggtctccctcctatcggcaagacagagaagaccggtaaacgtagcacttcagcggcggttttagaagctcttcgcgaagtccatcccattgtggacaagatcttgcaataccgcgaactcgcgaaattgaaaggcacctatattgaccgtcttccggcattagtccacccgaaaacgggacgcctccatacccgcttcaaccaaacagccacggcgaccggtcgtttgtcctcctctgatccaaaccttcagaatattccagtacgtaccccattgggccagaagatccgccgtgcgtttgtagctgaggagggttggcgtttagtggccctcgattatagccaaattgaattacgtgtccttgcccatctttctggcgatgagaacctcatccgcgtgtttcaggaaggcaaagacattcacactcaaacggcaagctggatgtttggattatcagctgaagcgatcgatcctttgatgcgtcgtgcagcgaagaccatcaatttcggtgttctctacggtatgagtgcctttcgtttgtcgcaggaattaggcattccctatgaagaagctcaggcgttcattcagaaatactttcaaagctatcccaaagttaaagcatggatcgagaagactctcgaagaaggccgcacacgtggttacgtagagaccttatttggacgtcgccgctatgttcccgatttaaacgctcgcgtgaaaggcaagcgtgaagccgccgaacgcatggcgttcaacatgcctgtacagggcacggcagctgacctcatgaaacttgcaatggtgcgcctttttccacaattgcgtgaagttggtgcccgcatgctcttgcaggtccacgatgaactcttgttagaagcgccaaaagagcgtgcggaagaggtggcagccctcgcgaaagaagttatggaaggcgtgtggcccttagcggtgcctcttgaagtcgaagttggtattggcgaggattggctggctgccaaagga

SEQ ID NO: 3704 - protein, 841 aa, synthetic construct
  REGION 1..841: note = Variant of DNA polymerase I from Thermus sp. strain 2.9
MHHHHHHGGSGVLPVFEPKGRVLLVDGHHLAYRNFFALKGLTTSSGEPVQGVYGFAKSLLKALKEDGDVVIVVFDAKAPSFRHEAYEAYKAGRAPTPEDFPRQLALMKELVDLLGLERLEVPGFEADDVLATLAKKAEREGYEVQILTADRDLFQLLSPRISVLHPEGHRITPEWLWEKYGLRPEQWVDFRALAGDPSDNIPGVKGIGEKTALKLLKEWGSLENLLKNLDQVKPESVREKILAHLEDLKLSRELSRVRTDLPLEVDFQRRREPDWEGLKAFLERLEFGSLLHEFGLLESPLPAEEAPWPPPEGAFLGYRLSRPEPMWAELLALAASAQGRVYRAEDPHGALRGLFEVRGLLAKDLAVVALREGLDLPPTDDPMLLAYLLDPSNTTPEGVARRYGGEWTEDAAKRALLAERLHANLLGRLQGEERLGWLYEEVEKPLSRVLAHMEATGVKLDVAYLENLSLEVAAHMRRLEEEVFRLAGRSFRLNSRDQLERVLFDELGLPPIGKTEKTGKRSTSAAVLEALREVHPIVDKILQYRELAKLKGTYIDRLPALVHPKTGRLHTRFNQTATATGRLSSSDPNLQNIPVRTPLGQKIRRAFVAEEGWRLVALDYSQIELRVLAHLSGDENLIRVFQEGKDIHTQTASWMFGLSAEAIDPLMRRAAKTINFGVLYGMSAFRLSQELGIPYEEAQAFIQKYFQSYPKVKAWIEKTLEEGRTRGYVETLFGRRRYVPDLNARVKGKREAAERMAFNMPVQGTAADLMKLAMVRLFPQLREVGARMLLQVHDELLLEAPKERAEEVAALAKEVMEGVWPLAVPLEVEVGIGEDWLAAKG

SEQ ID NO: 3705 - DNA, 2523 bp, synthetic construct
  misc_feature 1..2523: note = Variant of DNA polymerase I from Thermus sp. strain 2.9
  source 1..2523: mol_type = other DNA
atgcaccatcatcatcatcatggcggtagcggcgtgttaccggtgttcgagcctaaaggtcgcgtgcttctggttgatggccatcatctcgcgtatcgtaacttctttgccctgaaaggattaaccaccagcagcggcgagccggtacagggtgtctacggctttgcaaagtcgctcctgaaagctctgaaagaagacggtgatgtggtgattgttgtctttgatgcgaaagcgccaagttttcgccacgaagcgtacgaagcttacaaagccgggcgtgctccaacgccggaagactttcctcgccaattggcgcttatgaaggaattagtggatttgcttggcctcgaacgcttggaagttcccggtttcgaggcagacgacgtattagcgactctcgcaaagaaagccgaacgtgagggctatgaagtccagatcttgacagcagatcgcgatcttttccagcttttatctccgcgcatctcggtgttacacccggaagggcatcgtatcaccccggaatggctctgggagaaatatggtttgcgtcccgaacaatgggtggattttcgcgccttagcaggcgatccgagcgacaatattccgggagttaaaggtatcggcgagaagacggcgctcaagctccttaaagaatgggggtcgttggagaacttgcttaagaatttagatcaggtcaaaccagagtcagtgcgtgagaagattcttgctcacctcgaagacctcaaattaagccgcgaattgtcccgtgtacgcaccgatttgccgctcgaagttgatttccaacgccgccgcgaacctgactgggagggtcttaaagcgtttttagagcgtcttgaatttggttcgctcttgcatgaattcggccttttagaaagcccgttaccagccgaagaagcaccttggccaccgcccgagggcgcgtttttaggttaccgtttgagtcgcccggaaccgatgtgggccgaattactggctcttgcagcgtctgcccagggacgtgtgtatcgcgcggaagaccctcatggtgcgctccgcggcctcttcgaagtccgtggactccttgccaaagacttagctgttgttgcattgcgcgaaggtcttgatttacctccgactgatgatccaatgcttcttgcgtacctcttggacccgtcaaacacgacgcccgaaggcgtagcccgtcgttacggcggcgagtggaccgaagatgcagcgaaacgcgcgttattggccgaacgtttgcacgccaatttattaggacgtttgcaaggcgaggaacgtctcctctggctttacgaagaagtggagaaaccattgagtcgcgtgctcgcgcatatggaagctaccggtgtctttttagacgtggcgtatttggagaatctcagccttgaagttgctgcccacatgcgccgcttggaggaagaagtattccgtttagcaggccgttcctttcgccttaattctcgcgatcagttagaacgtgtgttgttcgatgaacttggtctccctcctatcggcaagacagagaagaccggtaaacgtagcacttcagcggcggttttagaagctcttcgcgaagtccatcccattgtggacaagatcttgcaataccgcgaactcgcgaaattgaaaggcacctatattgaccgtcttccggcattagtccacccgaaaacgggacgcctccatacccgcttcaaccaaacagccacggcgaccggtcgtttgtcctcctctgatccaaaccttcagaatattccagtacgtaccccattgggccagaagatccgccgtgcgtttgtagctgaggagggttggcgtttagtggccctcgattatagccaaattgaattacgtgtccttgcccatctttctggcgatgagaacctcatccgcgtgtttcaggaaggcaaagacattcacactcaaacggcaagctggatgtttggattatcagctgaagcgatcgatcctttgatgcgtcgtgcagcgaagaccatcaatttcggtgttctctacggtatgagtgcctttcgtttgtcgcaggaattaggcattccctatgaagaagctcaggcgttcattcagaaatactttcaaagctatcccaaagttaaagcatggatcgagaagactctcgaagaaggccgcacacgtggttacgtagagaccttatttggacgtcgccgctatgttcccgatttaaacgctcgcgtgaaaggcaagcgtgaagccgccgaacgcatggcgttcaacatgcctgtacagggcacggcagctgacctcatgaaacttgcaatggtgcgcctttttccacaattgcgtgaagttggtgcccgcatgctcttgcaggtccacgatgaactcttgttagaagcgccaaaagagcgtgcggaagaggtggcagccctcgcgaaagaagttatggaaggcgtgtggcccttagcggtgcctcttgaagtcgaagttggtattggcgaggattggctggctgccaaagga

SEQ ID NO: 3706 - protein, 841 aa, synthetic construct
  REGION 1..841: note = Variant of DNA polymerase I from Thermus sp. strain 2.9
MHHHHHHGGSGVLPVFEPKGRVLLVDGHHLAYRNFFALKGLTTSSGEPVQGVYGFAKSLLKALKEDGDVVIVVFDAKAPSFRHEAYEAYKAGRAPTPEDFPRQLALMKELVDLLGLERLEVPGFEADDVLATLAKKAEREGYEVQILTADRDLFQLLSPRISVLHPEGHRITPEWLWEKYGLRPEQWVDFRALAGDPSDNIPGVKGIGEKTALKLLKEWGSLENLLKNLDQVKPESVREKILAHLEDLKLSRELSRVRTDLPLEVDFQRRREPDWEGLKAFLERLEFGSLLHEFGLLESPLPAEEAPWPPPEGAFLGYRLSRPEPMWAELLALAASAQGRVYRAEDPHGALRGLFEVRGLLAKDLAVVALREGLDLPPTDDPMLLAYLLDPSNTTPEGVARRYGGEWTEDAAKRALLAERLHANLLGRLQGEERLLWLYEEVEKPLSRVLAHMEATGVFLDVAYLENLSLEVAAHMRRLEEEVFRLAGRSFRLNSRDQLERVLFDELGLPPIGKTEKTGKRSTSAAVLEALREVHPIVDKILQYRELAKLKGTYIDRLPALVHPKTGRLHTRFNQTATATGRLSSSDPNLQNIPVRTPLGQKIRRAFVAEEGWRLVALDYSQIELRVLAHLSGDENLIRVFQEGKDIHTQTASWMFGLSAEAIDPLMRRAAKTINFGVLYGMSAFRLSQELGIPYEEAQAFIQKYFQSYPKVKAWIEKTLEEGRTRGYVETLFGRRRYVPDLNARVKGKREAAERMAFNMPVQGTAADLMKLAMVRLFPQLREVGARMLLQVHDELLLEAPKERAEEVAALAKEVMEGVWPLAVPLEVEVGIGEDWLAAKG

SEQ ID NO: 3707 - DNA, 2523 bp, synthetic construct
  misc_feature 1..2523: note = Variant of DNA polymerase I from Thermus sp. strain 2.9
  source 1..2523: mol_type = other DNA
atgcaccatcatcatcatcatggcggtagcggcgtgttaccggtgttcgagcctaaaggtcgcgtgcttctggttgatggccatcatctcgcgtatcgtaacttctttgccctgaaaggattaaccaccagcagcggcgagccggtacagggtgtctacggctttgcaaagtcgctcctgaaagctctgaaagaagacggtgatgtggtgattgttgtctttgattggaaagcgccaagttttcgccacgaagcgtacgaagcttacaaagccgggcgtgctccaacgccggaagactttcctcgccaattggcgcttatgaaggaattagtggatttgcttggcctcgaacgcttggaagttcccggtttcgaggcagacgacgtattagcgactctcgcaaagaaagccgaacgtgagggctatgaagtccagatcttgacagcagatcgcgatcttttccagcttttatctccgcgcatctcggtgttacacccggaagggcatcgtatcaccccggaatggctctgggagaaatatggtttgcgtcccgaacaatgggtggattttcgcgccttagcaggcgatccgagcgacaatattccgggagttaaaggtatcggcgagaagacggcgctcaagctccttaaagaatgggggtcgttggagaacttgcttaagaatttagatcaggtcaaaccagagtcagtgcgtgagaagattcttgctcacctcgaagacctcaaattaagccgcgaattgtcccgtgtacgcaccgatttgccgctcgaagttgatttccaacgccgccgcgaacctgactgggagggtcttaaagcgtttttagagcgtcttgaatttggttcgctcttgcatgaattcggccttttagaaagcccgttaccagccgaagaagcaccttggccaccgcccgagggcgcgtttttaggttaccgtttgagtcgcccggaaccgatgtgggccgaattactggctcttgcagcgtctgcccagggacgtgtgtatcgcgcggaagaccctcatggtgcgctccgcggcctcttcgaagtccgtggactccttgccaaagacttagctgttgttgcattgcgcgaaggtcttgatttacctccgactgatgatccaatgcttcttgcgtacctcttggacccgtcaaacacgacgcccgaaggcgtagcccgtcgttacggcggcgagtggaccgaagatgcagcgaaacgcgcgttattggccgaacgtttgcacgccaatttattaggacgtttgcaaggcgaggaacgtctcctctggctttacgaagaagtggagaaaccattgagtcgcgtgctcgcgcatatggaagctaccggtgtcaaattagacgtggcgtatttggagaatctcagccttgaagttgctgcccacatgcgccgcttggaggaagaagtattccgtttagcaggccgttcctttcgccttaattctcgcgatcagttagaacgtgtgttgttcgatgaacttggtctccctcctatcggcaagacagagaagaccggtaaacgtagcacttcagcggcggttttagaagctcttcgcgaagtccatcccattgtggacaagatcttgcaataccgcgaactcgcgaaattgaaaggcacctatattgaccgtcttccggcattagtccacccgaaaacgggacgcctccatacccgcttcaaccaaacagccacggcgaccggtcgtttgtcctcctctgatccaaaccttcagaatattccagtacgtaccccattgggccagaagatccgccgtgcgtttgtagctgaggagggttggcgtttagtggccctcgattatagccaaattgaattacgtgtccttgcccatctttctggcgatgagaacctcatccgcgtgtttcaggaaggcaaagacattcacactcaaacggcaagctggatgtttggattatcagctgaagcgatcgatcctttgatgcgtcgtgcagcgaagaccatcaatttcggtgttctctacggtatgagtgcctttcgtttgtcgcaggaattaggcattccctatgaagaagctcaggcgttcattcagaaatactttcaaagctatcccaaagttaaagcatggatcgagaagactctcgaagaaggccgcacacgtggttacgtagagaccttatttggacgtcgccgctatgttcccgatttaaacgctcgcgtgaaaggcaagcgtgaagccgccgaacgcatggcgttcaacatgcctgtacagggcacggcagctgacctcatgaaacttgcaatggtgcgcctttttccacaattgcgtgaagttggtgcccgcatgctcttgcaggtccacgatgaactcttgttagaagcgccaaaagagcgtgcggaagaggtggcagccctcgcgaaagaagttatggaaggcgtgtggcccttagcggtgcctcttgaagtcgaagttggtattggcgaggattggctggctgccaaagga

SEQ ID NO: 3708 - protein, 841 aa, synthetic construct
  REGION 1..841: note = Variant of DNA polymerase I from Thermus sp. strain 2.9
MHHHHHHGGSGVLPVFEPKGRVLLVDGHHLAYRNFFALKGLTTSSGEPVQGVYGFAKSLLKALKEDGDVVIVVFDWKAPSFRHEAYEAYKAGRAPTPEDFPRQLALMKELVDLLGLERLEVPGFEADDVLATLAKKAEREGYEVQILTADRDLFQLLSPRISVLHPEGHRITPEWLWEKYGLRPEQWVDFRALAGDPSDNIPGVKGIGEKTALKLLKEWGSLENLLKNLDQVKPESVREKILAHLEDLKLSRELSRVRTDLPLEVDFQRRREPDWEGLKAFLERLEFGSLLHEFGLLESPLPAEEAPWPPPEGAFLGYRLSRPEPMWAELLALAASAQGRVYRAEDPHGALRGLFEVRGLLAKDLAVVALREGLDLPPTDDPMLLAYLLDPSNTTPEGVARRYGGEWTEDAAKRALLAERLHANLLGRLQGEERLLWLYEEVEKPLSRVLAHMEATGVKLDVAYLENLSLEVAAHMRRLEEEVFRLAGRSFRLNSRDQLERVLFDELGLPPIGKTEKTGKRSTSAAVLEALREVHPIVDKILQYRELAKLKGTYIDRLPALVHPKTGRLHTRFNQTATATGRLSSSDPNLQNIPVRTPLGQKIRRAFVAEEGWRLVALDYSQIELRVLAHLSGDENLIRVFQEGKDIHTQTASWMFGLSAEAIDPLMRRAAKTINFGVLYGMSAFRLSQELGIPYEEAQAFIQKYFQSYPKVKAWIEKTLEEGRTRGYVETLFGRRRYVPDLNARVKGKREAAERMAFNMPVQGTAADLMKLAMVRLFPQLREVGARMLLQVHDELLLEAPKERAEEVAALAKEVMEGVWPLAVPLEVEVGIGEDWLAAKG

SEQ ID NO: 3709 - DNA, 2523 bp, synthetic construct
  misc_feature 1..2523: note = Variant of DNA polymerase I from Thermus sp. strain 2.9
  source 1..2523: mol_type = other DNA
atgcaccatcatcatcatcatggcggtagcggcgtgttaccggtgttcgagcctaaaggtcgcgtgcttctggttgatggccatcatctcgcgtatcgtaacttctttgccctgaaaggattaaccaccagcagcggcgagccggtacagggtgtctacggctttgcaaagtcgctcctgaaagctctgaaagaagacggtgatgtggtgattgttgtctttgatgcgaaagcgccaagttttcgccacgaagcgtacgaagcttacaaagccgggcgtgctccaacgccggaagactttcctcgccaattggcgcttatgaaggaattagtggatttgcttggcctcgaacgcttggaagttcccggtttcgaggcagacgacgtattagcgactctcgcaaagaaagccgaacgtgagggctatgaagtccagatcttgacagcagatcgcgatcttttccagcttttatctccgcgcatctcggtgttacacccggaagggcatcgtatcaccccggaatggctctgggagaaatatggtttgcgtcccgaacaatgggtggattttcgcgccttagcaggcgatccgagcgacaatattccgggagttaaaggtatcggcgagaagacggcgctcaagctccttaaagaatgggggtcgttggagaacttgcttaagaatttagatcaggtcaaaccagagtcagtgcgtgagaagattcttgctcacctcgaagacctcaaattaagccgcgaattgtcccgtgtacgcaccgatttgccgctcgaagttgatttccaacgccgccgcgaacctgactgggagggtcttaaagcgtttttagagcgtcttgaatttggttcgctcttgcatgaattcggccttttagaaagcccgttaccagccgaagaagcaccttggccaccgcccgagggcgcgtttttaggttaccgtttgagtcgcccggaaccgatgtgggccgaattactggctcttgcagcgtctgcccagggacgtgtgtatcgcgcggaagaccctcatggtgcgctccgcggcctcttcgaagtccgtggactccttgccaaagacttagctgttgttgcattgcgcgaaggtcttgatttacctccgactgatgatccaatgcttcttgcgtacctcttggacccgtcaaacacgacgcccgaaggcgtagcccgtcgttacggcggcgagtggaccgaagatgcagcgaaacgcgcgttattggccgaacgtttgcacgccaatttattaggacgtttgcaaggcgaggaacgtctcctctggctttacgaagaagtggagaaaccattgagtcgcgtgctcgcgcatatggaagctaccggtgtcaaattagacgtggcgtatttggagaatctcagccttgaagttgctgcccacatgcgccgcttggaggaagaagtattccgtttagcaggctggtcctttcgccttaattctcgcgatcagttagaacgtgtgttgttcgatgaacttggtctccctcctatcggcaagacagagaagaccggtaaacgtagcacttcagcggcggttttagaagctcttcgcgaagtccatcccattgtggacaagatcttgcaataccgcgaactcgcgaaattgaaaggcacctatattgaccgtcttccggcattagtccacccgaaaacgggacgcctccatacccgcttcaaccaaacagccacggcgaccggtcgtttgtcctcctctgatccaaaccttcagaatattccagtacgtaccccattgggccagaagatccgccgtgcgtttgtagctgaggagggttggcgtttagtggccctcgattatagccaaattgaattacgtgtccttgcccatctttctggcgatgagaacctcatccgcgtgtttcaggaaggcaaagacattcacactcaaacggcaagctggatgtttggattatcagctgaagcgatcgatcctttgatgcgtcgtgcagcgaagaccatcaatttcggtgttctctacggtatgagtgcctttcgtttgtcgcaggaattaggcattccctatgaagaagctcaggcgttcattcagaaatactttcaaagctatcccaaagttaaagcatggatcgagaagactctcgaagaaggccgcacacgtggttacgtagagaccttatttggacgtcgccgctatgttcccgatttaaacgctcgcgtgaaaggcaagcgtgaagccgccgaacgcatggcgttcaacatgcctgtacagggcacggcagctgacctcatgaaacttgcaatggtgcgcctttttccacaattgcgtgaagttggtgcccgcatgctcttgcaggtccacgatgaactcttgttagaagcgccaaaagagcgtgcggaagaggtggcagccctcgcgaaagaagttatggaaggcgtgtggcccttagcggtgcctcttgaagtcgaagttggtattggcgaggattggctggctgccaaagga

SEQ ID NO: 3710 - protein, 841 aa, synthetic construct
  REGION 1..841: note = Variant of DNA polymerase I from Thermus sp. strain 2.9
MHHHHHHGGSGVLPVFEPKGRVLLVDGHHLAYRNFFALKGLTTSSGEPVQGVYGFAKSLLKALKEDGDVVIVVFDAKAPSFRHEAYEAYKAGRAPTPEDFPRQLALMKELVDLLGLERLEVPGFEADDVLATLAKKAEREGYEVQILTADRDLFQLLSPRISVLHPEGHRITPEWLWEKYGLRPEQWVDFRALAGDPSDNIPGVKGIGEKTALKLLKEWGSLENLLKNLDQVKPESVREKILAHLEDLKLSRELSRVRTDLPLEVDFQRRREPDWEGLKAFLERLEFGSLLHEFGLLESPLPAEEAPWPPPEGAFLGYRLSRPEPMWAELLALAASAQGRVYRAEDPHGALRGLFEVRGLLAKDLAVVALREGLDLPPTDDPMLLAYLLDPSNTTPEGVARRYGGEWTEDAAKRALLAERLHANLLGRLQGEERLLWLYEEVEKPLSRVLAHMEATGVKLDVAYLENLSLEVAAHMRRLEEEVFRLAGWSFRLNSRDQLERVLFDELGLPPIGKTEKTGKRSTSAAVLEALREVHPIVDKILQYRELAKLKGTYIDRLPALVHPKTGRLHTRFNQTATATGRLSSSDPNLQNIPVRTPLGQKIRRAFVAEEGWRLVALDYSQIELRVLAHLSGDENLIRVFQEGKDIHTQTASWMFGLSAEAIDPLMRRAAKTINFGVLYGMSAFRLSQELGIPYEEAQAFIQKYFQSYPKVKAWIEKTLEEGRTRGYVETLFGRRRYVPDLNARVKGKREAAERMAFNMPVQGTAADLMKLAMVRLFPQLREVGARMLLQVHDELLLEAPKERAEEVAALAKEVMEGVWPLAVPLEVEVGIGEDWLAAKG

SEQ ID NO: 3711 - DNA, 2523 bp, synthetic construct
  misc_feature 1..2523: note = Variant of DNA polymerase I from Thermus sp. strain 2.9
  source 1..2523: mol_type = other DNA
atgcaccatcatcatcatcatggcggtagcggcgtgttaccggtgttcgagcctaaaggtcgcgtgcttctggttgatggccatcatctcgcgtatcgtaacttctttgccctgaaaggattaaccaccagcagcggcgagccggtacagggtgtctacggctttgcaaagtcgctcctgaaagctctgaaagaagacggtgatgtggtgattgttgtctttgatgcgaaagcgccaagttttcgccacgaagcgtacgaagcttacaaagccgggcgtgctccaacgccggaagactttcctcgccaattggcgcttatgaaggaattagtggatttgcttggcctcgaacgcttggaagttcccggtttcgaggcagacgacgtattagcgactctcgcaaagaaagccgaacgtgagggctatgaagtccagatcttgacagcagatcgcgatcttttccagcttttatctccgcgcatctcggtgttacacccggaagggcatcgtatcaccccggaatggctctgggagaaatatggtttgcgtcccgaacaatgggtggattttcgcgccttagcaggcgatccgagcgacaatattccgggagttaaaggtatcggcgagaagacggcgctcaagctccttaaagaatgggggtcgttggagaacttgcttaagaatttagatcaggtcaaaccagagtcagtgcgtgagaagattcttgctcacctcgaagacctcaaattaagccgcgaattgtcccgtgtacgcaccgatttgccgctcgaagttgatttccaacgccgccgcgaacctgactgggagggtcttaaagcgtttttagagcgtcttgaatttggttcgctcttgcatgaattcggccttttagaaagcccgttaccagccgaagaagcaccttggccaccgcccgagggcgcgtttttaggttaccgtttgagtcgcccggaaccgatgtgggccgaattactggctcttgcagcgtctgcccagggacgtgtgtatcgcgcggaagaccctcatggtgcgctccgcggcctcttcgaagtccgtggactccttgccaaagacttagctgttgttgcattgcgcgaaggtcttgatttacctccgactgatgatccaatgcttcttgcgtacctcttggacccgtcaaacacgacgcccgaaggcgtagcccgtcgttacggcggcgagtggaccgaagatgcagcgaaacgcgcgttattggccgaacgtttgcacgccaatttattaggacgtttgcaaggcgaggaacgtctcctctggctttacgaagaagtggagaaaccattgagtcgcgtgctcgcgcatatggaagctaccggtgtcaaattagacgtggcgtatttggagaatctcagccttgaagttgctgcccacatgcgccgcttggaggaagaagtattccgtttagcaggccgttcctttcgccttaattctcgcgatcagttagaacgtgtgttgttcgatgaacttggtctccctcctatcggcaagacagagaagaccggtaaacgtagcacttcagcggcggttttagaagctcttcgcgaagtccatcccattgtggacaagatcttgcaataccgcgaactcgcgaaattgaaaggcacctatattgaccgtcttccggcattagtccacccgaaaacgggacgcctccatacccgcttcaaccaaacagccacggcgaccggtcgtttgtcctcctctgatccaaaccttcagaatattccagtacgtaccccattgggccagaagatccgccgtgcgtttgtagctgaggagggttggcgtttagtggccctcgattatagccaaattgaattacgtgtccttgcccatctttctggcgatgaggggctcatccgcgtgtttcaggaaggcaaagacattcacactcaaacggcaagctggatgtttggattatcagctgaagcgatcgatcctttgatgcgtcgtgcagcgaagaccatcaatttcggtgttctctacggtatgagtgcctttcgtttgtcgcaggaattaggcattccctatgaagaagctcaggcgttcattcagaaatactttcaaagctatcccaaagttaaagcatggatcgagaagactctcgaagaaggccgcacacgtggttacgtagagaccttatttggacgtcgccgctatgttcccgatttaaacgctcgcgtgaaaggcaagcgtgaagccgccgaacgcatggcgttcaacatgcctgtacagggcacggcagctgacctcatgaaacttgcaatggtgcgcctttttccacaattgcgtgaagttggtgcccgcatgctcttgcaggtccacgatgaactcttgttagaagcgccaaaagagcgtgcggaagaggtggcagccctcgcgaaagaagttatggaaggcgtgtggcccttagcggtgcctcttgaagtcgaagttggtattggcgaggattggctggctgccaaagga

SEQ ID NO: 3712 - protein, 841 aa, synthetic construct
  REGION 1..841: note = Variant of DNA polymerase I from Thermus sp. strain 2.9
MHHHHHHGGSGVLPVFEPKGRVLLVDGHHLAYRNFFALKGLTTSSGEPVQGVYGFAKSLLKALKEDGDVVIVVFDAKAPSFRHEAYEAYKAGRAPTPEDFPRQLALMKELVDLLGLERLEVPGFEADDVLATLAKKAEREGYEVQILTADRDLFQLLSPRISVLHPEGHRITPEWLWEKYGLRPEQWVDFRALAGDPSDNIPGVKGIGEKTALKLLKEWGSLENLLKNLDQVKPESVREKILAHLEDLKLSRELSRVRTDLPLEVDFQRRREPDWEGLKAFLERLEFGSLLHEFGLLESPLPAEEAPWPPPEGAFLGYRLSRPEPMWAELLALAASAQGRVYRAEDPHGALRGLFEVRGLLAKDLAVVALREGLDLPPTDDPMLLAYLLDPSNTTPEGVARRYGGEWTEDAAKRALLAERLHANLLGRLQGEERLLWLYEEVEKPLSRVLAHMEATGVKLDVAYLENLSLEVAAHMRRLEEEVFRLAGRSFRLNSRDQLERVLFDELGLPPIGKTEKTGKRSTSAAVLEALREVHPIVDKILQYRELAKLKGTYIDRLPALVHPKTGRLHTRFNQTATATGRLSSSDPNLQNIPVRTPLGQKIRRAFVAEEGWRLVALDYSQIELRVLAHLSGDEGLIRVFQEGKDIHTQTASWMFGLSAEAIDPLMRRAAKTINFGVLYGMSAFRLSQELGIPYEEAQAFIQKYFQSYPKVKAWIEKTLEEGRTRGYVETLFGRRRYVPDLNARVKGKREAAERMAFNMPVQGTAADLMKLAMVRLFPQLREVGARMLLQVHDELLLEAPKERAEEVAALAKEVMEGVWPLAVPLEVEVGIGEDWLAAKG

SEQ ID NO: 3713 - DNA, 2523 bp, synthetic construct
  misc_feature 1..2523: note = Variant of DNA polymerase I from Thermus sp. strain 2.9
  source 1..2523: mol_type = other DNA
atgcaccatcatcatcatcatggcggtagcggcgtgttaccggtgttcgagcctaaaggtcgcgtgcttctggttgatggccatcatctcgcgtatcgtaacttctttgccctgaaaggattaaccaccagcagcggcgagccggtacagggtgtctacggctttgcaaagtcgctcctgaaagctctgaaagaagacggtgatgtggtgattgttgtctttgatgcgaaagcgccaagttttcgccacgaagcgtacgaagcttacaaagccgggcgtgctccaacgccggaagactttcctcgccaattgcttcttatgaaggaattagtggatttgcttggcctcgaacgcttggaagttcccggtttcgaggcagacgacgtattagcgactctcgcaaagaaagccgaacgtgagggctatgaagtccagatcttgacagcagatcgcgatcttttccagcttttatctccgcgcatctcggtgttacacccggaagggcatcgtatcaccccggaatggctctgggagaaatatggtttgcgtcccgaacaatgggtggattttcgcgccttagcaggcgatccgagcgacaatattccgggagttaaaggtatcggcgagaagacggcgctcaagctccttaaagaatgggggtcgttggagaacttgcttaagaatttagatcaggtcaaaccagagtcagtgcgtgagaagattcttgctcacctcgaagacctcaaattaagccgcgaattgtcccgtgtacgcaccgatttgccgctcgaagttgatttccaacgccgccgcgaacctgactgggagggtcttaaagcgtttttagagcgtcttgaatttggttcgctcttgcatgaattcggccttttagaaagcccgttaccagccgaagaagcaccttggccaccgcccgagggcgcgtttttaggttaccgtttgagtcgcccggaaccgatgtgggccgaattactggctcttgcagcgtctgcccagggacgtgtgtatcgcgcggaagaccctcatggtgcgctccgcggcctcttcgaagtccgtggactccttgccaaagacttagctgttgttgcattgcgcgaaggtcttgatttacctccgactgatgatccaatgcttcttgcgtacctcttggacccgtcaaacacgacgcccgaaggcgtagcccgtcgttacggcggcgagtggaccgaagatgcagcgaaacgcgcgttattggccgaacgtttgcacgccaatttattaggacgtttgcaaggcgaggaacgtctcctctggctttacgaagaagtggagaaaccattgagtcgcgtgctcgcgcatatggaagctaccggtgtcaaattagacgtggcgtatttggagaatctcagccttgaagttgctgcccacatgcgccgcttggaggaagaagtattccgtttagcaggccgttcctttcgccttaattctcgcgatcagttagaacgtgtgttgttcgatgaacttggtctccctcctatcggcaagacagagaagaccggtaaacgtagcacttcagcggcggttttagaagctcttcgcgaagtccatcccattgtggacaagatcttgcaataccgcgaactcgcgaaattgaaaggcacctatattgaccgtcttccggcattagtccacccgaaaacgggacgcctccatacccgcttcaaccaaacagccacggcgaccggtcgtttgtcctcctctgatccaaaccttcagaatattccagtacgtaccccattgggccagaagatccgccgtgcgtttgtagctgaggagggttggcgtttagtggccctcgattatagccaaattgaattacgtgtccttgcccatctttctggcgatgagaacctcatccgcgtgtttcaggaaggcaaagacattcacactcaaacggcaagctggatgtttggattatcagctgaagcgatcgatcctttgatgcgtcgtgcagcgaagaccatcaatttcggtgttctctacggtatgagtgcctttcgtttgtcgcaggaattaggcattccctatgaagaagctcaggcgttcattcagaaatactttcaaagctatcccaaagttaaagcatggatcgagaagactctcgaagaaggccgcacacgtggttacgtagagaccttatttggacgtcgccgctatgttcccgatttaaacgctcgcgtgaaaggcaagcgtgaagccgccgaacgcatggcgttcaacatgcctgtacagggcacggcagctgacctcatgaaacttgcaatggtgcgcctttttccacaattgcgtgaagttggtgcccgcatgctcttgcaggtccacgatgaactcttgttagaagcgccaaaagagcgtgcggaagaggtggcagccctcgcgaaagaagttatggaaggcgtgtggcccttagcggtgcctcttgaagtcgaagttggtattggcgaggattggctggctgccaaagga

SEQ ID NO: 3714 - protein, 841 aa, synthetic construct
  REGION 1..841: note = Variant of DNA polymerase I from Thermus sp. strain 2.9
MHHHHHHGGSGVLPVFEPKGRVLLVDGHHLAYRNFFALKGLTTSSGEPVQGVYGFAKSLLKALKEDGDVVIVVFDAKAPSFRHEAYEAYKAGRAPTPEDFPRQLLLMKELVDLLGLERLEVPGFEADDVLATLAKKAEREGYEVQILTADRDLFQLLSPRISVLHPEGHRITPEWLWEKYGLRPEQWVDFRALAGDPSDNIPGVKGIGEKTALKLLKEWGSLENLLKNLDQVKPESVREKILAHLEDLKLSRELSRVRTDLPLEVDFQRRREPDWEGLKAFLERLEFGSLLHEFGLLESPLPAEEAPWPPPEGAFLGYRLSRPEPMWAELLALAASAQGRVYRAEDPHGALRGLFEVRGLLAKDLAVVALREGLDLPPTDDPMLLAYLLDPSNTTPEGVARRYGGEWTEDAAKRALLAERLHANLLGRLQGEERLLWLYEEVEKPLSRVLAHMEATGVKLDVAYLENLSLEVAAHMRRLEEEVFRLAGRSFRLNSRDQLERVLFDELGLPPIGKTEKTGKRSTSAAVLEALREVHPIVDKILQYRELAKLKGTYIDRLPALVHPKTGRLHTRFNQTATATGRLSSSDPNLQNIPVRTPLGQKIRRAFVAEEGWRLVALDYSQIELRVLAHLSGDENLIRVFQEGKDIHTQTASWMFGLSAEAIDPLMRRAAKTINFGVLYGMSAFRLSQELGIPYEEAQAFIQKYFQSYPKVKAWIEKTLEEGRTRGYVETLFGRRRYVPDLNARVKGKREAAERMAFNMPVQGTAADLMKLAMVRLFPQLREVGARMLLQVHDELLLEAPKERAEEVAALAKEVMEGVWPLAVPLEVEVGIGEDWLAAKG

SEQ ID NO: 3715 - DNA, 2523 bp, synthetic construct
  misc_feature 1..2523: note = Variant of DNA polymerase I from Thermus sp. strain 2.9
  source 1..2523: mol_type = other DNA
atgcaccatcatcatcatcatggcggtagcggcgtgttagaggtgttcgagcctaaaggtcgcgtgcttctggttgatggccatcatctcgcgtatcgtaacttctttgccctgaaaggattaaccaccagcagcggcgagccggtacagggtgtctacggctttgcaaagtcgctcctgaaagctctgaaagaagacggtgatgtggtgattgttgtctttgatgcgaaagcgccaagttttcgccacgaagcgtacgaagcttacaaagccgggcgtgctccaacgccggaagactttcctcgccaattggcgcttatgaaggaattagtggatttgcttggcctcgaacgcttggaagttcccggtttcgaggcagacgacgtattagcgactctcgcaaagaaagccgaacgtgagggctatgaagtccagatcttgacagcagatcgcgatcttttccagcttttatctccgcgcatctcggtgttacacccggatgggcatcgtatcaccccggaatggctctgggagaaatatggtttgcgtcccgaacaatgggtggattttcgcgccttagcaggcgatccgagcgacaatattccgggagttaaaggtatcggcgagaagacggcgctcaagctccttaaagaatgggggtcgttggagaacttgcttaagaatttagatcaggtcaaaccagagtcagtgcgtgagaagattcttgctcacctcgaagacctcaaattaagccgcgaattgtcccgtgtacgcaccgatttgccgctcgaagttgatttccaacgccgccgcgaacctgactgggagggtcttaaagcgtttttagagcgtcttgaatttggttcgctcttgcatgaattcggccttttagaaagcccgttaccagccgaagaagcaccttggccaccgcccgagggcgcgtttttaggttaccgtttgagtcgcccggaaccgatgtgggccgaattactggctcttgcagcgtctgcccagggacgtgtgtatcgcgcggaagaccctcatggtgcgctccgcggcctcttcgaagtccgtggactccttgccaaagacttagctgttgttgcattgcgcgaaggtcttgatttacctccgactgatgatccaatgcttcttgcgtacctcttggacccgtcaaacacgacgcccgaaggcgtagcccgtcgttacggcggcgagtggaccgaagatgcagcgaaacgcgcgttattggccgaacgtttgcacgccaatttattaggacgtttgcaaggcgaggaacgtctcctctggctttacgaagaagtggagaaaccattgagtcgcgtgctcgcgcatatggaagctaccggtgtcaaattagacgtggcgtatttggagaatctcagccttgaagttgctgcccacatgcgccgcttggaggaagaagtattccgtttagcaggccgttcctttcgccttaattctcgcgatcagttagaacgtgtgttgttcgatgaacttggtctccctcctatcggcaagacagagaagaccggtaaacgtagcacttcagcggcggttttagaagctcttcgcgaagtccatcccattgtggacaagatcttgcaataccgcgaactcgcgaaattgaaaggcacctatattgaccgtcttccggcattagtccacccgaaaacgggacgcctccatacccgcttcaaccaaacagccacggcgaccggtcgtttgtcctcctctgatccaaaccttcagaatattccagtacgtaccccattgggccagaagatccgccgtgcgtttgtagctgaggagggttggcgtttagtggccctcgattatagccaaattgaattacgtgtccttgcccatctttctggcgatgagaacctcatccgcgtgtttgaggaaggcaaagacattcacactcaaacggcaagctggatgtttggattatcagctgaagcgatcgatcctttgatgcgtcgtgcagcgaagaccatcaatttcggtgttctctacggtatgagtgcctttcgtttgtcgcaggaattaggcattccctacgaagaagctcaggcgttcattcagaaatactttcaaagctatcccaaagttaaagcatggatcgagaagactctcgaagaaggccgcacacgtggttacgtagagaccttatttggacgtcgccgctatgttcccgatttaaacgctcgcgtgaaaggcaagcgtgaagccgccgaacgcatggcgttcaacatgcctgtacagggcacggcagctgacctcatgaaacttgcaatggtgcgcctttttccacaattgcgtgaagttggtgcccgcatgctcttgcaggtccacgatgaactcttgttagaagcgccaaaagagcgtgcggaagaggtggcagccctcgcgaaagaagttatggaaggcgtgtggcccttagcggtgcctcttgaagtcgaagttggtattggcgaggattggctggctgccaaagga

SEQ ID NO: 3716 - protein, 841 aa, synthetic construct; identical to SEQ ID NO: 3634
  REGION 1..841: note = Variant of DNA polymerase I from Thermus sp. strain 2.9

SEQ ID NO: 3717 - DNA, 2523 bp, synthetic construct
  misc_feature 1..2523: note = Variant of DNA polymerase I from Thermus sp. strain 2.9
  source 1..2523: mol_type = other DNA
atgcaccatcatcatcatcatggcggtagcggcgtgttaccggtgttcgagcctaaaggtcgcgtgcttctggttgatggccatcatctcgcgtatcgtaacttctttgccctgaaaggattaaccaccagcagcggcgagccggtacagggtgtctacggctttgcaaagtcgctcctgaaagctctgaaagaagacggtgatgtggtgattgttgtctttgatgcgaaagcgccaagttttcgccacgaagcgtacgaagcttacaaagccgggcgtgctccaacgccggaagactttcctcgccaattggcgcttatgaaggaattagtggatttgcttggcctcgaacgcttggaagttcccggtttcgaggcagacgacgtattagcgactctcgcaaagaaagccgaacgtgagggctatgaagtccagatcttgacagcagatcgcgatcttttccagcttttatctccgcgcatctcggtgttacacccggaagggcatcgtatcaccccggaatggctctgggagaaatatggtttgcgtcccgaacaatgggtggattttcgcgccttagcaggcgatccgagcgacaatattccgggagttaaaggtatcggcgagaagacggcgctcaagctccttaaagaatgggggtcgttggagaacttgcttaagaatttagatcaggtcaaaccagagtcagtgcgtgagaagattcttgctcacctcgaagacctcaaattaagccgcgaattgtcccgtgtacgcaccgatttgccgctcgaagttgatttccaacgccgccgcgaacctgactgggagggtcttaaagcgtttttagagcgtcttgaatttggttcgctcctgcatgaattcggccttttagaaagcccgttagtggccgaagaagcaccttggccaccgcccgagggcgcgtttttaggttaccgtttgagtcgcccggaaccgatgtgggccgaattactggctcttgcagcgtctgcccagggacgtgtgtatcgcgcggaagaccctcatggtgcgctccgcggcctcttcgaagtccgtggactccttgccaaagacttagctgttgttgcattgcgcgaaggtcttgatttacctccgactgatgatccaatgcttcttgcgtacctcttggacccgtcaaacacgacgcccgaaggcgtagcccgtcgttacggcggcgagtggaccgaagatgcagcgaaacgcgcgttattggccgaacgtttgcacgccaatttattaggacgtttgcaaggcgaggaacgtctcctctggctttacgaagaagtggagaaaccattgagtcgcgtgctcgcgcatatggaagctaccggtgtcaaattagacgtggcgtatttggagaatctcagccttgaagttgctgcccacatgcgccgcttggaggaagaagtattccgtttagcaggccgttcctttcgccttaattctcgcgatcagttagaacgtgtgttgttcgatgaacttggtctccctcctatcggcaagacagagaagaccggtaaacgtagcacttcagcggcggttttagaagctcttcgcgaagtccatcccattgtggacaagatcttgcaataccgcgaactcgcgaaattgaaaggcacctatattgaccgtcttccggcattagtccacccgaaaacgggacgcctccatacccgcttcaaccaaacagccacggcgaccggtcgtttgtcctcctctgatccaaaccttcagaatattccagtacgtaccccattgggccagaagatccgccgtgcgtttgtagctgaggagggttggcgtttagtggccctcgattatagccaaattgaattacgtgtccttgcccatctttctggcgatgagaacctcatccgcgtgtttcaggaaggcaaagacattcacactcaaacggcaagctggatgtttggattatcagctgaagcgatcgatcctttgatgcgtcgtgcagcgaagacgatcaatttcggtgttctctacggtatgagtgcctttcgtttgtcgcaggaattaggcattccctatgaagaagctcaggcgttcattcagaaatactttcaaagctatcccaaagttaaagcatggatcgagaagactctcgaagaaggccgcacacgtggttacgtagagaccttatttggacgtcgccgctatgttcccgatttaaacgctcgcgtgaaaggcaagcgtgaagccgccgaacgcatggcgttcaacatgcctgtacagggcacggcagctgacctcatgaaacttgcaatggtgcgcctttttccacaattgcgtgaagttggtgcccgcatgctcttgcaggtccacgatgaactcttgttagaagcgccaaaagagcgtgcggaagaggtggcagccctcgcgaaagaagttatggaaggcgtgtggcccttagcggtgcctcttgaagtcgaagttggtattggcgaggattggctggctgccaaagga

SEQ ID NO: 3718 - protein, 841 aa, synthetic construct
  REGION 1..841: note = Variant of DNA polymerase I from Thermus sp. strain 2.9
MHHHHHHGGSGVLPVFEPKGRVLLVDGHHLAYRNFFALKGLTTSSGEPVQGVYGFAKSLLKALKEDGDVVIVVFDAKAPSFRHEAYEAYKAGRAPTPEDFPRQLALMKELVDLLGLERLEVPGFEADDVLATLAKKAEREGYEVQILTADRDLFQLLSPRISVLHPEGHRITPEWLWEKYGLRPEQWVDFRALAGDPSDNIPGVKGIGEKTALKLLKEWGSLENLLKNLDQVKPESVREKILAHLEDLKLSRELSRVRTDLPLEVDFQRRREPDWEGLKAFLERLEFGSLLHEFGLLESPLVAEEAPWPPPEGAFLGYRLSRPEPMWAELLALAASAQGRVYRAEDPHGALRGLFEVRGLLAKDLAVVALREGLDLPPTDDPMLLAYLLDPSNTTPEGVARRYGGEWTEDAAKRALLAERLHANLLGRLQGEERLLWLYEEVEKPLSRVLAHMEATGVKLDVAYLENLSLEVAAHMRRLEEEVFRLAGRSFRLNSRDQLERVLFDELGLPPIGKTEKTGKRSTSAAVLEALREVHPIVDKILQYRELAKLKGTYIDRLPALVHPKTGRLHTRFNQTATATGRLSSSDPNLQNIPVRTPLGQKIRRAFVAEEGWRLVALDYSQIELRVLAHLSGDENLIRVFQEGKDIHTQTASWMFGLSAEAIDPLMRRAAKTINFGVLYGMSAFRLSQELGIPYEEAQAFIQKYFQSYPKVKAWIEKTLEEGRTRGYVETLFGRRRYVPDLNARVKGKREAAERMAFNMPVQGTAADLMKLAMVRLFPQLREVGARMLLQVHDELLLEAPKERAEEVAALAKEVMEGVWPLAVPLEVEVGIGEDWLAAKG

SEQ ID NO: 3719 - DNA, 2523 bp, synthetic construct
  misc_feature 1..2523: note = Variant of DNA polymerase I from Thermus sp. strain 2.9
  source 1..2523: mol_type = other DNA
atgcaccatcatcatcatcatggcggtagcggcgtgttacctgtgttcgagcctaaaggtcgcgtgcttctggttgatggccatcatctcgcgtatcgtaacttctttgccctgaaaggattaaccaccagcagcggcgagccggtacagggtgtctacggctttgcaaagtcgctcctgaaagctctgaaagaagacggtgatgtggtgattgttgtctttgatgcgaaagcgccaagttttcgccacgaagcgtacgaagcttacaaagccgggcgtgctccaacgccggaagactttcctcgccaattggcgcttatgaaggaattagtggatttgcttggcctcgaacgcttggaagttcccggtttcgaggcagacgacgtattagcgactctcgcaaagaaagccgaacgtgagggctatgaagtccagatcttgacagcagatcgcgatcttttccagcttttatctccgcgcatctcggtgttacacccggaagggcatcgtatcaccccggaatggctctgggagaaatatggtttgcgtcccgaacaatgggtggattttcgcgccttagcaggcgatccgagcgacaatattccgggagttaaaggtatcggcgagaagacggcgctcaagctccttaaagaatgggggtcgttggagaacttgcttaagaatttagatcaggtcaaaccagagtcagtgcgtgagaagattcttgctcacctcgaagacctcaaattaagccgcgaattgtcccgtgtacgcaccgatttgccgctcgaagttgatttccaacgccgccgcgaacctgactgggagggtcttaaagcgtttttagagcgtcttgaatttggttcgctcttgcatgaattcggccttttagaaagcccgttaccagccgaagaagcaccttggccaccgcccgagggcgcgtttttaggttaccgtttgagtcgcccggaaccgatgtgggccgaattactggctcttgcagcgtctgcccagggacgtgtgtatcgcgcggaagaccctcatggtgcgctccgcggcctcttcgaagtccgtggactccttgccaaagacttagctgttgttgcattgcgcgaaggtcttgatttacctccgactgatgatccaatgcttcttgcgtacctcttggacccgtcaaacacgacgcctgaaggcgtagcccgtcgttacggcggcgagtggaccgaagatgcagcgaaacgcgcgttattggccgaacgtttgcacgccaatttattaggacgtttgcaaggcgaggagcgtctcctctggctttacgaagaagtggagaaaccattgagtcgcgtgctcgcgcatatggaagctaccggtgtcaaattagacgtggcgtatttggagaatctcagccttgaagttgctgcccacatgcgccgcttggaggaagaagtattccgtttagcaggccgttcctttcgccttaattctcgcgatcagttagaacgtgtgttgttcgatgaacttggtctccctcctatcggcaagacagagaagaccggtaaacgtagcacttcagcggcggttttagaagctcttcgcgaagtccatcccattgtggacaagatcttgcaataccgcgaactcgcgaaattgaaaggcacctatattgaccgtcttccggcattagtccacccgaaaacgggacgcctccatacccgcttcaaccaaacagccacggcgaccggtcgtttgtcctcctctgatccaaaccttcagaatattccagtacgtaccccgttgggccagaagatccgccgtgcgtttgtagctgaggagggttggcgtttagtggccctcgattatagccaaattgaattacgtgtccttgcccatctttctggcgatgagaacctcatccgcgtgtttcaggaaggcaaagacattcacactcaaacggcaagctggatgtttggattatcagctgaagcgatcgatcctttgatgcgtcgtgcagcgaagaccatcaatttcggtgttctctacggtatgagtgcctttcgtttgtcgcaggaattaggcattccctacgaagaagctcaggcgttcattcagaaatactttcaaagctatcccaaagttaaagcatggatcgagaagactctcgaagaaggccgccaccgtggttacgtagagaccttatttggacgtcgccgctatgttcccgatttaaacgctcgcgtgaaaggcaagcgtgaagccgccgaacgcatggcgttcaacatgcctgtacagggcacggcagctgacctcatgaaacttgcaatggtgcgcctttttccacaattgcgtgaagttggtgcccgcatgctcttgcaggtccacgatgaactcttgttagaagcgccaaaagagcgtgcggaagaggtggcagccctcgcgaaagaagttatggaaggcgtgtggcccttagcggtgcctcttgaagtcgaagttggtattggcgaggattggctggctgccaaagga

SEQ ID NO: 3720 - protein, 841 aa, synthetic construct; identical to SEQ ID NO: 3512
  REGION 1..841: note = Variant of DNA polymerase I from Thermus sp. strain 2.9

SEQ ID NO: 3721 - DNA, 2523 bp, synthetic construct; identical to SEQ ID NO: 3679
  misc_feature 1..2523: note = Variant of DNA polymerase I from Thermus sp. strain 2.9
  source 1..2523: mol_type = other DNA

SEQ ID NO: 3722 - protein, 841 aa, synthetic construct; identical to SEQ ID NO: 3680
  REGION 1..841: note = Variant of DNA polymerase I from Thermus sp. strain 2.9

SEQ ID NO: 3723 - DNA, 2523 bp, synthetic construct
  misc_feature 1..2523: note = Variant of DNA polymerase I from Thermus sp. strain 2.9
  source 1..2523: mol_type = other DNA
atgcaccatcatcatcatcatggcggtagcggcgtgttaccggtgttcgagcctaaaggtcgcgtgcttctggttgatggccatcatctcgcgtatcgtaacttctttgccctgaaaggattaaccaccagcagcggcgagccggtacagggtgtctacggctttgcaaagtcgctcctgaaagctctgaaagaagacggtgatgtggtgattgttgtctttgatgcgaaagcgccaagttttcgccacgaagcgtacgaagcttacaaagccgggcgtgctccaacgccggaagactttcctcgccaattggcgcttatgaaggaattagtggatttgcttggcctcgaacgcttggaagttcccggtttcgaggcagacgacgtattagcgactctcgcaaagaaagccgaacgtgagggctatgaagtccagatcttgacagcagatcgcgatcttttccagcttttatctccgcgcatctcggtgttacacccggaagggcatcgtatcaccccggaatggctctgggagaaatatggtttgcgtcccgaacaatgggtggattttcgcgccttagcaggcgatccgagcgacaatattccgggagttaaaggtatcggcgagaagacggcgctcaagctccttaaagaatgggggtcgttggagaacttgcttaagaatttagatcaggtcaaaccagagtcagtgcgtgagaagattcttgctcacctcgaagacctcaaattaagccgcgaattgtcccgtgtacgcaccgatttgccgctcgaagttgatttccaacgccgccgcgaacctgactgggagggtcttaaagcgtttttagagcgtcttgaatttggttcgctcttgcatgaattcggccttttagaaagcccgttaccagccgaagaagcaccttggccaccgcccgagggcgcgtttttaggttaccgtttgagtcgcccggaaccgatgtgggccgaattactggctcttgcagcgtctgcccagggacgtgtgtatcgcgcggaagaccctcatggtgcgctccgcggcctcttcgaagtccgtggactccttgccaaagacttagctgttgttgcattgcgcgaaggtcttgatttacctccgactgatgatccaatgcttcttgcgtacctcttggacccgtcaaacacgacgcccgaaggcgtagcccgtcgttacggcggcgagtggaccgaagatgcagcgaaacgcgcgttattggccgaacgtttgcacgccaatttattaggacgtttgcaaggcgaggaacgtctcctctggctttacgaagaagtggagaaaccattgagtcgcgtgctcgcgcatatggaagctaccggtgtcaaattagacgtggcgtatttggagaatctcagccttgaagttgctgcccacatgcgccgcttggaggaagaagtattccgtttagcaggccgttcctttcgccttaattctcgcgatcagttagaacgtgtgttgttcgatgaacttggtctccctcctatcggcaagacagagaagaccggtaaacgtagcacttcagcggcggttttagaagctcttcgcgaagtccatcccattgtggacaagatcttgcaataccgcgaactcgcgaaattgaaaggcacctatattgaccgtcttccggcattagtccacccgaaaacgggacgcctccatacccgcttcaaccaaacagccacggcgaccggtcgtttgtcctcctctgatccaaaccttcagaatattccagtacgtaccccattgggccagaagatccgccgtgcgtttgtagctgaggagggttggcgtttagtggccctcgattatagccaaattgaattacgtgtccttgcccatctttctggcgatgagaacctcatccgcgtgtttcaggaaggcaaagacattcacactcaaacggcaagctggatgtttggattatcagctgaagcgatcgatcctttgatgcgtcgtgcagcgaagaccatcaatttcggtgttctctacggtatgagtgcctttcgtttgtcgcaggaattaggcattccctatgaagaagctcaggcgttcattcagaaatactttcaaagctatcccaaagttaaagcatggatcgagaagactctcgaagaaggccgcacacgtggttacgtagagaccttatttggacgtcgccgctatgttcccgatttaaacgctcgcgtgaaaggcaagcgtgaagccgccgaacgcatggcgttcaacatgcctgtacagggcacggcagctgacctcatgaaacttgcaatggtgcgcctttttccacaattgcgtgaagttggtgcccgcatgctcttgcaggtccacgatgaactcttgttagaagcgccaaaagagcgtgcggaagaggtggcagccctcgcgaaagaagttatggaagaggtgtggcccttagcggtgcctcttgaagtcgaagttggtattggcgaggattggctggctgccaaagga

SEQ ID NO: 3724 - protein, 841 aa, synthetic construct
  REGION 1..841: note = Variant of DNA polymerase I from Thermus sp. strain 2.9
MHHHHHHGGSGVLPVFEPKGRVLLVDGHHLAYRNFFALKGLTTSSGEPVQGVYGFAKSLLKALKEDGDVVIVVFDAKAPSFRHEAYEAYKAGRAPTPEDFPRQLALMKELVDLLGLERLEVPGFEADDVLATLAKKAEREGYEVQILTADRDLFQLLSPRISVLHPEGHRITPEWLWEKYGLRPEQWVDFRALAGDPSDNIPGVKGIGEKTALKLLKEWGSLENLLKNLDQVKPESVREKILAHLEDLKLSRELSRVRTDLPLEVDFQRRREPDWEGLKAFLERLEFGSLLHEFGLLESPLPAEEAPWPPPEGAFLGYRLSRPEPMWAELLALAASAQGRVYRAEDPHGALRGLFEVRGLLAKDLAVVALREGLDLPPTDDPMLLAYLLDPSNTTPEGVARRYGGEWTEDAAKRALLAERLHANLLGRLQGEERLLWLYEEVEKPLSRVLAHMEATGVKLDVAYLENLSLEVAAHMRRLEEEVFRLAGRSFRLNSRDQLERVLFDELGLPPIGKTEKTGKRSTSAAVLEALREVHPIVDKILQYRELAKLKGTYIDRLPALVHPKTGRLHTRFNQTATATGRLSSSDPNLQNIPVRTPLGQKIRRAFVAEEGWRLVALDYSQIELRVLAHLSGDENLIRVFQEGKDIHTQTASWMFGLSAEAIDPLMRRAAKTINFGVLYGMSAFRLSQELGIPYEEAQAFIQKYFQSYPKVKAWIEKTLEEGRTRGYVETLFGRRRYVPDLNARVKGKREAAERMAFNMPVQGTAADLMKLAMVRLFPQLREVGARMLLQVHDELLLEAPKERAEEVAALAKEVMEEVWPLAVPLEVEVGIGEDWLAAKG

SEQ ID NO: 3725 - DNA, 2523 bp, synthetic construct
  misc_feature 1..2523: note = Variant of DNA polymerase I from Thermus sp. strain 2.9
  source 1..2523: mol_type = other DNA
atgcaccattttcatcatcatggcggtagcggcgtgttaccggtgttcgagcctaaaggtcgcgtgcttctggttgatggccatcatctcgcgtatcgtaacttctttgccctgaaaggattaaccaccagcagcggcgagccggtacagggtgtctacggctttgcaaagtcgctcctgaaagctctgaaagaagacggtgatgtggtgattgttgtctttgatgcgaaagcgccaagttttcgccacgaagcgtacgaagcttacaaagccgggcgtgctccaacgccggaagactttcctcgccaattggcgcttatgaaggaattagtggatttgcttggcctcgaacgcttggaagttcccggtttcgaggcagacgacgtattagcgactctcgcaaagaaagccgaacgtgagggctatgaagtccagatcttgacagcagatcgcgatcttttccagcttttatctccgcgcatctcggtgttacacccggaagggcatcgtatcaccccggaatggctctgggagaaatatggtttgcgtcccgaacaatgggtggattttcgcgccttagcaggcgatccgagcgacaatattccgggagttaaaggtatcggcgagaagacggcgctcaagctccttaaagaatgggggtcgttggagaacttgcttaagaatttagatcaggtcaaaccagagtcagtgcgtgagaagattcttgctcacctcgaagacctcaaattaagccgcgaattgtcccgtgtacgcaccgatttgccgctcgaagttgatttccaacgccgccgcgaacctgactgggagggtcttaaagcgtttttagagcgtcttgaatttggttcgctcttgcatgaattcggccttttagaaagcccgttaccagccgaagaagcaccttggccaccgcccgagggcgcgtttttaggttaccgtttgagtcgcccggaaccgatgtgggccgaattactggctcttgcagcgtctgcccagggacgtgtgtatcgcgcggaagaccctcatggtgcgctccgcggcctcttcgaagtccgtggactccttgccaaagacttagctgttgttgcattgcgcgaaggtcttgatttacctccgactgatgatccaatgcttcttgcgtacctcttggacccgtcaaacacgacgcccgaaggcgtagcccgtcgttacggcggcgagtggaccgaagatgcagcgaaacgcgcgttattggccgaacgtttgcacgccaatttattaggacgtttgcaaggcgaggaacgtctcctctggctttacgaagaagtggagaaaccattgagtcgcgtgctcgcgcatatggaagctaccggtgtcaaattagacgtggcgtatttggagaatctcagccttgaagttgctgcccacatgcgccgcttggaggaagaagtattccgtttagcaggccgttcctttcgccttaattctcgcgatcagttagaacgtgtgttgttcgatgaacttggtctccctcctatcggcaagacagagaagaccggtaaacgtagcacttcagcggcggttttagaagctcttcgcgaagtccatcccattgtggacaagatcttgcaataccgcgaactcgcgaaattgaaaggcacctatattgaccgtcttccggcattagtccacccgaaaacgggacgcctccatacccgcttcaaccaaacagccacggcgaccggtcgtttgtcctcctctgatccaaaccttcagaatattccagtacgtaccccattgggccagaagatccgccgtgcgtttgtagctgaggagggttggcgtttagtggccctcgattatagccaaattgaattacgtgtccttgcccatctttctggcgatgagaacctcatccgcgtgtttcaggaaggcaaagacattcacactcaaacggcaagctggatgtttggattatcagctgaagcgatcgatcctttgatgcgtcgtgcagcgaagaccatcaatttcggtgttctctacggtatgagtgcctttcgtttgtcgcaggaattaggcattccctatgaagaagctcaggcgttcattcagaaatactttcaaagctatcccaaagttaaagcatggatcgagaagactctcgaagaaggccgcacacgtggttacgtagagaccttatttggacgtcgccgctatgttcccgatttaaacgctcgcgtgaaaggcaagcgtgaagccgccgaacgcatggcgttcaacatgcctgtacagggcacggcagctgacctcatgaaacttgcaatggtgcgcctttttccacaattgcgtgaagttggtgcccgcatgctcttgcaggtccacgatgaactcttgttagaagcgccaaaagagcgtgcggaagaggtggcagccctcgcgaaagaagttatggaaggcgtgtggcccttagcggtgcctcttgaagtcgaagttggtattggcgaggattggctggctgccaaagga

SEQ ID NO: 3726 - protein, 841 aa, synthetic construct
  REGION 1..841: note = Variant of DNA polymerase I from Thermus sp. strain 2.9
MHHFHHHGGSGVLPVFEPKGRVLLVDGHHLAYRNFFALKGLTTSSGEPVQGVYGFAKSLLKALKEDGDVVIVVFDAKAPSFRHEAYEAYKAGRAPTPEDFPRQLALMKELVDLLGLERLEVPGFEADDVLATLAKKAEREGYEVQILTADRDLFQLLSPRISVLHPEGHRITPEWLWEKYGLRPEQWVDFRALAGDPSDNIPGVKGIGEKTALKLLKEWGSLENLLKNLDQVKPESVREKILAHLEDLKLSRELSRVRTDLPLEVDFQRRREPDWEGLKAFLERLEFGSLLHEFGLLESPLPAEEAPWPPPEGAFLGYRLSRPEPMWAELLALAASAQGRVYRAEDPHGALRGLFEVRGLLAKDLAVVALREGLDLPPTDDPMLLAYLLDPSNTTPEGVARRYGGEWTEDAAKRALLAERLHANLLGRLQGEERLLWLYEEVEKPLSRVLAHMEATGVKLDVAYLENLSLEVAAHMRRLEEEVFRLAGRSFRLNSRDQLERVLFDELGLPPIGKTEKTGKRSTSAAVLEALREVHPIVDKILQYRELAKLKGTYIDRLPALVHPKTGRLHTRFNQTATATGRLSSSDPNLQNIPVRTPLGQKIRRAFVAEEGWRLVALDYSQIELRVLAHLSGDENLIRVFQEGKDIHTQTASWMFGLSAEAIDPLMRRAAKTINFGVLYGMSAFRLSQELGIPYEEAQAFIQKYFQSYPKVKAWIEKTLEEGRTRGYVETLFGRRRYVPDLNARVKGKREAAERMAFNMPVQGTAADLMKLAMVRLFPQLREVGARMLLQVHDELLLEAPKERAEEVAALAKEVMEGVWPLAVPLEVEVGIGEDWLAAKG

SEQ ID NO: 3727 - DNA, 2523 bp, synthetic construct
  misc_feature 1..2523: note = Variant of DNA polymerase I from Thermus sp. strain 2.9
  source 1..2523: mol_type = other DNA
atgcaccatcatcatcatcatggcggtagcggcgtgttaccggtgttcgagcctaaaggtcgcgtgcttctggttgatggccatcatctcgcgtatcgtaacttctttgccctgaaaggattaaccaccagcagcggcgagccggtacagggtgtctacggctttgcaaagtcgctcctgaaagctctgaaagaagacggtgatgtggtgattgttgtctttgatgcgaaagcgccaagttttcgccacgaagcgtacgaagcttacaaagccgggcgtgctccaacgccggaagactttcctcgccaattggcgcttatgaaggaattagtggatttgcttggcctcgaacgcttggaagttcccggtttcgaggcagacgacgtattagcgactctcgcaaagaaagccgaacgtgagggctatgaagtccagatcttgacagcagatcgcgatcttttccagcttttatctccgcgcatctcggtgttacacccggaagggcatcgtatcaccccggaatggctctgggagaaatatggtttgcgtcccgaacaatgggtggattttcgcgccttagcaggcgatccgagcgacaatattccgggagttaaaggtatcggcgagaagacggcgctcaagctccttaaagaatgggggtcgttggagaacttgcttaagaatttagatcaggtcaaaccagagtcagtgcgtgagaagattcttgctcacctcgaagacctcaaattaagccgcgaattgtcccgtgtacgcaccgatttgccgctcgaagttgatttccaacgccgccgcgaacctgactgggagggtcttaaagcgtttttagagcgtcttgaatttggttcgctcttgcatgaattcggccttttagaaagcccgttaccagccgaagaagcaccttggccaccgcccgagggcgcgtttttaggttaccgtttgagtcgcccggaaccgatgtgggccgaattactggctcttgcagcgtctgcccagggacgtgtgtatcgcgcggaagaccctcatggtgcgctccgcggcctcttcgaagtccgtggactccttgccaaagacttagctgttgttgcattgcgcgaaggtcttgatttacctccgactgatgatccaatgcttcttgcgtacctcttggacccgtcaaacacgacgcccgaaggcgtagcccgtcgttacggcggcgagtggaccgaagatgcagcgaaacgcgcgttattggccgaacgtttgcacgccaatttattaggacgtttgcaaggcgaggaacgtctcctctggctttacgaagaagtggagaaaccattgagtcgcgtgctcgcgcatatggaagctaccggtgtcaaattagacgtggcgtatttggagaatctcagccttgaagttgctgcccacatgcgccgcttggaggaagaagtattccgtttagcaggccgttcctttcgccttaattctcgcgatcagttagaacgtgtgttgttcgatgaacttggtctccctcctatcggcaagacagagaagaccggtaaacgtagcacttcagcggcggttttagaagctcttcgcgaagtccatcccattgtggacaagatcttgcaataccgcgaactcgcgaaattgaaaggcacctatattgaccgtcttccggcattagtccacccgactacgggacgcctccatacccgcttcaaccaaacagccacggcgaccggtcgtttgtcctcctctgatccaaaccttcagaatattccagtacgtaccccattgggccagaagatccgccgtgcgtttgtagctgaggagggttggcgtttagtggccctcgattatagccaaattgaattacgtgtccttgcccatctttctggcgatgagaacctcatccgcgtgtttcaggaaggcaaagacattcacactcaaacggcaagctggatgtttggattatcagctgaagcgatcgatcctttgatgcgtcgtgcagcgaagaccatcaatttcggtgttctctacggtatgagtgcctttcgtttgtcgcaggaattaggcattccctatgaagaagctcaggcgttcattcagaaatactttcaaagctatcccaaagttaaagcatggatcgagaagactctcgaagaaggccgcacacgtggttacgtagagaccttatttggacgtcgccgctatgttcccgatttaaacgctcgcgtgaaaggcaagcgtgaagccgccgaacgcatggcgttcaacatgcctgtacagggcacggcagctgacctcatgaaacttgcaatggtgcgcctttttccacaattgcgtgaagttggtgcccgcatgctcttgcaggtccacgatgaactcttgttagaagcgccaaaagagcgtgcggaagaggtggcagccctcgcgaaagaagttatggaaggcgtgtggcccttagcggtgcctcttgaagtcgaagttggtattggcgaggattggctggctgccaaagga

SEQ ID NO: 3728 - protein, 841 aa, synthetic construct
  REGION 1..841: note = Variant of DNA polymerase I from Thermus sp. strain 2.9
MHHHHHHGGSGVLPVFEPKGRVLLVDGHHLAYRNFFALKGLTTSSGEPVQGVYGFAKSLLKALKEDGDVVIVVFDAKAPSFRHEAYEAYKAGRAPTPEDFPRQLALMKELVDLLGLERLEVPGFEADDVLATLAKKAEREGYEVQILTADRDLFQLLSPRISVLHPEGHRITPEWLWEKYGLRPEQWVDFRALAGDPSDNIPGVKGIGEKTALKLLKEWGSLENLLKNLDQVKPESVREKILAHLEDLKLSRELSRVRTDLPLEVDFQRRREPDWEGLKAFLERLEFGSLLHEFGLLESPLPAEEAPWPPPEGAFLGYRLSRPEPMWAELLALAASAQGRVYRAEDPHGALRGLFEVRGLLAKDLAVVALREGLDLPPTDDPMLLAYLLDPSNTTPEGVARRYGGEWTEDAAKRALLAERLHANLLGRLQGEERLLWLYEEVEKPLSRVLAHMEATGVKLDVAYLENLSLEVAAHMRRLEEEVFRLAGRSFRLNSRDQLERVLFDELGLPPIGKTEKTGKRSTSAAVLEALREVHPIVDKILQYRELAKLKGTYIDRLPALVHPTTGRLHTRFNQTATATGRLSSSDPNLQNIPVRTPLGQKIRRAFVAEEGWRLVALDYSQIELRVLAHLSGDENLIRVFQEGKDIHTQTASWMFGLSAEAIDPLMRRAAKTINFGVLYGMSAFRLSQELGIPYEEAQAFIQKYFQSYPKVKAWIEKTLEEGRTRGYVETLFGRRRYVPDLNARVKGKREAAERMAFNMPVQGTAADLMKLAMVRLFPQLREVGARMLLQVHDELLLEAPKERAEEVAALAKEVMEGVWPLAVPLEVEVGIGEDWLAAKG

SEQ ID NO: 3729 - DNA, 2523 bp, synthetic construct
  misc_feature 1..2523: note = Variant of DNA polymerase I from Thermus sp. strain 2.9
  source 1..2523: mol_type = other DNA
atgcaccatcatcatcatcatggcggtagcggcgtgttaccggtgttcgagcctaaaggtcgcgtgcttctggttgatggccatcatctcgcgtatcgtaacttctttgccctgaaaggattaaccaccagcagcggcgagccggtacagggtgtctacggctttgcaaagtcgctcctgaaagctctgaaagaagacggtgatgtggtgattgttgtctttgatgcgaaagcgccaagttttcgccacgaagcgtacgaagcttacaaagccgggcgtgctccaacgccggaagactttcctcgccaattggcgcttatgaaggaattagtggatttgcttggcctcgaacgcttggaagttcccggtttcgaggcagacgacgtattagcgactctcgcaaagaaagccgaacgtgagggctatgaagtccagatcttgacagcagatcgcgatcttttccagcttttatctccgcgcatctcggtgttacacccggaagggcatcgtatcaccccggaatggctctgggagaaatatggtttgcgtcccgaacaatgggtggattttcgcgccttagcaggcgatccgagcgacaatattccgggagttaaaggtatcggcgagaagacggcgctcaagctccttaaagaatgggggtcgttggagaacttgcttaagaatttagatcaggtcaaaccagagtcagtgcgtgagaagattcttgctcacctcgaagacctcaaattaagccgcgaattgtcccgtgtacgcaccgatttgccgctcgaagttgatttccaacgccgccgcgaacctgactgggagggtcttaaagcgtttttagagcgtcttgaatttggttcgctcttgcatgaattcggccttttagaaagcccgttaccagccgaagaagcaccttggccaccgcccgagggcgcgtttttaggttaccgtttgagtcgcccggaaccgatgtgggccgaattactggctcttgcagcgtctgcccagggacgtgtgtatcgcgcggaagaccctcatggtgcgctccgcggcctcttcgaagtccgtggactccttgccaaagacttagctgttgttgcattgcgcgaaggtcttgatttacctccgactgatgatccaatgcttcttgcgtacctcttggacccgtcaaacacgacgcccgaaggcgtagcccgtcgttacggcggcgagtggaccgaagatgcagcgaaacgcgcgttattggccgaacgtttgcacgccaatttattaggacgtttgcaaggcgaggaacgtctctattggctttacgaagaagtggagaaaccattgagtcgcgtgctcgcgcatatggaagctaccggtgtcaaattagacgtggcgtatttggagaatctcagccttgaagttgctgcccacatgcgccgcttggaggaagaagtattccgtttagcaggccgttcctttcgccttaattctcgcgatcagttagaacgtgtgttgttcgatgaacttggtctccctcctatcggcaagacagagaagaccggtaaacgtagcacttcagcggcggttttagaagctcttcgcgaagtccatcccattgtggacaagatcttgcaataccgcgaactcgcgaaattgaaaggcacctatattgaccgtcttccggcattagtccacccgaaaacgggacgcctccatacccgcttcaaccaaacagccacggcgaccggtcgtttgtcctcctctgatccaaaccttcagaatattccagtacgtaccccattgggccagaagatccgccgtgcgtttgtagctgaggagggttggcgtttagtggccctcgattatagccaaattgaattacgtgtccttgcccatctttctggcgatgagaacctcatccgcgtgtttcaggaaggcaaagacattcacactcaaacggcaagctggatgtttggattatcagctgaagcgatcgatcctttgatgcgtcgtgcagcgaagaccatcaatttcggtgttctctacggtatgagtgcctttcgtttgtcgcaggaattaggcattccctatgaagaagctcaggcgttcattcagaaatactttcaaagctatcccaaagttaaagcatggatcgagaagactctcgaagaaggccgcacacgtggttacgtagagaccttatttggacgtcgccgctatgttcccgatttaaacgctcgcgtgaaaggcaagcgtgaagccgccgaacgcatggcgttcaacatgcctgtacagggcacggcagctgacctcatgaaacttgcaatggtgcgcctttttccacaattgcgtgaagttggtgcccgcatgctcttgcaggtccacgatgaactcttgttagaagcgccaaaagagcgtgcggaagaggtggcagccctcgcgaaagaagttatggaaggcgtgtggcccttagcggtgcctcttgaagtcgaagttggtattggcgaggattggctggctgccaaagga

SEQ ID NO: 3730 - protein, 841 aa, synthetic construct
  REGION 1..841: note = Variant of DNA polymerase I from Thermus sp. strain 2.9
MHHHHHHGGSGVLPVFEPKGRVLLVDGHHLAYRNFFALKGLTTSSGEPVQGVYGFAKSLLKALKEDGDVVIVVFDAKAPSFRHEAYEAYKAGRAPTPEDFPRQLALMKELVDLLGLERLEVPGFEADDVLATLAKKAEREGYEVQILTADRDLFQLLSPRISVLHPEGHRITPEWLWEKYGLRPEQWVDFRALAGDPSDNIPGVKGIGEKTALKLLKEWGSLENLLKNLDQVKPESVREKILAHLEDLKLSRELSRVRTDLPLEVDFQRRREPDWEGLKAFLERLEFGSLLHEFGLLESPLPAEEAPWPPPEGAFLGYRLSRPEPMWAELLALAASAQGRVYRAEDPHGALRGLFEVRGLLAKDLAVVALREGLDLPPTDDPMLLAYLLDPSNTTPEGVARRYGGEWTEDAAKRALLAERLHANLLGRLQGEERLYWLYEEVEKPLSRVLAHMEATGVKLDVAYLENLSLEVAAHMRRLEEEVFRLAGRSFRLNSRDQLERVLFDELGLPPIGKTEKTGKRSTSAAVLEALREVHPIVDKILQYRELAKLKGTYIDRLPALVHPKTGRLHTRFNQTATATGRLSSSDPNLQNIPVRTPLGQKIRRAFVAEEGWRLVALDYSQIELRVLAHLSGDENLIRVFQEGKDIHTQTASWMFGLSAEAIDPLMRRAAKTINFGVLYGMSAFRLSQELGIPYEEAQAFIQKYFQSYPKVKAWIEKTLEEGRTRGYVETLFGRRRYVPDLNARVKGKREAAERMAFNMPVQGTAADLMKLAMVRLFPQLREVGARMLLQVHDELLLEAPKERAEEVAALAKEVMEGVWPLAVPLEVEVGIGEDWLAAKG

SEQ ID NO: 3731 - DNA, 2523 bp, synthetic construct; identical to SEQ ID NO: 3547
  misc_feature 1..2523: note = Variant of DNA polymerase I from Thermus sp. strain 2.9
  source 1..2523: mol_type = other DNA

SEQ ID NO: 3732 - protein, 841 aa, synthetic construct; identical to SEQ ID NO: 3548
  REGION 1..841: note = Variant of DNA polymerase I from Thermus sp. strain 2.9

SEQ ID NO: 3733 - DNA, 2523 bp, synthetic construct
  misc_feature 1..2523: note = Variant of DNA polymerase I from Thermus sp. strain 2.9
  source 1..2523: mol_type = other DNA
atgcaccatcatcatcatcatggcggtcagggcgtgttaccggtgttcgagcctaaaggtcgcgtgcttctggttgatggccatcatctcgcgtatcgtaacttctttgccctgaaaggattaaccaccagcagcggcgagccggtacagggtgtctacggctttgcaaagtcgctcctgaaagctctgaaagaagacggtgatgtggtgattgttgtctttgatgcgaaagcgccaagttttcgccacgaagcgtacgaagcttacaaagccgggcgtgctccaacgccggaagactttcctcgccaattggcgcttatgaaggaattagtggatttgcttggcctcgaacgcttggaagttcccggtttcgaggcagacgacgtattagcgactctcgcaaagaaagccgaacgtgagggctatgaagtccagatcttgacagcagatcgcgatcttttccagcttttatctccgcgcatctcggtgttacacccggaagggcatcgtatcaccccggaatggctctgggagaaatatggtttgcgtcccgaacaatgggtggattttcgcgccttagcaggcgatccgagcgacaatattccgggagttaaaggtatcggcgagaagacggcgctcaagctccttaaagaatgggggtcgttggagaacttgcttaagaatttagatcaggtcaaaccagagtcagtgcgtgagaagattcttgctcacctcgaagacctcaaattaagccgcgaattgtcccgtgtacgcaccgatttgccgctcgaagttgatttccaacgccgccgcgaacctgactgggagggtcttaaagcgtttttagagcgtcttgaatttggttcgctcttgcatgaattcggccttttagaaagcccgttaccagccgaagaagcaccttggccaccgcccgagggcgcgtttttaggttaccgtttgagtcgcccggaaccgatgtgggccgaattactggctcttgcagcgtctgcccagggacgtgtgtatcgcgcggaagaccctcatggtgcgctccgcggcctcttcgaagtccgtggactccttgccaaagacttagctgttgttgcattgcgcgaaggtcttgatttacctccgactgatgatccaatgcttcttgcgtacctcttggacccgtcaaacacgacgcccgaaggcgtagcccgtcgttacggcggcgagtggaccgaagatgcagcgaaacgcgcgttattggccgaacgtttgcacgccaatttattaggacgtttgcaaggcgaggaacgtctcctctggctttacgaagaagtggagaaaccattgagtcgcgtgctcgcgcatatggaagctaccggtgtcaaattagacgtggcgtatttggagaatctcagccttgaagttgctgcccacatgcgccgcttggaggaagaagtattccgtttagcaggccgttcctttcgccttaattctcgcgatcagttagaacgtgtgttgttcgatgaacttggtctccctcctatcggcaagacagagaagaccggtaaacgtagcacttcagcggcggttttagaagctcttcgcgaagtccatcccattgtggacaagatcttgcaataccgcgaactcgcgaaattgaaaggcacctatattgaccgtcttccggcattagtccacccgaaaacgggacgcctccatacccgcttcaaccaaacagccacggcgaccggtcgtttgtcctcctctgatccaaaccttcagaatattccagtacgtaccccattgggccagaagatccgccgtgcgtttgtagctgaggagggttggcgtttagtggccctcgattatagccaaattgaattacgtgtccttgcccatctttctggcgatgagaacctcatccgcgtgtttcaggaaggcaaagacattcacactcaaacggcaagctggatgtttggattatcagctgaagcgatcgatcctttgatgcgtcgtgcagcgaagaccatcaatttcggtgttctctacggtatgagtgcctttcgtttgtcgcaggaattaggcattccctatgaagaagctcaggcgttcattcagaaatactttcaaagctatcccaaagttaaagcatggatcgagaagactctcgaagaaggccgcacacgtggttacgtagagaccttatttggacgtcgccgctatgttcccgatttaaacgctcgcgtgaaaggcaagcgtgaagccgccgaacgcatggcgttcaacatgcctgtacagggcacggcagctgacctcatgaaacttgcaatggtgcgcctttttccacaattgcgtgaagttggtgcccgcatgctcttgcaggtccacgatgaactcttgttagaagcgccaaaagagcgtgcggaagaggtggcagccctcgcgaaagaagttatggaaggcgtgtggcccttagcggtgcctcttgaagtcgaagttggtattggcgaggattggctggctgccaaagga

SEQ ID NO: 3734 - protein, 841 aa, synthetic construct
  REGION 1..841: note = Variant of DNA polymerase I from Thermus sp. strain 2.9
MHHHHHHGGQGVLPVFEPKGRVLLVDGHHLAYRNFFALKGLTTSSGEPVQGVYGFAKSLLKALKEDGDVVIVVFDAKAPSFRHEAYEAYKAGRAPTPEDFPRQLALMKELVDLLGLERLEVPGFEADDVLATLAKKAEREGYEVQILTADRDLFQLLSPRISVLHPEGHRITPEWLWEKYGLRPEQWVDFRALAGDPSDNIPGVKGIGEKTALKLLKEWGSLENLLKNLDQVKPESVREKILAHLEDLKLSRELSRVRTDLPLEVDFQRRREPDWEGLKAFLERLEFGSLLHEFGLLESPLPAEEAPWPPPEGAFLGYRLSRPEPMWAELLALAASAQGRVYRAEDPHGALRGLFEVRGLLAKDLAVVALREGLDLPPTDDPMLLAYLLDPSNTTPEGVARRYGGEWTEDAAKRALLAERLHANLLGRLQGEERLLWLYEEVEKPLSRVLAHMEATGVKLDVAYLENLSLEVAAHMRRLEEEVFRLAGRSFRLNSRDQLERVLFDELGLPPIGKTEKTGKRSTSAAVLEALREVHPIVDKILQYRELAKLKGTYIDRLPALVHPKTGRLHTRFNQTATATGRLSSSDPNLQNIPVRTPLGQKIRRAFVAEEGWRLVALDYSQIELRVLAHLSGDENLIRVFQEGKDIHTQTASWMFGLSAEAIDPLMRRAAKTINFGVLYGMSAFRLSQELGIPYEEAQAFIQKYFQSYPKVKAWIEKTLEEGRTRGYVETLFGRRRYVPDLNARVKGKREAAERMAFNMPVQGTAADLMKLAMVRLFPQLREVGARMLLQVHDELLLEAPKERAEEVAALAKEVMEGVWPLAVPLEVEVGIGEDWLAAKG

SEQ ID NO: 3735 - DNA, 2523 bp, synthetic construct
  misc_feature 1..2523: note = Variant of DNA polymerase I from Thermus sp. strain 2.9
  source 1..2523: mol_type = other DNA
atgcaccatcatcatcatcatggcggtagcggcgtgttaccggtgttcgagcctaaaggtcgcgtgcttctggttgatggccatcatctcgcgtatcgtaacttctttgccctgaaaggattaaccaccagcagcggcgagccggtacagggtgtctacggctttgcaaagtcgctcctgaaagctctgaaagaagacggtgatgtggtgattgttgtctttgatgcgaaagcgccaagttttcgccacgaagcgtacgaagcttacaaagccgggcgtgctccaacgccggaagactttcctcgccaattggcgcttatgaaggaattagtggatttgcttggcctcgaacgcttggaagttcccggtttcgaggcagacgacgtattagcgactctcgcaaagaaagccgaacgtgagggctatgaagtccagatcttgacagcagatcgcgatcttttccagcttttatctccgcgcatctcggtgttacacccggaagggcatcgtatcaccccggaatggctctgggagaaatatggtttgcgtcccgaacaatgggtggattttcgcgccttagcaggcgatccgagcgacaatattccgggagttaaaggtatcggcgagaagacggcgctcaagctccttaaagaatgggggtcgttggagaacttgcttaagaatttagatcaggtcaaaccagagtcagtgcgtgagaagattcttgctcacctcgaagacctcaaattaagccgcgaattgtcccgtgtacgcaccgatttgccgctcgaagttgatttccaacgccgccgcgaacctgactgggagggtcttaaagcgtttttagagcgtcttgaatttggttcgctcttgcatgaattcggccttttagaaagcccgttaccagccgaagaagcaccttggccaccgcccgagggcgcgtttttaggttaccgtttgagtcgcccggaaccgatgtgggccgaattactggctcttgcagcgtctgcccagggacgtgtgtatcgcgcggaagaccctcatggtgcgctccgcggcctcttcgaagtccgtggactccttgccaaagacttagctgttgttgcattgcgcgaaggtcttgatttacctccgactgatgatccaatgcttcttgcgtacctcttggacccgtcaaacacgacgcccgaaggcgtagcccgtcgttacggcggcgagtggaccgaagatgcagcgaaacgcgcgttattggccgaacgtttgcacgccaatttattaggacgtttgcaaggcgaggaacgtctcctctggctttacgaagaagtggagaaaccattgagtcgcgtgctcgcgcatatggaagctaccggtgtcaaattagacgtggcgtatttggagaatctcagccttgaagttgctgcccacatgcgccgcttggaggaagaagtagtccgtttagcaggccgttcctttcgccttaattctcgcgatcagttagaacgtgtgctgttcgatgaacttggtctccctcctatcggcaagacagagaagaccggtaaacgtagcacttcagcggcggttttagaagctcttcgcgaagtccatcccattgtggacaagatcttgcaataccgcgaactcgcgaaattgaaaggcacctatattgaccgtcttccggcattagtccacccgaaaacgggacgcctccatacccgcttcaaccaaacagccacggcgaccggtcgtttgtcctcctctgatccaaaccttcagaatattccagtacgtaccccattgggccagaagatccgccgtgcgtttgtagctgaggagggttggcgtttagtggccctcgattatagccaaattgaattacgtgtccttgcccatctttctggcgatgagaacctcatccgcgtgtttcaggaaggcaaagacattcacactcaaacggcaagctggatgtttggattatcagctgaagcgatcgatcctttgatgcgtcgtgcagcgaagaccatcaatttcggtgttctctacggtatgagtgcctttcgtttgtcgcaggaattaggcattccctatgaagaagctcaggcgttcattcagaaatactttcaaagctatcccaaagttaaagcatggatcgagaagactctcgaagaaggccgcacacgtggttacgtagagaccttatttggacgtcgccgctatgttcccgatttaaacgctcgcgtgaaaggcaagcgtgaagccgccgaacgcatggcgttcaacatgcctgtacagggcacggcagctgacctcatgaaacttgcaatggtgcgcctttttccacaattgcgtgaagttggtgcccgcatgctcttgcaggtccacgatgaactcttgttagaagcgccaaaagagcgtgcggaagaggtggcagccctcgcgaaagaagttatggaaggcgtgtggcccttagcggtgcctcttgaagtcgaagttggtattggcgaggattggctggctgccaaagga

SEQ ID NO: 3736 - protein, 841 aa, synthetic construct
  REGION 1..841: note = Variant of DNA polymerase I from Thermus sp. strain 2.9
MHHHHHHGGSGVLPVFEPKGRVLLVDGHHLAYRNFFALKGLTTSSGEPVQGVYGFAKSLLKALKEDGDVVIVVFDAKAPSFRHEAYEAYKAGRAPTPEDFPRQLALMKELVDLLGLERLEVPGFEADDVLATLAKKAEREGYEVQILTADRDLFQLLSPRISVLHPEGHRITPEWLWEKYGLRPEQWVDFRALAGDPSDNIPGVKGIGEKTALKLLKEWGSLENLLKNLDQVKPESVREKILAHLEDLKLSRELSRVRTDLPLEVDFQRRREPDWEGLKAFLERLEFGSLLHEFGLLESPLPAEEAPWPPPEGAFLGYRLSRPEPMWAELLALAASAQGRVYRAEDPHGALRGLFEVRGLLAKDLAVVALREGLDLPPTDDPMLLAYLLDPSNTTPEGVARRYGGEWTEDAAKRALLAERLHANLLGRLQGEERLLWLYEEVEKPLSRVLAHMEATGVKLDVAYLENLSLEVAAHMRRLEEEVVRLAGRSFRLNSRDQLERVLFDELGLPPIGKTEKTGKRSTSAAVLEALREVHPIVDKILQYRELAKLKGTYIDRLPALVHPKTGRLHTRFNQTATATGRLSSSDPNLQNIPVRTPLGQKIRRAFVAEEGWRLVALDYSQIELRVLAHLSGDENLIRVFQEGKDIHTQTASWMFGLSAEAIDPLMRRAAKTINFGVLYGMSAFRLSQELGIPYEEAQAFIQKYFQSYPKVKAWIEKTLEEGRTRGYVETLFGRRRYVPDLNARVKGKREAAERMAFNMPVQGTAADLMKLAMVRLFPQLREVGARMLLQVHDELLLEAPKERAEEVAALAKEVMEGVWPLAVPLEVEVGIGEDWLAAKG

SEQ ID NO: 3737 - DNA, 2523 bp, synthetic construct
  misc_feature 1..2523: note = Variant of DNA polymerase I from Thermus sp. strain 2.9
  source 1..2523: mol_type = other DNA
atgcaccatcatcatcatcatggcggtagcggcgtgttaccggtgttcgagcctaaaggtcgcgtgcttctggttgatggccatcatctcgcgtatcgtaacttctttgccctgaaaggattaaccaccagcagcggcgagccggtacagggtgtctacggctttgcaaagtcgctcctgaaagctctgaaagaagacggtgatgtggtgattgttgtctttgatgcgaaagcgccaagttttcgccacgaagcgtacgaagcttacaaagccgggcgtgctccaacgccggaagactttcctcgccaattggcgcttatgaaggaattagtggatttgcttggcctcgaacgcttggaagttcccggtttcgaggcagacgacgtattagcgactctcgcaaagaaagccgaacgtgagggctatgaagtccagatcttgacagcagatcgcgatcttttccagcttttatctccgcgcatctcggtgttacacccggaagggcatcgtatcaccccggaatggctctgggagaaatatggtttgcgtcccgaacaatgggtggattttcgcgccttagcaggcgatccgagcgacaatattccgggagttaaaggtatcggcgagaagacggcgctcaagctccttaaagaatgggggtcgttggagaacttgcttaagaatttagatcaggtcaaaccagagtcagtgcgtgagaagattcttgctcacctcgaagacctcaaattaagccgcgaattgtcccgtgtacgcaccgatttgccgctcgaagttgatttccaacgccgccgcgaacctgactgggagggtcttaaagcgtttttagagcgtcttgaatttggttcgctcttgcatgaattcggccttttagaaagcccgttaccagccgaagaagcaccttggccaccgcccgagggcgcgtttttaggttaccgtttgagtcgcccggaaccgatgtgggccgaattactggctcttgcagcgtctgcccagggacgtgtgtatcgcgcggaagaccctcatggtgcgctccgcggcctcttccaggtccgtggactccttgccaaagacttagctgttgttgcattgcgcgaaggtcttgatttacctccgactgatgatccaatgcttcttgcgtacctcttggacccgtcaaacacgacgcccgaaggcgtagcccgtcgttacggcggcgagtggaccgaagatgcagcgaaacgcgcgttattggccgaacgtttgcacgccaatttattaggacgtttgcaaggcgaggaacgtctcctctggctttacgaagaagtggagaaaccattgagtcgcgtgctcgcgcatatggaagctaccggtgtcaaattagacgtggcgtatttggagaatctcagccttgaagttgctgcccacatgcgccgcttggaggaagaagtattccgtttagcaggccgttcctttcgccttaattctcgcgatcagttagaacgtgtgttgttcgatgaacttggtctccctcctatcggcaagacagagaagaccggtaaacgtagcacttcagcggcggttttagaagctcttcgcgaagtccatcccattgtggacaagatcttgcaataccgcgaactcgcgaaattgaaaggcacctatattgaccgtcttccggcattagtccacccgaaaacgggacgcctccatacccgcttcaaccaaacagccacggcgaccggtcgtttgtcctcctctgatccaaaccttcagaatattccagtacgtaccccattgggccagaagatccgccgtgcgtttgtagctgaggagggttggcgtttagtggccctcgattatagccaaattgaattacgtgtccttgcccatctttctggcgatgagaacctcatccgcgtgtttcaggaaggcaaagacattcacactcaaacggcaagctggatgtttggattatcagctgaagcgatcgatcctttgatgcgtcgtgcagcgaagaccatcaatttcggtgttctctacggtatgagtgcctttcgtttgtcgcaggaattaggcattccctatgaagaagctcaggcgttcattcagaaatactttcaaagctatcccaaagttaaagcatggatcgagaagactctcgaagaaggccgcacacgtggttacgtagagaccttatttggacgtcgccgctatgttcccgatttaaacgctcgcgtgaaaggcaagcgtgaagccgccgaacgcatggcgttcaacatgcctgtacagggcacggcagctgacctcatgaaacttgcaatggtgcgcctttttccacaattgcgtgaagttggtgcccgcatgctcttgcaggtccacgatgaactcttgttagaagcgccaaaagagcgtgcggaagaggtggcagccctcgcgaaagaagttatggaaggcgtgtggcccttagcggtgcctcttgaagtcgaagttggtattggcgaggattggctggctgccaaagga

SEQ ID NO: 3738 - protein, 841 aa, synthetic construct
  REGION 1..841: note = Variant of DNA polymerase I from Thermus sp. strain 2.9
MHHHHHHGGSGVLPVFEPKGRVLLVDGHHLAYRNFFALKGLTTSSGEPVQGVYGFAKSLLKALKEDGDVVIVVFDAKAPSFRHEAYEAYKAGRAPTPEDFPRQLALMKELVDLLGLERLEVPGFEADDVLATLAKKAEREGYEVQILTADRDLFQLLSPRISVLHPEGHRITPEWLWEKYGLRPEQWVDFRALAGDPSDNIPGVKGIGEKTALKLLKEWGSLENLLKNLDQVKPESVREKILAHLEDLKLSRELSRVRTDLPLEVDFQRRREPDWEGLKAFLERLEFGSLLHEFGLLESPLPAEEAPWPPPEGAFLGYRLSRPEPMWAELLALAASAQGRVYRAEDPHGALRGLFQVRGLLAKDLAVVALREGLDLPPTDDPMLLAYLLDPSNTTPEGVARRYGGEWTEDAAKRALLAERLHANLLGRLQGEERLLWLYEEVEKPLSRVLAHMEATGVKLDVAYLENLSLEVAAHMRRLEEEVFRLAGRSFRLNSRDQLERVLFDELGLPPIGKTEKTGKRSTSAAVLEALREVHPIVDKILQYRELAKLKGTYIDRLPALVHPKTGRLHTRFNQTATATGRLSSSDPNLQNIPVRTPLGQKIRRAFVAEEGWRLVALDYSQIELRVLAHLSGDENLIRVFQEGKDIHTQTASWMFGLSAEAIDPLMRRAAKTINFGVLYGMSAFRLSQELGIPYEEAQAFIQKYFQSYPKVKAWIEKTLEEGRTRGYVETLFGRRRYVPDLNARVKGKREAAERMAFNMPVQGTAADLMKLAMVRLFPQLREVGARMLLQVHDELLLEAPKERAEEVAALAKEVMEGVWPLAVPLEVEVGIGEDWLAAKG

SEQ ID NO: 3739 - DNA, 2523 bp, synthetic construct
  misc_feature 1..2523: note = Variant of DNA polymerase I from Thermus sp. strain 2.9
  source 1..2523: mol_type = other DNA
atgcaccatcatcatcatcatggcggtagcggcgtgttagaggtgttcgagcctaaaggtcgcgtgcttctggttgatggccatcatctcgcgtatcgtaacttctttgccctgaaaggattaaccaccagcagcggcgagccggtacagggtgtctacggctttgcaaagtcgctcctgaaagctctgaaagaagacggtgatgtggtgattgttgtctttgatgcgaaagcgccaagttttcgccacgaagcgtacgaagcttacaaagccgggcgtgctcctacgccggaagactttcctcgccaattggcgcttatgaaggaattagtggatttgcttggcctcgaacgcttggaagttcccggtttcgaggcagacgacgtattagcgactctcgcaaagaaagccgaacgtgagggctatgaagtccagatcttgacagcagatcgcgatcttttccagcttttatctccgcgcatctcggtgttacacccggaagggcatcgtatcaccccggaatggctctgggagaaatatggtttgcgtcccgaacaatgggtggattttcgcgccttagcaggcgatccgagcgacaatattccgggagttaaaggtatcggcgagaagacggcgctcaagctccttaaagaatgggggtcgttggagaacttgcttaagaatttagatcaggtcaaaccagagtcagtgcgtgagaagattcttgctcacctcgaagacctcaagttaagccgcgaattgtcccgtgtacgcaccgatttgccgctcgaagttgatttccaacgccgccgcgaacctgactgggagggtcttaaagcgtttttagagcgtcttgaatttggttcgctcttgcatgaattcggccttttagaaagcccgttaccagccgaagaagcaccttggccaccgcccgagggcgcgtttttaggttaccgtttgagtcgcccggaaccgatgtgggccgaattactggctcttgcagcgtctgcccagggacgtgtgtatcgcgcggaagaccctcatggtgcgctccgcggcctcttcgaagtccgtggactccttgccaaagacttagctgttgttgcattgcgcgaaggtcttgatttacctccgactgatgatccaatgcttcttgcgtacctcttggacccgtcaaacacgacgcccgaaggcgtagcccgtcgttacggcggcgagtggaccgaagatgcagcgaaacgcgcgttattggccgaacgtttgcacgccaatttattaggacgtttgcaaggcgaggaacgtctcctctggctttacgaagaagtggagaaaccattgagtcgcgtgctcgcgcatatggaagctaccggtgtcaaattagacgtggcgtatttggagaatctcagccttgaagttgctgcccacatgcgccgcttggaggaagaagtattccgtttagcaggccgttcctttcgccttaattctcgcgatcagttagaacgtgtgttgttcgatgaacttggtctccctcctatcggcaagacagagaagaccggtaaacgtagcacttcagcggcggttttagaagctcttcgcgaagtccatcccattgtggacaagatcttgcaataccgcgaactcgcgaaattgaaaggcacctatattgaccgtcttccggcattagtccacccgaaaacgggacgcctccatacccgcttcaaccaaacagccacggcgaccggtcgtttgtcctcctctgatccaaaccttcagaatattccagtacgtaccaaattgggccagaagatccgccgtgcgtttgtagctgaggagggttggcgtttagtggccctcgattatagccaaattgaattacgtgtccttgcccatctttctggcgatgagaacctcatccgcgtgtttcaggaaggcaaagacattcacactcaaacggcaagctggatgtttggattatcagctgaagcgatcgatcctttgatgcgtcgtgcagcgaagaccatcaatttcggtgttctctacggtatgagtgcctttcgtttgtcgcaggaattaggcattcccaaagaagaagctcaggcgttcattcagaaatactttcaaagctatcccaaagttaaagcatggatcgagaagactctcgaagaaggccgcacacgtggttacgtagagaccttatttggacgtcgccgctatgttcccgatttaaacgctcgcgtgaaaggcaagcgtgaagccgccgaacgcatggcgttcaacatgcctgtacagggcacggcagctgacctcatgaaacttgcaatggtgcgcctttttccacaattgcgtgaagttggtgcccgcatgctcttgcaggtccacgatgaactcttgttagaagcgccaaaagagcgtgcggaagaggtggcagccctcgcgaaagaagttatggaaggcgtgtggcccttagcggtgcctcttgaagtcgaagttggtattggcgaggattggctggctgccaaagga

SEQ ID NO: 3740 - protein, 841 aa, synthetic construct
  REGION 1..841: note = Variant of DNA polymerase I from Thermus sp. strain 2.9
MHHHHHHGGSGVLEVFEPKGRVLLVDGHHLAYRNFFALKGLTTSSGEPVQGVYGFAKSLLKALKEDGDVVIVVFDAKAPSFRHEAYEAYKAGRAPTPEDFPRQLALMKELVDLLGLERLEVPGFEADDVLATLAKKAEREGYEVQILTADRDLFQLLSPRISVLHPEGHRITPEWLWEKYGLRPEQWVDFRALAGDPSDNIPGVKGIGEKTALKLLKEWGSLENLLKNLDQVKPESVREKILAHLEDLKLSRELSRVRTDLPLEVDFQRRREPDWEGLKAFLERLEFGSLLHEFGLLESPLPAEEAPWPPPEGAFLGYRLSRPEPMWAELLALAASAQGRVYRAEDPHGALRGLFEVRGLLAKDLAVVALREGLDLPPTDDPMLLAYLLDPSNTTPEGVARRYGGEWTEDAAKRALLAERLHANLLGRLQGEERLLWLYEEVEKPLSRVLAHMEATGVKLDVAYLENLSLEVAAHMRRLEEEVFRLAGRSFRLNSRDQLERVLFDELGLPPIGKTEKTGKRSTSAAVLEALREVHPIVDKILQYRELAKLKGTYIDRLPALVHPKTGRLHTRFNQTATATGRLSSSDPNLQNIPVRTKLGQKIRRAFVAEEGWRLVALDYSQIELRVLAHLSGDENLIRVFQEGKDIHTQTASWMFGLSAEAIDPLMRRAAKTINFGVLYGMSAFRLSQELGIPKEEAQAFIQKYFQSYPKVKAWIEKTLEEGRTRGYVETLFGRRRYVPDLNARVKGKREAAERMAFNMPVQGTAADLMKLAMVRLFPQLREVGARMLLQVHDELLLEAPKERAEEVAALAKEVMEGVWPLAVPLEVEVGIGEDWLAAKG

SEQ ID NO: 3741 - DNA, 2523 bp, synthetic construct
  misc_feature 1..2523: note = Variant of DNA polymerase I from Thermus sp. strain 2.9
  source 1..2523: mol_type = other DNA
atgcaccatcatcatcatcatggcggtagcggcgtgttaccggtgttcgagcctaaaggtcgcgtgcttctggttgatggccatcatctcgcgtatcgtaacttctttgccctgaaaggattaaccaccagcagcggcgagccggtacagggtgtctacggctttgcaaagtcgctcctgaaagctctgaaagaagacggtgatgtggtgattgttgtctttgatgcgaaagcgccaagttttcgccacgaagcgtacgaagcttacaaagccgggcgtgctccaacgccggaagactttcctcgccaattggcgcttatgaaggaattagtggatttgcttggcctcgaacgcttggaagttcccggtttcgaggcagacgacgtattagcgactctcgcaaagaaagccgaacgtgagggctatgaagtccagatcttgacagcagatcgcgatcttttccagcttttatctccgcgcatctcggtgttacacccggaagggcatcgtatcaccccggaatggctctgggagaaatatggtttgcgtcccgaacaatgggtggattttcgcgccttagcaggcgatccgagcgacaatattccgggagttaaaggtatcggcgagaagacggcgctcaagctccttaaagaatgggggtcgttggagaacttgcttaagaatttagatcaggtcaaaccagagtcagtgcgtgagaagattcttgctcacctcgaagacctcaaattaagccgcgaattgtcccgtgtacgcaccgatttgccgctcgaagttgatttccaacgccgccgcgaacctgactgggagggtcttaaagcgtttttagagcgtcttgaatttggttcgctcttgcatgaattcggccttttagaaagcccgttaccagccgaagaagcaccttggccaccgcccgagggcgcgtttttaggttaccgtttgagtcgcccggaaccgatgtgggccgaattactggctcttgcagcgtctgcccagggacgtgtgtatcgcgcggaagaccctcatggtgcgctccgcggcctcttcgaagtccgtggactccttgccaaagacttagctgttgttgcattgcgcgaaggtcttgatttacctccgactgatgatccaatgcttcttgcgtacctcttggacccgtcaaacacgacgcccgaaggcgtagcccgtcgttacggcggcgagtggaccgaagatgcagcgaaacgcgcgttattggccgaacgtttgcacgccaatttattaggacgtttgcaaggcgaggaacgtctcctctggctttacgaagaagtggagaaaccattgagtcgcgtgctcgcgcatatggaagctaccggtgtcaaattagacgtggcgtatttggagaatctcagccttgaagttgctgcccacatgcgccgcttggaggaagaagtattccgtttagcaggccgttcctttcgccttaattctcgcgatcagttagaacgtgtgttgttcgatgaacttggtctccctcctatcggcaagacagagaagaccggtaaacgtagcacttcagcggcggttttagaagctcttcgcgaagtccatcccattgtggacaagatcttgcaataccgcgaactcgcgaaattgaaaggcacctatattgaccgtcttccggcattagtccacccgaaaacgggacgcctccatacccgcttcaaccaaacagccacggcgaccggtcgtttgtcctcctctgatccaaaccttcagaatattccagtacgtaccccattgggccagaagatccgccgtgcgtttgtagctgaggagggttggcgtttagtggccctcgattatagccaaattgaattacgtgtccttgcccatctttctggcgatgagaacctcatccgcgtgtttcaggaaggcaaagacattcacactcaaacggcaagctggatgtttggattaaatgctgaagcgatcgatcctttgatgcgtcgtgcagcgaagaccatcaatttcggtgttctctacggtatgagtgcctttcgtttgtcgcaggaattaggcattccctatgaagaagctcaggcgttcattcagaaatactttcaaagctatcccaaagttaaagcatggatcgagaagactctcgaagaaggccgcacacgtggttacgtagagaccttatttggacgtcgccgctatgttcccgatttaaacgctcgcgtgaaaggcaagcgtgaagccgccgaacgcatggcgttcaacatgcctgtacagggcacggcagctgacctcatgaaacttgcaatggtgcgcctttttccacaattgcgtgaagttggtgcccgcatgctcttgcaggtccacgatgaactcttgttagaagcgccaaaagagcgtgcggaagaggtggcagccctcgcgaaagaagttatggaaggcgtgtggcccttagcggtgcctcttgaagtcgaagttggtattggcgaggattggctggctgccaaagga

SEQ ID NO: 3742 - protein, 841 aa, synthetic construct
  REGION 1..841: note = Variant of DNA polymerase I from Thermus sp. strain 2.9
MHHHHHHGGSGVLPVFEPKGRVLLVDGHHLAYRNFFALKGLTTSSGEPVQGVYGFAKSLLKALKEDGDVVIVVFDAKAPSFRHEAYEAYKAGRAPTPEDFPRQLALMKELVDLLGLERLEVPGFEADDVLATLAKKAEREGYEVQILTADRDLFQLLSPRISVLHPEGHRITPEWLWEKYGLRPEQWVDFRALAGDPSDNIPGVKGIGEKTALKLLKEWGSLENLLKNLDQVKPESVREKILAHLEDLKLSRELSRVRTDLPLEVDFQRRREPDWEGLKAFLERLEFGSLLHEFGLLESPLPAEEAPWPPPEGAFLGYRLSRPEPMWAELLALAASAQGRVYRAEDPHGALRGLFEVRGLLAKDLAVVALREGLDLPPTDDPMLLAYLLDPSNTTPEGVARRYGGEWTEDAAKRALLAERLHANLLGRLQGEERLLWLYEEVEKPLSRVLAHMEATGVKLDVAYLENLSLEVAAHMRRLEEEVFRLAGRSFRLNSRDQLERVLFDELGLPPIGKTEKTGKRSTSAAVLEALREVHPIVDKILQYRELAKLKGTYIDRLPALVHPKTGRLHTRFNQTATATGRLSSSDPNLQNIPVRTPLGQKIRRAFVAEEGWRLVALDYSQIELRVLAHLSGDENLIRVFQEGKDIHTQTASWMFGLNAEAIDPLMRRAAKTINFGVLYGMSAFRLSQELGIPYEEAQAFIQKYFQSYPKVKAWIEKTLEEGRTRGYVETLFGRRRYVPDLNARVKGKREAAERMAFNMPVQGTAADLMKLAMVRLFPQLREVGARMLLQVHDELLLEAPKERAEEVAALAKEVMEGVWPLAVPLEVEVGIGEDWLAAKG

SEQ ID NO: 3743 - DNA, 2523 bp, synthetic construct
  misc_feature 1..2523: note = Variant of DNA polymerase I from Thermus sp. strain 2.9
  source 1..2523: mol_type = other DNA
atgcaccatcatcatcgtcatggcggtagcggcgtgttaccggtgttcgagcctaaaggtcgcgtgcttctggttgatggccatcatctcgcgtatcgtaacttctttgccctgaaaggattaaccaccagcagcggcgagccggtacagggtgtctacggctttgcaaagtcgctcctgaaagctctgaaagaagacggtgatgtggtgattgttgtctttgatgcgaaagcgccaagttttcgccacgaagcgtacgaagcttacaaagccgggcgtgctccaacgccggaagactttcctcgccaattggcgcttatgaaggaattagtggatttgcttggcctcgaacgcttggaagttcccggtttcgaggcagacgacgtattagcgactctcgcaaagaaagccgaacgtgagggctatgaagtccagatcttgacagcagatcgcgatcttttccagcttttatctccgcgcatctcggtgttacacccggaagggcatcgtatcaccccggaatggctctgggagaaatatggtttgcgtcccgaacaatgggtggattttcgcgccttagcaggcgatccgagcgacaatattccgggagttaaaggtatcggcgagaagacggcgctcaagctccttaaagaatgggggtcgttggagaacttgcttaagaatttagatcaggtcaaaccagagtcagtgcgtgagaagattcttgctcacctcgaagacctcaaattaagccgcgaattgtcccgtgtacgcaccgatttgccgctcgaagttgatttccaacgccgccgcgaacctgactgggagggtcttaaagcgtttttagagcgtcttgaatttggttcgctcttgcatgaattcggccttttagaaagcccgttaccagccgaagaagcaccttggccaccgcccgagggcgcgtttttaggttaccgtttgagtcgcccggaaccgatgtgggccgaattactggctcttgcagcgtctgcccagggacgtgtgtatcgcgcggaagaccctcatggtgcgctccgcggcctcttcgaagtccgtggactccttgccaaagacttagctgttgttgcattgcgcgaaggtcttgatttacctccgactgatgatccaatgcttcttgcgtacctcttggacccgtcaaacacgacgcccgaaggcgtagcccgtcgttacggcggcgagtggaccgaagatgcagcgaaacgcgcgttattggccgaacgtttgcacgccaatttattaggacgtttgcaaggcgaggaacgtctcctctggctttacgaagaagtggagaaaccattgagtcgcgtgctcgcgcatatggaagctaccggtgtcaaattagacgtggcgtatttggagaatctcagccttgaagttgctgcccacatgcgccgcttggaggaagaagtattccgtttagcaggccgttcctttcgccttaattctcgcgatcagttagaacgtgtgttgttcgatgaacttggtctccctcctatcggcaagacagagaagaccggtaaacgtagcacttcagcggcggttttagaagctcttcgcgaagtccatcccattgtggacaagatcttgcaataccgcgaactcgcgaaattgaaaggcacctatattgaccgtcttccggcattagtccacccgaaaacgggacgcctccatacccgcttcaaccaaacagccacggcgaccggtcgtttgtcctcctctgatccaaaccttcagaatattccagtacgtaccccattgggccagaagatccgccgtgcgtttgtagctgaggagggttggcgtttagtggccctcgattatagccaaattgaattacgtgtccttgcccatctttctggcgatgagaacctcatccgcgtgtttcaggaaggcaaagacattcacactcaaacggcaagctggatgtttggattatcagctgaagcgatcgatcctttgatgcgtcgtgcagcgaagaccatcaatttcggtgttctctacggtatgagtgcctttcgtttgtcgcaggaattaggcattccctatgaagaagctcaggcgttcattcagaaatactttcaaagctatcccaaagttaaagcatggatcgagaagactctcgaagaaggccgcacacgtggttacgtagagaccttatttggacgtcgccgctatgttcccgatttaaacgctcgcgtgaaaggcaagcgtgaagccgccgaacgcatggcgttcaacatgcctgtacagggcacggcagctgacctcatgaaacttgcaatggtgcgcctttttccacaattgcgtgaagttggtgcccgcatgctcttgcaggtccacgatgaactcttgttagaagcgccaaaagagcgtgcggaagaggtggcagccctcgcgaaagaagttatggaaggcgtgtggcccttagcggtgcctcttgaagtcgaagttggtattggcgaggattggctggctgccaaagga

SEQ ID NO: 3744 - protein, 841 aa, synthetic construct; identical to SEQ ID NO: 3394
  REGION 1..841: note = Variant of DNA polymerase I from Thermus sp. strain 2.9

SEQ ID NO: 3745 - DNA, 2523 bp, synthetic construct; identical to SEQ ID NO: 3483
  misc_feature 1..2523: note = Variant of DNA polymerase I from Thermus sp. strain 2.9
  source 1..2523: mol_type = other DNA

SEQ ID NO: 3746 - protein, 841 aa, synthetic construct; identical to SEQ ID NO: 3458
  REGION 1..841: note = Variant of DNA polymerase I from Thermus sp. strain 2.9

SEQ ID NO: 3747 - DNA, 2523 bp, synthetic construct
  misc_feature 1..2523: note = Variant of DNA polymerase I from Thermus sp. strain 2.9
  source 1..2523: mol_type = other DNA
atgcaccatcatcatcatcatggcggtagcggcgtgttaccggtgttcgagcctaaaggtcgcgtgcttctggttgatggccataatctcgcgtatcgtaacttctttgccctgaaaggattaaccaccagcagcggcgagccggtacagggtgtctacggctttgcaaagtcgctcctgaaagctctgaaagaagacggtgatgtggtgattgttgtctttgatgcgaaagcgccaagttttcgccacgaagcgtacgaagcttacaaagccgggcgtgctccaacgccggaagactttcctcgccaattggcgcttatgaaggaattagtggatttgcttggcctcgaacgcttggaagttcccggtttcgaggcagacgacgtattagcgactctcgcaaagaaagccgaacgtgagggctatgaagtccagatcttgacagcagatcgcgatcttttccagcttttatctccgcgcatctcggtgttacacccggaagggcatcgtatcaccccggaatggctctgggagaaatatggtttgcgtcccgaacaatgggtggattttcgcgccttagcaggcgatccgagcgacaatattccgggagttaaaggtatcggcgagaagacggcgctcaagctccttaaagaatgggggtcgttggagaacttgcttaagaatttagatcaggtcaaaccagagtcagtgcgtgagaagattcttgctcacctcgaagacctcaaattaagccgcgaattgtcccgtgtacgcaccgatttgccgctcgaagttgatttccaacgccgccgcgaacctgactgggagggtcttaaagcgtttttagagcgtcttgaatttggttcgctcttgcatgaattcggccttttagaaagcccgttaccagccgaagaagcaccttggccaccgcccgagggcgcgtttttaggttaccgtttgagtcgcccggaaccgatgtgggccgaattactggctcttgcagcgtctgcccagggacgtgtgtatcgcgcggaagaccctcatggtgcgctccgcggcctcttcgaagtccgtggactccttgccaaagacttagctgttgttgcattgcgcgaaggtcttgatttacctccgactgatgatccaatgcttcttgcgtacctcttggacccgtcaaacacgacgcccgaaggcgtagcccgtcgttacggcggcgagtggaccgaagatgcagcgaaacgcgcgttattggccgaacgtttgcacgccaatttattaggacgtttgcaaggcgaggaacgtctcctctggctttacgaagaagtggagaaaccattgagtcgcgtgctcgcgcatatggaagctaccggtgtcaaattagacgtggcgtatttggagaatctcagccttgaagttgctgcccacatgcgccgcttggaggaagaagtattccgtttagcaggccgttcctttcgccttaattctcgcgatcagttagaacgtgtgttgttcgatgaacttggtctccctcctatcggcaagacagagaagaccggtaaacgtagcacttcagcggcggttttagaagctcttcgcgaagtccatcccattgtggacaagatcttgcaataccgcgaactcgcgaaattgaaaggcacctatattgaccgtcttccggcattagtccacccgaaaacgggacgcctccatacccgcttcaaccaaacagccacggcgaccggtcgtttgtcctcctctgatccaaaccttcagaatattccagtacgtaccccattgggccagaagatccgccgtgcgtttgtagctgaggagggttggcgtttagtggccctcgattatagccaaattgaattacgtgtccttgcccatctttctggcgatgagaacctcatccgcgtgtttcaggaaggcaaagacattcacactcaaacggcaagctggatgtttggattatcagctgaagcgatcgatcctttgatgcgtcgtgcagcgaagaccatcaatttcggtgttctctacggtatgagtgcctttcgtttgtcgcaggaattaggcattccctatgaagaagctcaggcgttcattcagaaatactttcaaagctatcccaaagttaaagcatggatcgagaagactctcgaagaaggccgcacacgtggttacgtagagaccttatttggacgtcgccgctatgttcccgatttaaacgctcgcgtgaaaggcaagcgtgaagccgccgaacgcatggcgttcaacatgcctgtacagggcacggcagctgacctcatgaaacttgcaatggtgcgcctttttccacaattgcgtgaagttggtgcccgcatgctcttgcaggtccacgatgaactcttgttagaagcgccaaaagagcgtgcggaagaggtggcagccctcgcgaaagaagttatggaaggcgtgtggcccttagcggtgcctcttgaagtcgaagttggtattggcgaggattggctggctgccaaagga

SEQ ID NO: 3748 - protein, 841 aa, synthetic construct
  REGION 1..841: note = Variant of DNA polymerase I from Thermus sp. strain 2.9
MHHHHHHGGSGVLPVFEPKGRVLLVDGHNLAYRNFFALKGLTTSSGEPVQGVYGFAKSLLKALKEDGDVVIVVFDAKAPSFRHEAYEAYKAGRAPTPEDFPRQLALMKELVDLLGLERLEVPGFEADDVLATLAKKAEREGYEVQILTADRDLFQLLSPRISVLHPEGHRITPEWLWEKYGLRPEQWVDFRALAGDPSDNIPGVKGIGEKTALKLLKEWGSLENLLKNLDQVKPESVREKILAHLEDLKLSRELSRVRTDLPLEVDFQRRREPDWEGLKAFLERLEFGSLLHEFGLLESPLPAEEAPWPPPEGAFLGYRLSRPEPMWAELLALAASAQGRVYRAEDPHGALRGLFEVRGLLAKDLAVVALREGLDLPPTDDPMLLAYLLDPSNTTPEGVARRYGGEWTEDAAKRALLAERLHANLLGRLQGEERLLWLYEEVEKPLSRVLAHMEATGVKLDVAYLENLSLEVAAHMRRLEEEVFRLAGRSFRLNSRDQLERVLFDELGLPPIGKTEKTGKRSTSAAVLEALREVHPIVDKILQYRELAKLKGTYIDRLPALVHPKTGRLHTRFNQTATATGRLSSSDPNLQNIPVRTPLGQKIRRAFVAEEGWRLVALDYSQIELRVLAHLSGDENLIRVFQEGKDIHTQTASWMFGLSAEAIDPLMRRAAKTINFGVLYGMSAFRLSQELGIPYEEAQAFIQKYFQSYPKVKAWIEKTLEEGRTRGYVETLFGRRRYVPDLNARVKGKREAAERMAFNMPVQGTAADLMKLAMVRLFPQLREVGARMLLQVHDELLLEAPKERAEEVAALAKEVMEGVWPLAVPLEVEVGIGEDWLAAKG

SEQ ID NO: 3749 - DNA, 2523 bp, synthetic construct
  misc_feature 1..2523: note = Variant of DNA polymerase I from Thermus sp. strain 2.9
  source 1..2523: mol_type = other DNA
atgcaccatcatcatcatcatggcggtagcggcgtgttaccggtgttcgagcctaaaggtcgcgtgcttctggttgatggccatcatctcgcgtatcgtaacttctttgccctgaaaggattaaccaccagcagcggcgagccggtacagggtgtctacggctttgcaaagtcgctcctgaaagctctgaaagaagacggtgatgtggtgattgttgtctttgatgcgaaagcgccaagttttcgccacgaagcgtacgaagcttacaaagccgggcgtgctccaacgccggaagactttcctcgccaattggcgcttatgaaggaattagtggatttgcttggcctcgaacgcttggaagttcccggtttcgaggcagacgacgtattagcgactctcgcaaagaaagccgaacgtgagggctatgaagtccagatcttgacagcagatcgcgatcttttccagcttttatctccgcgcatctcggtgttacacccggaagggcatcgtatcaccccggaatggctctgggagaaatatggtttgcgtcccgaacaatgggtggattttcgcgccttagcaggcgatccgagcgacaatattccgggagttaaaggtatcggcgagaagacggcgctcaagctccttaaagaatgggggtcgttggagaacttgcttaagaatttagatcaggtcaaaccagagtcagtgcgtgagaagattcttgctcacctcgaagacctcaaattaagccgcgaattgtcccgtgtacgcaccgatttgccgctcgaagttgatttccaacgccgccgcgaacctgactgggagggtcttaaagcgtttttagagcgtcttgaatttggttcgctcttgcatgaattcggccttttagaaagcccgttaccagccgaagaagcaccttggccaccgcccgagggcgcgtttttaggttaccgtttgagtcgcccggaaccgatgtgggccgaattactggctcttgcagcgtctgcccagggacgtgtgtatcgcgcggaagaccctcatggtgcgctccgcggcctcttcgaagtccgtggactccttgccaaagacttagctgttgttgcattgcgcgaaggtcttgatttacctccgactgatgatccaatgcttcttgcgtacctcttggacccgtcaaacacgacgcccgaaggcgtagcccgtcgttacggcggcgagtggaccgaagatgcagcgaaacgcgcgttattggccgaacgtttgcacgccaatttattaggacgtttgcaaggcgaggaacgtctcctctggctttacgaagaagtggagaaaccattgagtggggtgctcgcgcatatggaagctaccggtgtcaaattagacgtggcgtatttggagaatctcagccttgaagttgctgcccacatgcgccgcttggaggaagaagtattccgtttagcaggccgttcctttcgccttaattctcgcgatcagttagaacgtgtgttgttcgatgaacttggtctccctcctatcggcaagacagagaagaccggtaaacgtagcacttcagcggcggttttagaagctcttcgcgaagtccatcccattgtggacaagatcttgcaataccgcgaactcgcgaaattgaaaggcacctatattgaccgtcttccggcattagtccacccgaaaacgggacgcctccatacccgcttcaaccaaacagccacggcgaccggtcgtttgtcctcctctgatccaaaccttcagaatattccagtacgtaccccattgggccagaagatccgccgtgcgtttgtagctgaggagggttggcgtttagtggccctcgattatagccaaattgaattacgtgtccttgcccatctttctggcgatgagaacctcatccgcgtgtttcaggaaggcaaagacattcacactcaaacggcaagctggatgtttggattatcagctgaagcgatcgatcctttgatgcgtcgtgcagcgaagaccatcaatttcggtgttctctacggtatgagtgcctttcgtttgtcgcaggaattaggcattccctatgaagaagctcaggcgttcattcagaaatactttcaaagctatcccaaagttaaagcatggatcgagaagactctcgaagaaggccgcacacgtggttacgtagagaccttatttggacgtcgccgctatgttcccgatttaaacgctcgcgtgaaaggcaagcgtgaagccgccgaacgcatggcgttcaacatgcctgtacagggcacggcagctgacctcatgaaacttgcaatggtgcgcctttttccacaattgcgtgaagttggtgcccgcatgctcttgcaggtccacgatgaactcttgttagaagcgccaaaagagcgtgcggaagaggtggcagccctcgcgaaagaagttatggaaggcgtgtggcccttagcggtgcctcttgaagtcgaagttggtattggcgaggattggctggctgccaaagga

SEQ ID NO: 3750 - protein, 841 aa, synthetic construct
  REGION 1..841: note = Variant of DNA polymerase I from Thermus sp. strain 2.9
MHHHHHHGGSGVLPVFEPKGRVLLVDGHHLAYRNFFALKGLTTSSGEPVQGVYGFAKSLLKALKEDGDVVIVVFDAKAPSFRHEAYEAYKAGRAPTPEDFPRQLALMKELVDLLGLERLEVPGFEADDVLATLAKKAEREGYEVQILTADRDLFQLLSPRISVLHPEGHRITPEWLWEKYGLRPEQWVDFRALAGDPSDNIPGVKGIGEKTALKLLKEWGSLENLLKNLDQVKPESVREKILAHLEDLKLSRELSRVRTDLPLEVDFQRRREPDWEGLKAFLERLEFGSLLHEFGLLESPLPAEEAPWPPPEGAFLGYRLSRPEPMWAELLALAASAQGRVYRAEDPHGALRGLFEVRGLLAKDLAVVALREGLDLPPTDDPMLLAYLLDPSNTTPEGVARRYGGEWTEDAAKRALLAERLHANLLGRLQGEERLLWLYEEVEKPLSGVLAHMEATGVKLDVAYLENLSLEVAAHMRRLEEEVFRLAGRSFRLNSRDQLERVLFDELGLPPIGKTEKTGKRSTSAAVLEALREVHPIVDKILQYRELAKLKGTYIDRLPALVHPKTGRLHTRFNQTATATGRLSSSDPNLQNIPVRTPLGQKIRRAFVAEEGWRLVALDYSQIELRVLAHLSGDENLIRVFQEGKDIHTQTASWMFGLSAEAIDPLMRRAAKTINFGVLYGMSAFRLSQELGIPYEEAQAFIQKYFQSYPKVKAWIEKTLEEGRTRGYVETLFGRRRYVPDLNARVKGKREAAERMAFNMPVQGTAADLMKLAMVRLFPQLREVGARMLLQVHDELLLEAPKERAEEVAALAKEVMEGVWPLAVPLEVEVGIGEDWLAAKG

SEQ ID NO: 3751 - DNA, 2523 bp, synthetic construct
  misc_feature 1..2523: note = Variant of DNA polymerase I from Thermus sp. strain 2.9
  source 1..2523: mol_type = other DNA
atgcaccatcatcatcatcatggcggtagcggcgtgttaccggtgttcgagcctaaaggtcgcgtgcttctggttgatggccatcatctcgcgtatcgtaacttctttgccctgaaaggattaaccaccagcagcggcgagccggtacagggtgtctacggctttgcaaagtcgctcctgaaagctctgaaagaagacggtgatgtggtgattgttgtctttgatttgaaagcgccaagttttcgccacgaagcgtacgaagcttacaaagccgggcgtgctccaacgccggaagactttcctcgccaattggcgcttatgaaggaattagtggatttgcttggcctcgaacgcttggaagttcccggtttcgaggcagacgacgtattagcgactctcgcaaagaaagccgaacgtgagggctatgaagtccagatcttgacagcagatcgcgatcttttccagcttttatctccgcgcatctcggtgttacacccggaagggcatcgtatcaccccggaatggctctgggagaaatatggtttgcgtcccgaacaatgggtggattttcgcgccttagcaggcgatccgagcgacaatattccgggagttaaaggtatcggcgagaagacggcgctcaagctccttaaagaatgggggtcgttggagaacttgcttaagaatttagatcaggtcaaaccagagtcagtgcgtgagaagattcttgctcacctcgaagacctcaaattaagccgcgaattgtcccgtgtacgcaccgatttgccgctcgaagttgatttccaacgccgccgcgaacctgactgggagggtcttaaagcgtttttagagcgtcttgaatttggttcgctcttgcatgaattcggccttttagaaagcccgttaccagccgaagaagcaccttggccaccgcccgagggcgcgtttttaggttaccgtttgagtcgcccggaaccgatgtgggccgaattactggctcttgcagcgtctgcccagggacgtgtgtatcgcgcggaagaccctcatggtgcgctccgcggcctcttcgaagtccgtggactccttgccaaagacttagctgttgttgcattgcgcgaaggtcttgatttacctccgactgatgatccaatgcttcttgcgtacctcttggacccgtcaaacacgacgcccgaaggcgtagcccgtcgttacggcggcgagtggaccgaagatgcagcgaaacgcgcgttattggccgaacgtttgcacgccaatttattaggacgtttgcaaggcgaggaacgtctcctctggctttacgaagaagtggagaaaccattgagtcgcgtgctcgcgcatatggaagctaccggtgtcaaattagacgtggcgtatttggagaatctcagccttgaagttgctgcccacatgcgccgcttggaggaagaagtattccgtttagcaggccgttcctttcgccttaattctcgcgatcagttagaacgtgtgttgttcgatgaacttggtctccctcctatcggcaagacagagaagaccggtaaacgtagcacttcagcggcggttttagaagctcttcgcgaagtccatcccattgtggacaagatcttgcaataccgcgaactcgcgaaattgaaaggcacctatattgaccgtcttccggcattagtccacccgaaaacgggacgcctccatacccgcttcaaccaaacagccacggcgaccggtcgtttgtcctcctctgatccaaaccttcagaatattccagtacgtaccccattgggccagaagatccgccgtgcgtttgtagctgaggagggttggcgtttagtggccctcgattatagccaaattgaattacgtgtccttgcccatctttctggcgatgagaacctcatccgcgtgtttcaggaaggcaaagacattcacactcaaacggcaagctggatgtttggattatcagctgaagcgatcgatcctttgatgcgtcgtgcagcgaagaccatcaatttcggtgttctctacggtatgagtgcctttcgtttgtcgcaggaattaggcattccctatgaagaagctcaggcgttcattcagaaatactttcaaagctatcccaaagttaaagcatggatcgagaagactctcgaagaaggccgcacacgtggttacgtagagaccttatttggacgtcgccgctatgttcccgatttaaacgctcgcgtgaaaggcaagcgtgaagccgccgaacgcatggcgttcaacatgcctgtacagggcacggcagctgacctcatgaaacttgcaatggtgcgcctttttccacaattgcgtgaagttggtgcccgcatgctcttgcaggtccacgatgaactcttgttagaagcgccaaaagagcgtgcggaagaggtggcagccctcgcgaaagaagttatggaaggcgtgtggcccttagcggtgcctcttgaagtcgaagttggtattggcgaggattggctggctgccaaagga

SEQ ID NO: 3752 - protein, 841 aa, synthetic construct
  REGION 1..841: note = Variant of DNA polymerase I from Thermus sp. strain 2.9
MHHHHHHGGSGVLPVFEPKGRVLLVDGHHLAYRNFFALKGLTTSSGEPVQGVYGFAKSLLKALKEDGDVVIVVFDLKAPSFRHEAYEAYKAGRAPTPEDFPRQLALMKELVDLLGLERLEVPGFEADDVLATLAKKAEREGYEVQILTADRDLFQLLSPRISVLHPEGHRITPEWLWEKYGLRPEQWVDFRALAGDPSDNIPGVKGIGEKTALKLLKEWGSLENLLKNLDQVKPESVREKILAHLEDLKLSRELSRVRTDLPLEVDFQRRREPDWEGLKAFLERLEFGSLLHEFGLLESPLPAEEAPWPPPEGAFLGYRLSRPEPMWAELLALAASAQGRVYRAEDPHGALRGLFEVRGLLAKDLAVVALREGLDLPPTDDPMLLAYLLDPSNTTPEGVARRYGGEWTEDAAKRALLAERLHANLLGRLQGEERLLWLYEEVEKPLSRVLAHMEATGVKLDVAYLENLSLEVAAHMRRLEEEVFRLAGRSFRLNSRDQLERVLFDELGLPPIGKTEKTGKRSTSAAVLEALREVHPIVDKILQYRELAKLKGTYIDRLPALVHPKTGRLHTRFNQTATATGRLSSSDPNLQNIPVRTPLGQKIRRAFVAEEGWRLVALDYSQIELRVLAHLSGDENLIRVFQEGKDIHTQTASWMFGLSAEAIDPLMRRAAKTINFGVLYGMSAFRLSQELGIPYEEAQAFIQKYFQSYPKVKAWIEKTLEEGRTRGYVETLFGRRRYVPDLNARVKGKREAAERMAFNMPVQGTAADLMKLAMVRLFPQLREVGARMLLQVHDELLLEAPKERAEEVAALAKEVMEGVWPLAVPLEVEVGIGEDWLAAKG

SEQ ID NO: 3753 - DNA, 2523 bp, synthetic construct
  misc_feature 1..2523: note = Variant of DNA polymerase I from Thermus sp. strain 2.9
  source 1..2523: mol_type = other DNA
atgcaccatcatcatcatcatggcggtagcggcgtgttacctgtgttcgagcctaaaggtcgcgtgcttctggttgatggccatcatctcgcgtatcgtaacttctttgccctgaaaggattaaccaccagcagcggcgagccggtacagggtgtctacggctttgcaaagtcgctcctgaaagctctgaaagaagacggtgatgtggtgattgttgtctttgatgcgaaagcgccaagttttcgccacgaagcgtacgaagcttacaaagccgggcgtgctccaacgccggaagactttcctcgccaattggcgcttatgaaggaattagtggatttgcttggcctcgaacgcttggaagttcccggtttcgaggcagacgacgtattagcgactctcgcaaagaaagccgaacgtgagggctatgaagtccagatcttgacagcagatcgcgatcttttccagcttttatctccgcgcatctcggtgttacacccggatgggcatcgtatcaccccggaatggctctgggagaaatatggtttgcgtcccgaacaatgggtggattttcgcgccttagcaggcgataaaagcgacaatattccgggagttaaaggtatcggcgagaagacggcgctcaagctccttaaagaatgggggtcgttggagaacttgcttaagaatttagatcaggtcaaaccagagtcagtgcgtgagaagattcttgctcacctcgaagacctcaaattaagccgcgaattgtcccgtgtacgcaccgatttgccgctcgaagttgatttccaacgccgccgcgaacctgactgggagggtcttaaagcgtttttagagcgtcttgaatttggttcgctcttgcatgaattcggccttttagaaagcccgttaccagccgaagaagcaccttggccaccgcccgagggcgcgtttttaggttaccgtttgagtcgcccggaaccgatgtgggccgaattactggctcttgcagcgtctgcccagggacgtgtgtatcgcgcggaagaccctcatggtgcgctccgcggcctcttcgaagtccgtggactccttgccaaagacttagctgttgttgcattgcgcgaaggtcttgatttacctccgactgatgatccaatgcttcttgcgtacctcttggacccgtcaaacacgacgcccgaaggcgtagcccgtcgttacggcggcgagtggaccgaagatgcagcgaaacgcgcgttattggccgaacgtttgcacgccaatttattaggacgtttgcaaggcgaggagcgtctcctctggctttacgaagaagtggagaaaccattgagtcgcgtgctcgcgcatatggaagctaccggtgtcaaattagacgtggcgtatttggagaatctcagccttgaagttgctgcccacatgcgccgcttggaggaagaagtattccgtttagcaggccgttcctttcgccttaattctcgcgatcagttagaacgtgtgttgttcgatgaacttggtctccctcctatcggcaagacagagaagaccggtaaacgtagcacttcagcggcggttttagaagctcttcgcgaagtccatcccattgtggacaagatcttgcaataccgcgaactcgcgaaattgaaaggcacctatattgaccgtcttccggcattagtccacccgaaaacgggacgcctccatacccgcttcaaccaaacagccacggcgaccggtcgtttgtcctcctctgatccaaaccttcagaatattccagtacgtaccccattgggccagaagatccgccgtgcgtttgtagctgaggagggttggcgtttagtggccctcgattatagccaaattgaattacgtgtccttgcccatctttctggcgatgagaacctcatccgcgtgtttcaggaaggcaaagacattcacactcaaacggcaagctggatgtttggattatcagctgaagcgatcgatcctttgatgcgtcgtgcagcgaagaccatcaatttcggtgttctctacggtatgagtgcctttcgtttgtcgcaggaattaggcattccctatgaagaagctcaggcgttcattcagaaatactttcaaagctatcccaaagttaaagcatggatcgagaagactctcgaagaaggccgcacacgtggttacgtagagaccttatttggacgtcgccgctatgttcccgatttaaacgctcgcgtgaaaggcaagcgtgaagccgccgaacgcatggcgttcaacatgcctgtacagggcacggcagctgacctcatgaaacttgcaatggtgcgcctttttccacaattgcgtgaagttggtgcccgcatgctcttgcaggtccacgatgaactcttgttagaagcgccaaaagagcgtgcggaagaggtggcagccctcgcgaaagaagttatggaaggcgtgtggcccttagcggtgcctcttgaagtcgaagttggtattggcgaggattggctggctgccaaagga

SEQ ID NO: 3754 - protein, 841 aa, synthetic construct
  REGION 1..841: note = Variant of DNA polymerase I from Thermus sp. strain 2.9
MHHHHHHGGSGVLPVFEPKGRVLLVDGHHLAYRNFFALKGLTTSSGEPVQGVYGFAKSLLKALKEDGDVVIVVFDAKAPSFRHEAYEAYKAGRAPTPEDFPRQLALMKELVDLLGLERLEVPGFEADDVLATLAKKAEREGYEVQILTADRDLFQLLSPRISVLHPDGHRITPEWLWEKYGLRPEQWVDFRALAGDKSDNIPGVKGIGEKTALKLLKEWGSLENLLKNLDQVKPESVREKILAHLEDLKLSRELSRVRTDLPLEVDFQRRREPDWEGLKAFLERLEFGSLLHEFGLLESPLPAEEAPWPPPEGAFLGYRLSRPEPMWAELLALAASAQGRVYRAEDPHGALRGLFEVRGLLAKDLAVVALREGLDLPPTDDPMLLAYLLDPSNTTPEGVARRYGGEWTEDAAKRALLAERLHANLLGRLQGEERLLWLYEEVEKPLSRVLAHMEATGVKLDVAYLENLSLEVAAHMRRLEEEVFRLAGRSFRLNSRDQLERVLFDELGLPPIGKTEKTGKRSTSAAVLEALREVHPIVDKILQYRELAKLKGTYIDRLPALVHPKTGRLHTRFNQTATATGRLSSSDPNLQNIPVRTPLGQKIRRAFVAEEGWRLVALDYSQIELRVLAHLSGDENLIRVFQEGKDIHTQTASWMFGLSAEAIDPLMRRAAKTINFGVLYGMSAFRLSQELGIPYEEAQAFIQKYFQSYPKVKAWIEKTLEEGRTRGYVETLFGRRRYVPDLNARVKGKREAAERMAFNMPVQGTAADLMKLAMVRLFPQLREVGARMLLQVHDELLLEAPKERAEEVAALAKEVMEGVWPLAVPLEVEVGIGEDWLAAKG

SEQ ID NO: 3755 - DNA, 2523 bp, synthetic construct
  misc_feature 1..2523: note = Variant of DNA polymerase I from Thermus sp. strain 2.9
  source 1..2523: mol_type = other DNA
atgcaccatcatcatcatcatggcggtagcggcgtgttaccggtgttcgagcctaaaggtcgcgtgcttctggttgatggccatcatctcgcgtatcgtaacttctttgccctgaaaggattaaccaccagcagcggcgagccggtacagggtgtctacggctttgcaaagtcgctcctgaaagctctgaaagaagacggtgatgtggtgattgttgtctttgatgcgaaagcgccaagttttcgccacgaagcgtacgaagcttacaaagccgggcgtgctccaacgccggaagactttcctcgccaattggcgcttatgaaggaattagtggatttgcttggcctcgaacgcttggaagttcccggtttcgaggcagacgacgtattagcgactctcgcaaagaaagccgaacgtgagggctatgaagtccagatcttgacagcagatcgcgatcttttccagcttttatctccgcgcatctcggtgttacacccggaagggcatcgtatcaccccggaatggctctgggagaaatatggtttgcgtcccgaacaatgggtggattttcgcgccttagcaggcgatccgagcgacaatattccgggagttaaaggtatcggcgagaagacggcgctcaagctccttaaagaatgggggtcgttggagaacttgcttaagaatttagatcaggtcaaaccagagtcagtgcgtgagaagattcttgctcacctcgaagacctcaaattaagccgcgaattgtcccgtgtacgcaccgatttgccgctcgaagttgatttccaacgccgccgcgaacctgactgggagggtcttaaagcgtttttagagcgtcttgaatttggttcgctcttgcatgaattcggccttttagaaagcccgttaccagccgaagaagcaccttggccaccgcccgagggcgcgtttttaggttaccgtttgagtcgcccggaaccgatgtgggccgaattactggctcttgcagcgtctgcccagggacgtgtgtatcgcgcggaagaccctcatggtgcgctccgcggcctcttcgaagtccgtggactccttgccaaagacttagctgttgttgcattgcgcgaaggtcttgatttacctccgactgatgatccaatgcttcttgcgtacctcttggacccgtcaaacacgacgcccgaaggcgtagcccgtcgttacggcggcgagtggaccgaagatgcagcgaaacgcgcgttattggccgaacgtttgcacgccaatttattaggacgtttgcaaggcgaggaacgtctcctctggctttacgaagaagtggagaaaccattgagtcgcgtgctcgcgcatatggaagctaccggtgtcaaattagacgtggcgtatttggagaatctcagccttgaagttgctgcccacatgcgccgcttggaggaagaagtattccgtttagcaggccgttcctttcgccttaattctcgcgatcagttagaacgtgtgttgttcgatgaacttggtctccctcctatcggcaagacagagaagaccggtaaacgtagcacttcagcggcggttttagaagctcttcgcgaagtccatcccattgtggacaagatcttgcaataccgcgaactcgcgaaattgaaaggcacctatattgaccgtcttccggcattagtccacccgaaaacgggacgcctccatacccgcttcaaccaaacagccacggcgaccggtcgtttgtcctcctctgatccaaaccttcagaatattccagtacgtaccccattgggccagaagatccgccgtgcgtttgtagctgaggagggttggcgtttagtggccctcgattatagccaaattgaattacgtgtccttgcccatctttctggcgatgagaacctcatccgcgtgtttcaggaaggcaaagacattcacactcaaacggcaagctggatgtttggattatcagctgaagtgatcgatcctttgatgcgtcgtgcagcgaagaccatcaatttcggtgttctctacggtatgagtgcctttcgtttgtcgcaggaattaggcattccctatgaagaagctcaggcgttcattcagaaatactttcaaagctatcccaaagttaaagcatggatcgagaagactctcgaagaaggccgcacacgtggttacgtagagaccttatttggacgtcgccgctatgttcccgatttaaacgctcgcgtgaaaggcaagcgtgaagccgccgaacgcatggcgttcaacatgcctgtacagggcacggcagctgacctcatgaaacttgcaatggtgcgcctttttccacaattgcgtgaagttggtgcccgcatgctcttgcaggtccacgatgaactcttgttagaagcgccaaaagagcgtgcggaagaggtggcagccctcgcgaaagaagttatggaaggcgtgtggcccttagcggtgcctcttgaagtcgaagttggtattggcgaggattggctggctgccaaagga

SEQ ID NO: 3756 - protein, 841 aa, synthetic construct; identical to SEQ ID NO: 3570
  REGION 1..841: note = Variant of DNA polymerase I from Thermus sp. strain 2.9

SEQ ID NO: 3757 - DNA, 2523 bp, synthetic construct
  misc_feature 1..2523: note = Variant of DNA polymerase I from Thermus sp. strain 2.9
  source 1..2523: mol_type = other DNA
atgcaccatcatcatcatcatggcggtagcggcgtgttaccggtgttcgagcctaaaggtcgcgtgcttctggttgatggccatgtgctcgcgtatcgtaacttctttgccctgaaaggattaaccaccagcagcggcgagccggtacagggtgtctacggctttgcaaagtcgctcctgaaagctctgaaagaagacggtgatgtggtgattgttgtctttgatgcgaaagcgccaagttttcgccacgaagcgtacgaagcttacaaagccgggcgtgctccaacgccggaagactttcctcgccaattggcgcttatgaaggaattagtggatttgcttggcctcgaacgcttggaagttcccggtttcgaggcagacgacgtattagcgactctcgcaaagaaagccgaacgtgagggctatgaagtccagatcttgacagcagatcgcgatcttttccagcttttatctccgcgcatctcggtgttacacccggaagggcatcgtatcaccccggaatggctctgggagaaatatggtttgcgtcccgaacaatgggtggattttcgcgccttagcaggcgatccgagcgacaatattccgggagttaaaggtatcggcgagaagacggcgctcaagctccttaaagaatgggggtcgttggagaacttgcttaagaatttagatcaggtcaaaccagagtcagtgcgtgagaagattcttgctcacctcgaagacctcaaattaagccgcgaattgtcccgtgtacgcaccgatttgccgctcgaagttgatttccaacgccgccgcgaacctgactgggagggtcttaaagcgtttttagagcgtcttgaatttggttcgctcttgcatgaattcggccttttagaaagcccgttaccagccgaagaagcaccttggccaccgcccgagggcgcgtttttaggttaccgtttgagtcgcccggaaccgatgtgggccgaattactggctcttgcagcgtctgcccagggacgtgtgtatcgcgcggaagaccctcatggtgcgctccgcggcctcttcgaagtccgtggactccttgccaaagacttagctgttgttgcattgcgcgaaggtcttgatttacctccgactgatgatccaatgcttcttgcgtacctcttggacccgtcaaacacgacgcccgaaggcgtagcccgtcgttacggcggcgagtggaccgaagatgcagcgaaacgcgcgttattggccgaacgtttgcacgccaatttattaggacgtttgcaaggcgaggaacgtctcctctggctttacgaagaagtggagaaaccattgagtcgcgtgctcgcgcatatggaagctaccggtgtcaaattagacgtggcgtatttggagaatctcagccttgaagttgctgcccacatgcgccgcttggaggaagaagtattccgtttagcaggccgttcctttcgccttaattctcgcgatcagttagaacgtgtgttgttcgatgaacttggtctccctcctatcggcaagacagagaagaccggtaaacgtagcacttcagcggcggttttagaagctcttcgcgaagtccatcccattgtggacaagatcttgcaataccgcgaactcgcgaaattgaaaggcacctatattgaccgtcttccggcattagtccacccgaaaacgggacgcctccatacccgcttcaaccaaacagccacggcgaccggtcgtttgtcctcctctgatccaaaccttcagaatattccagtacgtaccccattgggccagaagatccgccgtgcgtttgtagctgaggagggttggcgtttagtggccctcgattatagccaaattgaattacgtgtccttgcccatctttctggcgatgagaacctcatccgcgtgtttcaggaaggcaaagacattcacactcaaacggcaagctggatgtttggattatcagctgaagcgatcgatcctttgatgcgtcgtgcagcgaagaccatcaatttcggtgttctctacggtatgagtgcctttcgtttgtcgcaggaattaggcattccctatgaagaagctcaggcgttcattcagaaatactttcaaagctatcccaaagttaaagcatggatcgagaagactctcgaagaaggccgcacacgtggttacgtagagaccttatttggacgtcgccgctatgttcccgatttaaacgctcgcgtgaaaggcaagcgtgaagccgccgaacgcatggcgttcaacatgcctgtacagggcacggcagctgacctcatgaaacttgcaatggtgcgcctttttccacaattgcgtgaagttggtgcccgcatgctcttgcaggtccacgatgaactcttgttagaagcgccaaaagagcgtgcggaagaggtggcagccctcgcgaaagaagttatggaaggcgtgtggcccttagcggtgcctcttgaagtcgaagttggtattggcgaggattggctggctgccaaagga

SEQ ID NO: 3758 - protein, 841 aa, synthetic construct
  REGION 1..841: note = Variant of DNA polymerase I from Thermus sp. strain 2.9
MHHHHHHGGSGVLPVFEPKGRVLLVDGHVLAYRNFFALKGLTTSSGEPVQGVYGFAKSLLKALKEDGDVVIVVFDAKAPSFRHEAYEAYKAGRAPTPEDFPRQLALMKELVDLLGLERLEVPGFEADDVLATLAKKAEREGYEVQILTADRDLFQLLSPRISVLHPEGHRITPEWLWEKYGLRPEQWVDFRALAGDPSDNIPGVKGIGEKTALKLLKEWGSLENLLKNLDQVKPESVREKILAHLEDLKLSRELSRVRTDLPLEVDFQRRREPDWEGLKAFLERLEFGSLLHEFGLLESPLPAEEAPWPPPEGAFLGYRLSRPEPMWAELLALAASAQGRVYRAEDPHGALRGLFEVRGLLAKDLAVVALREGLDLPPTDDPMLLAYLLDPSNTTPEGVARRYGGEWTEDAAKRALLAERLHANLLGRLQGEERLLWLYEEVEKPLSRVLAHMEATGVKLDVAYLENLSLEVAAHMRRLEEEVFRLAGRSFRLNSRDQLERVLFDELGLPPIGKTEKTGKRSTSAAVLEALREVHPIVDKILQYRELAKLKGTYIDRLPALVHPKTGRLHTRFNQTATATGRLSSSDPNLQNIPVRTPLGQKIRRAFVAEEGWRLVALDYSQIELRVLAHLSGDENLIRVFQEGKDIHTQTASWMFGLSAEAIDPLMRRAAKTINFGVLYGMSAFRLSQELGIPYEEAQAFIQKYFQSYPKVKAWIEKTLEEGRTRGYVETLFGRRRYVPDLNARVKGKREAAERMAFNMPVQGTAADLMKLAMVRLFPQLREVGARMLLQVHDELLLEAPKERAEEVAALAKEVMEGVWPLAVPLEVEVGIGEDWLAAKG

SEQ ID NO: 3759 - DNA, 2523 bp, synthetic construct
  misc_feature 1..2523: note = Variant of DNA polymerase I from Thermus sp. strain 2.9
  source 1..2523: mol_type = other DNA
atgcaccatcatcatcatcatggcggtagcggcgtgttacctgtgttcgagcctaaaggtcgcgtgcttctggttgatggccatcatctcgcgtatcgtaacttctttgccctgaaaggattaaccaccagcagcggcgagccggtacagggtgtctacggctttgcaaagtcgctcctgaaagctctgaaagaagacggtgatgtggtgattgttgtctttgatgcgaaagcgccaagttttcgccacgaagcgtacgaagcttacaaagccgggcgtgctccaacgccggaagactttcctcgccaattggcgcttatgaaggaattagtggatttgcttggcctcgaacgcttggaagttcccggtttcgaggcagacgacgtattagcgactctcgcaaagaaagccgaagacgagggctatgaagtccagatcttgacagcagatcgcgatcttttccagcttttatctccgcgcatctcggtgttacacccggaagggcatcgtatcaccccggaatggctctgggagaaatatggtttgcgtcccgaacaatgggtggattttcgcgccttagcaggcgatccgagcgacaatattccgggagttaaaggtatcggcgagaagacggcgctcaagctccttaaagaatgggggtcgttggagaacttgcttaagaatttagatcaggtcaaaccagagtcagtgcgtgagaagattcttgctcacctcgaagacctcaaattaagccgcgaattgtcccgtgtacgcaccgatttgccgctcgaagttgatttccaacgccgccgcgaacctgactgggagggtcttaaagcgtttttagagcgtcttgaatttggttcgctcttgcatgaattcggccttttagaaagcccgttaccagccgaagaagcaccttggccaccgcccgagggcgcgtttttaggttaccgtttgagtcgcccggaaccgatgtgggccgaattactggctcttgcagcgtctgcccagggacgtgtgtatcgcgcggaagaccctcatggtgcgctccgcggcctcttcgaagtccgtggactccttgccaaagacttagctgttgttgcattgcgcgaaggtcttgatttacctccgactgatgatccaatgcttcttgcgtacctcttggacccgtcaaacacgacgcctgaaggcgtagcccgtcgttacggcggcgagtggaccgaagatgcagcgaaacgcgcgttattggccgaacgtttgcacgccaatttattaggacgtttgcaaggcgagaagcgtctcctctggctttacgaagaagtggagaaaccattgagtcgcgtgctcgcgcatatggaagctaccggtgtcaaattagacgtggcgtatttggagaatctcagccttgaagttgctgcccacatgcgccgcttggaggaagaagtattccgtttagcaggccgttcctttcgccttaattctcgcgatcagttagaacgtgtgttgttcgatgaacttggtctccctcctatcggcaagacagagaagaccggtaaacgtagcacttcagcggcggttttagaagctcttcgcgaagtccatcccattgtggacaagatcttgcaataccgcgaactcgcgaaattgaaaggcacctatattgaccgtcttccggcattagtccacccgaaaacgggacgcctccatacccgcttcaaccaaacagccacggcgaccggtcgtttgtcctcctctgatccaaaccttcagaatattccagtacgtaccaaattgggccagaagatccgccgtgcgtttgtagctgaggagggttggcgtttagtggccctcgattatagccaaattgaattacgtgtccttgcccatctttctggcgatgagaacctcatccgcgtgtttcaggaaggcaaagacattcacactcaaacggcaagctggatgtttggattatcagctgaagcgatcgatcctttgatgcgtcgtgcagcgaagaccatcaatttcggtgttctctacggtatgagtgcctttcgtttgtcgcaggaattaggcattccctatgaagaagctcaggcgttcattcagaaatactttcaaagctatcccaaagttaaagcatggatcgagaagactctcgaagaaggccgcacacgtggttacgtagagaccttatttggacgtcgccgctatgttcccgatttaaacgctcgcgtgaaaggcaagcgtgaagccgccgaacgcatggcgttcaacatgcctgtacagggcacggcagctgacctcatgaaacttgcaatggtgcgcctttttccacaattgcgtgaagttggtgcccgcatgctcttgcaggtccacgatgaactcttgttagaagcgccaaaagagcgtgcggaagaggtggcagccctcgcgaaagaagttatggaaggcgtgtggcccttagcggtgcctcttgaagtcgaagttggtattggcgaggattggctggctgccaaagga

SEQ ID NO: 3760 - protein, 841 aa, synthetic construct
  REGION 1..841: note = Variant of DNA polymerase I from Thermus sp. strain 2.9
MHHHHHHGGSGVLPVFEPKGRVLLVDGHHLAYRNFFALKGLTTSSGEPVQGVYGFAKSLLKALKEDGDVVIVVFDAKAPSFRHEAYEAYKAGRAPTPEDFPRQLALMKELVDLLGLERLEVPGFEADDVLATLAKKAEDEGYEVQILTADRDLFQLLSPRISVLHPEGHRITPEWLWEKYGLRPEQWVDFRALAGDPSDNIPGVKGIGEKTALKLLKEWGSLENLLKNLDQVKPESVREKILAHLEDLKLSRELSRVRTDLPLEVDFQRRREPDWEGLKAFLERLEFGSLLHEFGLLESPLPAEEAPWPPPEGAFLGYRLSRPEPMWAELLALAASAQGRVYRAEDPHGALRGLFEVRGLLAKDLAVVALREGLDLPPTDDPMLLAYLLDPSNTTPEGVARRYGGEWTEDAAKRALLAERLHANLLGRLQGEKRLLWLYEEVEKPLSRVLAHMEATGVKLDVAYLENLSLEVAAHMRRLEEEVFRLAGRSFRLNSRDQLERVLFDELGLPPIGKTEKTGKRSTSAAVLEALREVHPIVDKILQYRELAKLKGTYIDRLPALVHPKTGRLHTRFNQTATATGRLSSSDPNLQNIPVRTKLGQKIRRAFVAEEGWRLVALDYSQIELRVLAHLSGDENLIRVFQEGKDIHTQTASWMFGLSAEAIDPLMRRAAKTINFGVLYGMSAFRLSQELGIPYEEAQAFIQKYFQSYPKVKAWIEKTLEEGRTRGYVETLFGRRRYVPDLNARVKGKREAAERMAFNMPVQGTAADLMKLAMVRLFPQLREVGARMLLQVHDELLLEAPKERAEEVAALAKEVMEGVWPLAVPLEVEVGIGEDWLAAKG

SEQ ID NO: 3761 - DNA, 2523 bp, synthetic construct
  misc_feature 1..2523: note = Variant of DNA polymerase I from Thermus sp. strain 2.9
  source 1..2523: mol_type = other DNA
atgcaccatcatcatcatcatggcggtagcggcgtgttacctgtgttcgagcctaaaggtcgcgtgcttctggttgatggccatcatctcgcgtatcgtaacttctttgccctgaaaggattaaccaccagcagcggcgagccggtacagggtgtctacggctttgcaaagtcgctcctgaaagctctgaaagaagacggtgatgtggtgattgttgtctttgatgcgaaagcgccaagttttcgccacgaagcgtacgaagcttacaaagccgggcgtgctcctacgccggaagactttcctcgccaattggcgcttatgaaggaattagtggatttgcttggcctcgaacgcttggaagttcccggtttcgaggcagacgacgtattagcgactctcgcaaagaaagccgaacgtgagggctatgaagtccagatcttgacagcagatcgcgatcttttccagcttttatctccgcgcatctcggtgttacacccggatgggcatcgtatcaccccggaatggctctgggagaaatatggtttgcgtcccgaacaatgggtggattttcgcgccttagcaggcgatccgagcgacaatattccgggagttaaaggtatcggcgagaagacggcgctcaagctccttaaagaatgggggtcgttggagaacttgcttaagaatttagatcaggtcaaaccagagtcagtgcgtgagaagattcttgctcacctcgaagacctcaaattaagccgcgaattgtcccgtgtacgcaccgatttgccgctcgaagttgatttccaacgccgccgcgaacctgactgggagggtcttaaagcgtttttagagcgtcttgaatttggttcgctcttgcatgaattcggccttttagaaagcccgttaccagccgaagaagcaccttggccaccgcccgagggcgcgtttttaggttaccgtttgagtcgcccggaaccgatgtgggccgaattactggctcttgcagcgtctgcccagggacgtgtgtatcgcgcggaagaccctcatggtgcgctccgcggcctcttcgaagtccgtggactccttgccaaagacttagctgttgttgcattgcgcgaaggtcttgatttacctccgactgatgatccaatgcttcttgcgtacctcttggacccgtcaaacacgacgcctgaaggcgtagcccgtcgttacggcggcgagtggaccgaagatgcagcgaaacgcgcgttattggccgaacgtttgcacgccaatttattaggacgtttgcaaggcgaggaacgtctcctctggctttacgaagaagtggagaaaccattgagtcgcgtgctcgcgcatatggaagctaccggtgtcaaattagacgtggcgtatttggagaatctcagccttgaagttgctgcccacatgcgccgcttggaggaagaagtattccgtttagcaggccgttcctttcgccttaattctcgcgatcagttagaacgtgtgttgttcgatgaacttggtctccctcctatcggcaagacagagaagaccggtaaacgtagcacttcagcggcggttttagaagctcttcgcgaagtccatcccattgtggacaagatcttgcaataccgcgaactcgcgaaattgaaaggcacctatattgaccgtcttccggcattagtccacccgaaaacgggacgcctccatacccgcttcaaccaaacagccacggcgaccggtcgtttgtcctcctctgatccaaaccttcagaatattccagtacgtaccccattgggccagaagatccgccgtgcgtttgtagctgaggagggttggcgtttagtggccctcgattatagccaaattgaattacgtgtccttgcccatctttctggcgatgagaacctcatccgcgtgtttcaggaaggcaaagacattcacactcaaacggcaagctggatgtttggattatcagctgaagcgatcgatcctttgatgcgtcgtgcagcgaagaccatcaatttcggtgttctctacggtatgagtgcctttcgtttgtcgcaggaattaggcattccctacgaagaagctcaggcgttcattcagaaatactttcaaagctatcccaaagttaaagcatggatcgagaagactctcgaagaaggccgccaccgtggttacgtagagaccttatttggacgtcgccgctatgttcccgatttaaacgctcgcgtgaaaggcaagcgtgaagccgccgaacgcatggcgttcaacatgcctgtacagggcacggcagctgacctcatgaaacttgcaatggtgcgcctttttccacaattgcgtgaagttggtgcccgcatgctcttgcaggtccacgatgaactcttgttagaagcgccaaaagagcgtgcggaagaggtggcagccctcgcgaaagaagttatggaaggcgtgtggcccttagcggtgcctcttgaagtcgaagttggtattggcgaggattggctggctgccaaagga

SEQ ID NO: 3762 - protein, 841 aa, synthetic construct
  REGION 1..841: note = Variant of DNA polymerase I from Thermus sp. strain 2.9
MHHHHHHGGSGVLPVFEPKGRVLLVDGHHLAYRNFFALKGLTTSSGEPVQGVYGFAKSLLKALKEDGDVVIVVFDAKAPSFRHEAYEAYKAGRAPTPEDFPRQLALMKELVDLLGLERLEVPGFEADDVLATLAKKAEREGYEVQILTADRDLFQLLSPRISVLHPDGHRITPEWLWEKYGLRPEQWVDFRALAGDPSDNIPGVKGIGEKTALKLLKEWGSLENLLKNLDQVKPESVREKILAHLEDLKLSRELSRVRTDLPLEVDFQRRREPDWEGLKAFLERLEFGSLLHEFGLLESPLPAEEAPWPPPEGAFLGYRLSRPEPMWAELLALAASAQGRVYRAEDPHGALRGLFEVRGLLAKDLAVVALREGLDLPPTDDPMLLAYLLDPSNTTPEGVARRYGGEWTEDAAKRALLAERLHANLLGRLQGEERLLWLYEEVEKPLSRVLAHMEATGVKLDVAYLENLSLEVAAHMRRLEEEVFRLAGRSFRLNSRDQLERVLFDELGLPPIGKTEKTGKRSTSAAVLEALREVHPIVDKILQYRELAKLKGTYIDRLPALVHPKTGRLHTRFNQTATATGRLSSSDPNLQNIPVRTPLGQKIRRAFVAEEGWRLVALDYSQIELRVLAHLSGDENLIRVFQEGKDIHTQTASWMFGLSAEAIDPLMRRAAKTINFGVLYGMSAFRLSQELGIPYEEAQAFIQKYFQSYPKVKAWIEKTLEEGRHRGYVETLFGRRRYVPDLNARVKGKREAAERMAFNMPVQGTAADLMKLAMVRLFPQLREVGARMLLQVHDELLLEAPKERAEEVAALAKEVMEGVWPLAVPLEVEVGIGEDWLAAKG

SEQ ID NO: 3763 - DNA, 2523 bp, synthetic construct
  misc_feature 1..2523: note = Variant of DNA polymerase I from Thermus sp. strain 2.9
  source 1..2523: mol_type = other DNA
atgcaccatcatcatcatcatggcggtagcggcgtgttacctgtgttcgagcctaaaggtcgcgtgcttctggttgatggccatcatctcgcgtatcgtaacttctttgccctgaaaggattaaccaccagcagcggcgagccggtacagggtgtctacggctttgcaaagtcgctcctgaaagctctgaaagaagacggtgatgtggtgattgttgtctttgatgcgaaagcgccaagttttcgccacgaagcgtacgaagcttacaaagccgggcgtgctcctacgccggaagactttcctcgccaattggcgcttatgaaggaattagtggatttgcttggcctcgaacgcttggaagttcccggtttcgaggcagacgacgtattagcgactctcgcaaagaaagccgaagacgagggctatgaagtccagatcttgacagcagatcgcgatcttttccagcttttatctccgcgcatctcggtgttacacccggatgggcatcgtatcaccccggaatggctctgggagaaatatggtttgcgtcccgaacaatgggtggattttcgcgccttagcaggcgataaaagcgacaatattccgggagttaaaggtatcggcgagaagacggcgctcaagctccttaaagaatgggggtcgttggagaacttgcttaagaatttagatcaggtcaaaccagagtcagtgcgtgagaagattcttgctcacctcgaagacctcaagttaagccgcgaattgtcccgtgtacgcaccgatttgccgctcgaagttgatttccaacgccgccgcgaacctgactgggagggtcttaaagcgtttttagagcgtcttgaatttggttcgctcttgcatgaattcggccttttagaaagcccgttaccagccgaagaagcaccttggccaccgcccgagggcgcgtttttaggttaccgtttgagtcgcccggaaccgatgtgggccgaattactggctcttgcagcgtctgcccagggacgtgtgtatcgcgcggaagaccctcatggtgcgctccgcggcctcttcgaagtccgtggactccttgccaaagacttagctgttgttgcattgcgcgaaggtcttgatttacctccgactgatgatccaatgcttcttgcgtacctcttggacccgtcaaacacgacgcccgaaggcgtagcccgtcgttacggcggcgagtggaccgaagatgcagcgaaacgcgcgttattggccgaacgtttgcacgccaatttattaggacgtttgcaaggcgagaagcgtctcctctggctttacgaagaagtggagaaaccattgagtcgcgtgctcgcgcatatggaagctaccggtgtcaaattagacgtggcgtatttggagaatctcagccttgaagttgctgcccacatgcgccgcttggaggaagaagtattccgtttagcaggccgttcctttcgccttaattctcgcgatcagttagaaaaggtgttgttcgatgaacttggtctccctcctatcggcaagacagagaagaccggtaaacgtagcacttcagcggcggttttagaagctcttcgcgaagtccatcccattgtggacaagatcttgcaataccgcgaactcgcgaaattgaaaggcacctatattgaccgtcttccggcattagtccacccgaaaacgggacgcctccatacccgcttcaaccaaacagccacggcgaccggtcgtttgtcctcctctgatccaaaccttcagaatattccagtacgtaccccattgggccagaagatccgccgtgcgtttgtagctgaggagggttggcgtttagtggccctcgattatagccaaattgaattacgtgtccttgcccatctttctggcgatgagaacctcatccgcgtgtttgaggaaggcaaagacattcacactcaaacggcaagctggatgtttggattatcagctgaagcgatcgatcctttgatgcgtcgtgcagcgaagaccatcaatttcggtgttctctacggtatgagtgcctttcgtttgtcgcaggaattaggcattccctatgaagaagctcaggcgttcattcagaaatactttcaaagctatcccaaagttaaagcatggatcgagaagactctcgaagaaggccgcacacgtggttacgtagagaccttatttggacgtcgccgctatgttcccgatttaaacgctcgcgtgaaaggcaagcgtgaagccgccgaacgcatggcgttcaacatgcctgtacagggcacggcagctgacctcatgaaacttgcaatggtgcgcctttttccacaattgcgtgaagttggtgcccgcatgctcttgcaggtccacgatgaactcttgttagaagcgccaaaagagcgtgcggaagaggtggcagccctcgcgaaagaagttatggaaggcgtgtggcccttagcggtgcctcttgaagtcgaagttggtattggcgaggattggctggctgccaaagga

SEQ ID NO: 3764 - protein, 841 aa, synthetic construct
  REGION 1..841: note = Variant of DNA polymerase I from Thermus sp. strain 2.9
MHHHHHHGGSGVLPVFEPKGRVLLVDGHHLAYRNFFALKGLTTSSGEPVQGVYGFAKSLLKALKEDGDVVIVVFDAKAPSFRHEAYEAYKAGRAPTPEDFPRQLALMKELVDLLGLERLEVPGFEADDVLATLAKKAEDEGYEVQILTADRDLFQLLSPRISVLHPDGHRITPEWLWEKYGLRPEQWVDFRALAGDKSDNIPGVKGIGEKTALKLLKEWGSLENLLKNLDQVKPESVREKILAHLEDLKLSRELSRVRTDLPLEVDFQRRREPDWEGLKAFLERLEFGSLLHEFGLLESPLPAEEAPWPPPEGAFLGYRLSRPEPMWAELLALAASAQGRVYRAEDPHGALRGLFEVRGLLAKDLAVVALREGLDLPPTDDPMLLAYLLDPSNTTPEGVARRYGGEWTEDAAKRALLAERLHANLLGRLQGEKRLLWLYEEVEKPLSRVLAHMEATGVKLDVAYLENLSLEVAAHMRRLEEEVFRLAGRSFRLNSRDQLEKVLFDELGLPPIGKTEKTGKRSTSAAVLEALREVHPIVDKILQYRELAKLKGTYIDRLPALVHPKTGRLHTRFNQTATATGRLSSSDPNLQNIPVRTPLGQKIRRAFVAEEGWRLVALDYSQIELRVLAHLSGDENLIRVFEEGKDIHTQTASWMFGLSAEAIDPLMRRAAKTINFGVLYGMSAFRLSQELGIPYEEAQAFIQKYFQSYPKVKAWIEKTLEEGRTRGYVETLFGRRRYVPDLNARVKGKREAAERMAFNMPVQGTAADLMKLAMVRLFPQLREVGARMLLQVHDELLLEAPKERAEEVAALAKEVMEGVWPLAVPLEVEVGIGEDWLAAKG

SEQ ID NO: 3765 - DNA, 2523 bp, synthetic construct; identical to SEQ ID NO: 3275
  misc_feature 1..2523: note = Variant of DNA polymerase I from Thermus sp. strain 2.9
  source 1..2523: mol_type = other DNA

SEQ ID NO: 3766 - protein, 841 aa, synthetic construct; identical to SEQ ID NO: 3276
  REGION 1..841: note = Variant of DNA polymerase I from Thermus sp. strain 2.9

SEQ ID NO: 3767 - DNA, 2523 bp, synthetic construct
  misc_feature 1..2523: note = Variant of DNA polymerase I from Thermus sp. strain 2.9
  source 1..2523: mol_type = other DNA
atgcaccatcatcatcatcatggcggtagcggcgtgttaccggtgttcgagcctaaaggtcgcgtgcttctggttgatggccatatgctcgcgtatcgtaacttctttgccctgaaaggattaaccaccagcagcggcgagccggtacagggtgtctacggctttgcaaagtcgctcctgaaagctctgaaagaagacggtgatgtggtgattgttgtctttgatgcgaaagcgccaagttttcgccacgaagcgtacgaagcttacaaagccgggcgtgctccaacgccggaagactttcctcgccaattggcgcttatgaaggaattagtggatttgcttggcctcgaacgcttggaagttcccggtttcgaggcagacgacgtattagcgactctcgcaaagaaagccgaacgtgagggctatgaagtccagatcttgacagcagatcgcgatcttttccagcttttatctccgcgcatctcggtgttacacccggaagggcatcgtatcaccccggaatggctctgggagaaatatggtttgcgtcccgaacaatgggtggattttcgcgccttagcaggcgatccgagcgacaatattccgggagttaaaggtatcggcgagaagacggcgctcaagctccttaaagaatgggggtcgttggagaacttgcttaagaatttagatcaggtcaaaccagagtcagtgcgtgagaagattcttgctcacctcgaagacctcaaattaagccgcgaattgtcccgtgtacgcaccgatttgccgctcgaagttgatttccaacgccgccgcgaacctgactgggagggtcttaaagcgtttttagagcgtcttgaatttggttcgctcttgcatgaattcggccttttagaaagcccgttaccagccgaagaagcaccttggccaccgcccgagggcgcgtttttaggttaccgtttgagtcgcccggaaccgatgtgggccgaattactggctcttgcagcgtctgcccagggacgtgtgtatcgcgcggaagaccctcatggtgcgctccgcggcctcttcgaagtccgtggactccttgccaaagacttagctgttgttgcattgcgcgaaggtcttgatttacctccgactgatgatccaatgcttcttgcgtacctcttggacccgtcaaacacgacgcccgaaggcgtagcccgtcgttacggcggcgagtggaccgaagatgcagcgaaacgcgcgttattggccgaacgtttgcacgccaatttattaggacgtttgcaaggcgaggaacgtctcctctggctttacgaagaagtggagaaaccattgagtcgcgtgctcgcgcatatggaagctaccggtgtcaaattagacgtggcgtatttggagaatctcagccttgaagttgctgcccacatgcgccgcttggaggaagaagtattccgtttagcaggccgttcctttcgccttaattctcgcgatcagttagaacgtgtgttgttcgatgaacttggtctccctcctatcggcaagacagagaagaccggtaaacgtagcacttcagcggcggttttagaagctcttcgcgaagtccatcccattgtggacaagatcttgcaataccgcgaactcgcgaaattgaaaggcacctatattgaccgtcttccggcattagtccacccgaaaacgggacgcctccatacccgcttcaaccaaacagccacggcgaccggtcgtttgtcctcctctgatccaaaccttcagaatattccagtacgtaccccattgggccagaagatccgccgtgcgtttgtagctgaggagggttggcgtttagtggccctcgattatagccaaattgaattacgtgtccttgcccatctttctggcgatgagaacctcatccgcgtgtttcaggaaggcaaagacattcacactcaaacggcaagctggatgtttggattatcagctgaagcgatcgatcctttgatgcgtcgtgcagcgaagaccatcaatttcggtgttctctacggtatgagtgcctttcgtttgtcgcaggaattaggcattccctatgaagaagctcaggcgttcattcagaaatactttcaaagctatcccaaagttaaagcatggatcgagaagactctcgaagaaggccgcacacgtggttacgtagagaccttatttggacgtcgccgctatgttcccgatttaaacgctcgcgtgaaaggcaagcgtgaagccgccgaacgcatggcgttcaacatgcctgtacagggcacggcagctgacctcatgaaacttgcaatggtgcgcctttttccacaattgcgtgaagttggtgcccgcatgctcttgcaggtccacgatgaactcttgttagaagcgccaaaagagcgtgcggaagaggtggcagccctcgcgaaagaagttatggaaggcgtgtggcccttagcggtgcctcttgaagtcgaagttggtattggcgaggattggctggctgccaaagga

SEQ ID NO: 3768 - protein, 841 aa, synthetic construct
  REGION 1..841: note = Variant of DNA polymerase I from Thermus sp. strain 2.9
MHHHHHHGGSGVLPVFEPKGRVLLVDGHMLAYRNFFALKGLTTSSGEPVQGVYGFAKSLLKALKEDGDVVIVVFDAKAPSFRHEAYEAYKAGRAPTPEDFPRQLALMKELVDLLGLERLEVPGFEADDVLATLAKKAEREGYEVQILTADRDLFQLLSPRISVLHPEGHRITPEWLWEKYGLRPEQWVDFRALAGDPSDNIPGVKGIGEKTALKLLKEWGSLENLLKNLDQVKPESVREKILAHLEDLKLSRELSRVRTDLPLEVDFQRRREPDWEGLKAFLERLEFGSLLHEFGLLESPLPAEEAPWPPPEGAFLGYRLSRPEPMWAELLALAASAQGRVYRAEDPHGALRGLFEVRGLLAKDLAVVALREGLDLPPTDDPMLLAYLLDPSNTTPEGVARRYGGEWTEDAAKRALLAERLHANLLGRLQGEERLLWLYEEVEKPLSRVLAHMEATGVKLDVAYLENLSLEVAAHMRRLEEEVFRLAGRSFRLNSRDQLERVLFDELGLPPIGKTEKTGKRSTSAAVLEALREVHPIVDKILQYRELAKLKGTYIDRLPALVHPKTGRLHTRFNQTATATGRLSSSDPNLQNIPVRTPLGQKIRRAFVAEEGWRLVALDYSQIELRVLAHLSGDENLIRVFQEGKDIHTQTASWMFGLSAEAIDPLMRRAAKTINFGVLYGMSAFRLSQELGIPYEEAQAFIQKYFQSYPKVKAWIEKTLEEGRTRGYVETLFGRRRYVPDLNARVKGKREAAERMAFNMPVQGTAADLMKLAMVRLFPQLREVGARMLLQVHDELLLEAPKERAEEVAALAKEVMEGVWPLAVPLEVEVGIGEDWLAAKG

SEQ ID NO: 3769 - DNA, 2523 bp, synthetic construct; identical to SEQ ID NO: 3545
  misc_feature 1..2523: note = Variant of DNA polymerase I from Thermus sp. strain 2.9
  source 1..2523: mol_type = other DNA

SEQ ID NO: 3770 - protein, 841 aa, synthetic construct; identical to SEQ ID NO: 3508
  REGION 1..841: note = Variant of DNA polymerase I from Thermus sp. strain 2.9

SEQ ID NO: 3771 - DNA, 2523 bp, synthetic construct
  misc_feature 1..2523: note = Variant of DNA polymerase I from Thermus sp. strain 2.9
  source 1..2523: mol_type = other DNA
atgcaccatcatcatcatcatggcggtagcggcgtgttaccggtgttcgagcctaaaggtcgcgtgcttctggttgatggccatcatctcgcgtatcgtaacttctttgccctgaaaggattaaccaccagcagcggcgagccggtacagggtgtctacggctttgcaaagtcgctcctgaaagctctgaaagaagacggtgatgtggtgattgttgtctttgatgcgaaagcgccaagttttcgccacgaagcgtacgaagcttacaaagccgggcgtgctccaacgccggaagactttcctcgccaattggcgcttatgaaggaattagtggatttgcttggcctcgaacgcttggaagttcccggtttcgaggcagacgacgtattagcgactctcgcaaagaaagccgaacgtgagggctatgaagtccagatcttgacagcagatcgcgatcttttccagcttttatctccgcgcatctcggtgttacacccggaagggcatcgtatcaccccggaatggctctgggagaaatatggtttgcgtcccgaacaatgggtggattttcgcgccttagcaggcgatccgagcgacaatattccgggagttaaaggtatcggcgagaagacggcgctcaagctccttaaagaatgggggtcgttggagaacttgcttaagaatttagatcaggtcaaaccagagtcagtgcgtgagaagattcttgctcacctcgaagacctcaaattaagccgcgaattgtcccgtgtacgcaccgatttgccgctcgaagttgatttccaacgccgccgcgaacctgactgggagggtcttaaagcgtttttagagcgtcttgaatttggttcgctcttgcatgaattcggccttttagaaagcccgttaccagccgaagaagcaccttggccaccgcccgagggcgcgtttttaggttaccgtttgagtcgcccggaaccgatgtgggccgaattactggctcttgcagcgtctgcccagggacgtgtgtatcgcgcggaagaccctcattgggcgctccgcggcctcttcgaagtccgtggactccttgccaaagacttagctgttgttgcattgcgcgaaggtcttgatttacctccgactgatgatccaatgcttcttgcgtacctcttggacccgtcaaacacgacgcccgaaggcgtagcccgtcgttacggcggcgagtggaccgaagatgcagcgaaacgcgcgttattggccgaacgtttgcacgccaatttattaggacgtttgcaaggcgaggaacgtctcctctggctttacgaagaagtggagaaaccattgagtcgcgtgctcgcgcatatggaagctaccggtgtcaaattagacgtggcgtatttggagaatctcagccttgaagttgctgcccacatgcgccgcttggaggaagaagtattccgtttagcaggccgttcctttcgccttaattctcgcgatcagttagaacgtgtgttgttcgatgaacttggtctccctcctatcggcaagacagagaagaccggtaaacgtagcacttcagcggcggttttagaagctcttcgcgaagtccatcccattgtggacaagatcttgcaataccgcgaactcgcgaaattgaaaggcacctatattgaccgtcttccggcattagtccacccgaaaacgggacgcctccatacccgcttcaaccaaacagccacggcgaccggtcgtttgtcctcctctgatccaaaccttcagaatattccagtacgtaccccattgggccagaagatccgccgtgcgtttgtagctgaggagggttggcgtttagtggccctcgattatagccaaattgaattacgtgtccttgcccatctttctggcgatgagaacctcatccgcgtgtttcaggaaggcaaagacattcacactcaaacggcaagctggatgtttggattatcagctgaagcgatcgatcctttgatgcgtcgtgcagcgaagaccatcaatttcggtgttctctacggtatgagtgcctttcgtttgtcgcaggaattaggcattccctatgaagaagctcaggcgttcattcagaaatactttcaaagctatcccaaagttaaagcatggatcgagaagactctcgaagaaggccgcacacgtggttacgtagagaccttatttggacgtcgccgctatgttcccgatttaaacgctcgcgtgaaaggcaagcgtgaagccgccgaacgcatggcgttcaacatgcctgtacagggcacggcagctgacctcatgaaacttgcaatggtgcgcctttttccacaattgcgtgaagttggtgcccgcatgctcttgcaggtccacgatgaactcttgttagaagcgccaaaagagcgtgcggaagaggtggcagccctcgcgaaagaagttatggaaggcgtgtggcccttagcggtgcctcttgaagtcgaagttggtattggcgaggattggctggctgccaaagga

SEQ ID NO: 3772 - protein, 841 aa, synthetic construct
  REGION 1..841: note = Variant of DNA polymerase I from Thermus sp. strain 2.9
MHHHHHHGGSGVLPVFEPKGRVLLVDGHHLAYRNFFALKGLTTSSGEPVQGVYGFAKSLLKALKEDGDVVIVVFDAKAPSFRHEAYEAYKAGRAPTPEDFPRQLALMKELVDLLGLERLEVPGFEADDVLATLAKKAEREGYEVQILTADRDLFQLLSPRISVLHPEGHRITPEWLWEKYGLRPEQWVDFRALAGDPSDNIPGVKGIGEKTALKLLKEWGSLENLLKNLDQVKPESVREKILAHLEDLKLSRELSRVRTDLPLEVDFQRRREPDWEGLKAFLERLEFGSLLHEFGLLESPLPAEEAPWPPPEGAFLGYRLSRPEPMWAELLALAASAQGRVYRAEDPHWALRGLFEVRGLLAKDLAVVALREGLDLPPTDDPMLLAYLLDPSNTTPEGVARRYGGEWTEDAAKRALLAERLHANLLGRLQGEERLLWLYEEVEKPLSRVLAHMEATGVKLDVAYLENLSLEVAAHMRRLEEEVFRLAGRSFRLNSRDQLERVLFDELGLPPIGKTEKTGKRSTSAAVLEALREVHPIVDKILQYRELAKLKGTYIDRLPALVHPKTGRLHTRFNQTATATGRLSSSDPNLQNIPVRTPLGQKIRRAFVAEEGWRLVALDYSQIELRVLAHLSGDENLIRVFQEGKDIHTQTASWMFGLSAEAIDPLMRRAAKTINFGVLYGMSAFRLSQELGIPYEEAQAFIQKYFQSYPKVKAWIEKTLEEGRTRGYVETLFGRRRYVPDLNARVKGKREAAERMAFNMPVQGTAADLMKLAMVRLFPQLREVGARMLLQVHDELLLEAPKERAEEVAALAKEVMEGVWPLAVPLEVEVGIGEDWLAAKG

SEQ ID NO: 3773 - DNA, 2523 bp, synthetic construct
  misc_feature 1..2523: note = Variant of DNA polymerase I from Thermus sp. strain 2.9
  source 1..2523: mol_type = other DNA
atgcaccatcatcatcatcatggcggtagcggcgtgttacctgtgttcgagcctaaaggtcgcgtgcttctggttgatggccatcatctcgcgtatcgtaacttctttgccctgaaaggattaaccaccagcagcggcgagccggtacagggtgtctacggctttgcaaagtcgctcctgaaagctctgaaagaagacggtgatgtggtgattgttgtctttgatgcgaaagcgccaagttttcgccacgaagcgtacgaagcttacaaagccgggcgtgctccaacgccggaagactttcctcgccaattggcgcttatgaaggaattagtggatttgcttggcctcgaacgcttggaagttcccggtttcgaggcagacgacgtattagcgactctcgcaaagaaagccgaacgcgagggctatgaagtccagatcttgacagcagatcgcgatcttttccagcttttatctccgcgcatctcggtgttacacccggaagggcatcgtatcaccccggaatggctctgggagaaatatggtttgcgtcccgaacaatgggtggattttcgcgccttagcaggcgatccgagcgacaatattccgggagttaaaggtatcggcgagaagacggcgctcaagctccttaaagaatgggggtcgttggagaacttgcttaagaatttagatcaggtcaaaccagagtcagtgcgtgagaagattcttgctcacctcgaagacctcaaattaagccgcgaattgtcccgtgtacgcaccgatttgccgctcgaagttgatttccaacgccgccgcgaacctgactgggagggtcttaaagcgtttttagagcgtcttgaatttggttcgctcttgcatgaattcggccttttagaaagcccgttaccagccgaagaagcaccttggccaccgcccgagggcgcgtttttaggttaccgtttgagtcgcccggaaccgatgtgggccgaattactggctcttgcagcgtctgcccagggacgtgtgtatcgcgcggaagaccctcatggtgcgctccgcggcctcttcgaagtccgtggactccttgccaaagacttagctgttgttgcattgcgcgaaggtcttgatttacctccgactgatgatccaatgcttcttgcgtacctcttggacccgtcaaacacgacgcctgaaggcgtagcccgtcgttacggcggcgagtggaccgaagatgcagcgaaacgcgcgttattggccgaacgtttgcacgccaatttattaggacgtttgcaaggcgaggaacgtctcctctggctttacgaagaagtggagaaaccattgagtcgcgtgctcgcgcatatggaagctaccggtgtcaaattagacgtggcgtatttggagaatctcagccttgaagttgctgcccacatgcgccgcttggaggaagaagtattccgtttagcaggccgttcctttcgccttaattctcgcgatcagttagaacgtgtgttgttcgatgaacttggtctccctcctatcggcaagacagagaagaccggtaaacgtagcacttcagcggcggttttagaagctcttcgcgaagtccatcccattgtggacaagatcttgcaataccgcgaactcgcgaaattgaaaggcacctatattgaccgtcttccggcattagtccacccgaaaacgggacgcctccatacccgcttcaaccaaacagccacggcgaccggtcgtttgtcctcctctgatccaaaccttcagaatattccagtacgtaccccattgggccagaagatccgccgtgcgtttgtagctgaggagggttggcgtttagtggccctcgattatagccaaattgaattacgtgtccttgcccatctttctggcgatgagaacctcatccgcgtgtttgaggaaggcaaagacattcacactcaaacggcaagctggatgtttggattatcagctgaagcgatcgatcctttgatgcgtcgtgcagcgaagaccatcaatttcggtgttctctacggtatgagtgcctttcgtttgtcgcaggaattaggcattccctacgaagaagctcaggcgttcattcagaaatactttcaaagctatcccaaagttaaagcatggatcgagaagactctcgaagaaggccgcacccgtggttacgtagagaccttatttggacgtcgccgctatgttcccgatttaaacgctcgcgtgaaaggcaagcgtgaagccgccgaacgcatggcgttcaacatgcctgtacagggcacggcagctgacctcatgaaacttgcaatggtgcgcctttttccacaattgcgtgaagttggtgcccgcatgctcttgcaggtccacgatgaactcttgttagaagcgccaaaagagcgtgcggaagaggtggcagccctcgcgaaagaagttatggaaggcgtgtggcccttagcggtgcctcttgaagtcgaagttggtattggcgaggattggctggctgccaaagga

SEQ ID NO: 3774 - protein, 841 aa, synthetic construct; identical to SEQ ID NO: 3444
  REGION 1..841: note = Variant of DNA polymerase I from Thermus sp. strain 2.9

SEQ ID NO: 3775 - DNA, 2523 bp, synthetic construct
  misc_feature 1..2523: note = Variant of DNA polymerase I from Thermus sp. strain 2.9
  source 1..2523: mol_type = other DNA
atgcaccatcatcatcatcatggcggtagcggcgtgttaccggtgttcgagcctaaaggtcgcgtgcttctggttgatggccatcatctcgcgtatcgtaacttctttgccctgaaaggattaaccaccagcagcggcgagccggtacagggtgtctacggctttgcaaagtcgctcctgaaagctctgaaagaagacggtgatgtggtgattgttgtctttgatgcgaaagcgccaagttttcgccacgaagcgtacgaagcttacaaagccgggcgtgctccaacgccggaagactttcctcgccaattggcgcttatgaaggaattagtggatttgcttggcctcgaacgcttggaagttcccggtttcgaggcagacgacgtattagcgactctcgcaaagaaagccgaacgtgagggctatgaagtccagatcttgacagcagatcgcgatcttttccagcttttatctccgcgcatctcggtgttacacccggaagggcatcgtatcaccccggaatggctctgggagaaatatggtttgcgtcccgaacaatgggtggattttcgcgccttagcaggcgatccgagcgacaatattccgggagttaaaggtatcggcgagaagacggcgctcaagctccttaaagaatgggggtcgttggagaacttgcttaagaatttagatcaggtcaaaccagagtcagtgcgtgagaagattcttgctcacctcgaagacctcaaattaagccgcgaattgtcccgtgtacgcaccgatttgccgctcgaagttgatttccaacgccgccgcgaacctgactgggagggtcttaaagcgtttttagagcgtcttgaatttggttcgctcttgcatgaattcggccttttagaaagcccgttaccagccgaagaagcaccttggccaccgcccgagggcgcgtttttaggttaccgtttgagtcgcccggaaccgatgtgggccgaattactggctcttgcagcgtctgcccagggacgtgtgtatcgcgcggaagaccctcatggtgcgctccgcggcctcttcgaagtccgtggactccttgccaaagacttagctgttgttgcattgcgcgaaggtcttgatttacctccgactgatgatccaatgcttcttgcgtacctcttggacccgtcaaacacgacgcccgaaggcgtagcccgtcgttacggcggcgagtggaccgaagatgcagcgaaacgcgcgttattggccgaacgtttgcacgccaatttattaggacgtttgcaaggcgaggaacgtctcctctggctttacgaagaagtggagaaaccattgagtcgcgtgctcgcgcatatggaagctaccggtgtcaaattagacgtggcgtatttggagaatctcagccttgaagttgctgcccacatgcgccgcttggaggaagaagtattccgtttagcaggccgttcctttcgccttaattctcgcgatcagttagaacgtgtgttgttcgatgaacttggtctccctcctatcggcaagacagagaagaccggtaaacgtagcacttcagcggcggttttagaagctcttcgcgaagtccatcccattgtggacaagatcttgcaataccgcgaactcgcgaaattgaaaggcacctatattgaccgtcttccggcattagtccacccgaaaacgggacgcctccatacccgcttcaaccaaacagccacggcgaccggtcgtttgtcctcctctgatccaaaccttcagaatattccagtacgtaccccattgggccagaagatccgccgtgcgtttgtagctgaggagggttggcgtttagtggccctcgattatagccaaattgaattacgtgtccttgcccatctttctggcgatgagaacctcatccgcgtgtttcaggaaggcaaagacattcacactcaaacggcaagctggatgtttggattatcagctgaagcgatcgatcctttgatgcgtcgtgcagcgaagaccatcaatttcggtgttctctacggtatgagtccgtttcgtttgtcgcaggaattaggcattccctatgaagaagctcaggcgttcattcagaaatactttcaaagctatcccaaagttaaagcatggatcgagaagactctcgaagaaggccgcacacgtggttacgtagagaccttatttggacgtcgccgctatgttcccgatttaaacgctcgcgtgaaaggcaagcgtgaagccgccgaacgcatggcgttcaacatgcctgtacagggcacggcagctgacctcatgaaacttgcaatggtgcgcctttttccacaattgcgtgaagttggtgcccgcatgctcttgcaggtccacgatgaactcttgttagaagcgccaaaagagcgtgcggaagaggtggcagccctcgcgaaagaagttatggaaggcgtgtggcccttagcggtgcctcttgaagtcgaagttggtattggcgaggattggctggctgccaaagga

SEQ ID NO: 3776 - protein, 841 aa, synthetic construct
  REGION 1..841: note = Variant of DNA polymerase I from Thermus sp. strain 2.9
MHHHHHHGGSGVLPVFEPKGRVLLVDGHHLAYRNFFALKGLTTSSGEPVQGVYGFAKSLLKALKEDGDVVIVVFDAKAPSFRHEAYEAYKAGRAPTPEDFPRQLALMKELVDLLGLERLEVPGFEADDVLATLAKKAEREGYEVQILTADRDLFQLLSPRISVLHPEGHRITPEWLWEKYGLRPEQWVDFRALAGDPSDNIPGVKGIGEKTALKLLKEWGSLENLLKNLDQVKPESVREKILAHLEDLKLSRELSRVRTDLPLEVDFQRRREPDWEGLKAFLERLEFGSLLHEFGLLESPLPAEEAPWPPPEGAFLGYRLSRPEPMWAELLALAASAQGRVYRAEDPHGALRGLFEVRGLLAKDLAVVALREGLDLPPTDDPMLLAYLLDPSNTTPEGVARRYGGEWTEDAAKRALLAERLHANLLGRLQGEERLLWLYEEVEKPLSRVLAHMEATGVKLDVAYLENLSLEVAAHMRRLEEEVFRLAGRSFRLNSRDQLERVLFDELGLPPIGKTEKTGKRSTSAAVLEALREVHPIVDKILQYRELAKLKGTYIDRLPALVHPKTGRLHTRFNQTATATGRLSSSDPNLQNIPVRTPLGQKIRRAFVAEEGWRLVALDYSQIELRVLAHLSGDENLIRVFQEGKDIHTQTASWMFGLSAEAIDPLMRRAAKTINFGVLYGMSPFRLSQELGIPYEEAQAFIQKYFQSYPKVKAWIEKTLEEGRTRGYVETLFGRRRYVPDLNARVKGKREAAERMAFNMPVQGTAADLMKLAMVRLFPQLREVGARMLLQVHDELLLEAPKERAEEVAALAKEVMEGVWPLAVPLEVEVGIGEDWLAAKG

SEQ ID NO: 3777 - DNA, 2523 bp, synthetic construct
  misc_feature 1..2523: note = Variant of DNA polymerase I from Thermus sp. strain 2.9
  source 1..2523: mol_type = other DNA
atgcaccatcatcatcatcatggcggtagcggcgtgttaccggtgttcgagcctaaaggtcgcgtgcttctggttgatggccatcatctcgcgtatcgtaacttctttgccctgaaaggattaaccaccagcagcggcgagccggtacagggtgtctacggctttgcaaagtcgctcctgaaagctctgaaagaagacggtgatgtggtgattgttgtctttgatgcgaaagcgccaagttttcgccacgaagcgtacgaagcttacaaagccgggcgtgctccaacgccggaagactttcctcgccaattggcgcttatgaaggaattagtggatttgcttggcctcgaacgcttggaagttcccggtttcgaggcagacgacgtattagcgactctcgcaaagaaagccgaacgtgagtgttatgaagtccagatcttgacagcagatcgcgatcttttccagcttttatctccgcgcatctcggtgttacacccggaagggcatcgtatcaccccggaatggctctgggagaaatatggtttgcgtcccgaacaatgggtggattttcgcgccttagcaggcgatccgagcgacaatattccgggagttaaaggtatcggcgagaagacggcgctcaagctccttaaagaatgggggtcgttggagaacttgcttaagaatttagatcaggtcaaaccagagtcagtgcgtgagaagattcttgctcacctcgaagacctcaaattaagccgcgaattgtcccgtgtacgcaccgatttgccgctcgaagttgatttccaacgccgccgcgaacctgactgggagggtcttaaagcgtttttagagcgtcttgaatttggttcgctcttgcatgaattcggccttttagaaagcccgttaccagccgaagaagcaccttggccaccgcccgagggcgcgtttttaggttaccgtttgagtcgcccggaaccgatgtgggccgaattactggctcttgcagcgtctgcccagggacgtgtgtatcgcgcggaagaccctcatggtgcgctccgcggcctcttcgaagtccgtggactccttgccaaagacttagctgttgttgcattgcgcgaaggtcttgatttacctccgactgatgatccaatgcttcttgcgtacctcttggacccgtcaaacacgacgcccgaaggcgtagcccgtcgttacggcggcgagtggaccgaagatgcagcgaaacgcgcgttattggccgaacgtttgcacgccaatttattaggacgtttgcaaggcgaggaacgtctcctctggctttacgaagaagtggagaaaccattgagtcgcgtgctcgcgcatatggaagctaccggtgtcaaattagacgtggcgtatttggagaatctcagccttgaagttgctgcccacatgcgccgcttggaggaagaagtattccgtttagcaggccgttcctttcgccttaattctcgcgatcagttagaacgtgtgttgttcgatgaacttggtctccctcctatcggcaagacagagaagaccggtaaacgtagcacttcagcggcggttttagaagctcttcgcgaagtccatcccattgtggacaagatcttgcaataccgcgaactcgcgaaattgaaaggcacctatattgaccgtcttccggcattagtccacccgaaaacgggacgcctccatacccgcttcaaccaaacagccacggcgaccggtcgtttgtcctcctctgatccaaaccttcagaatattccagtacgtaccccattgggccagaagatccgccgtgcgtttgtagctgaggagggttggcgtttagtggccctcgattatagccaaattgaattacgtgtccttgcccatctttctggcgatgagaacctcatccgcgtgtttcaggaaggcaaagacattcacactcaaacggcaagctggatgtttggattatcagctgaagcgatcgatcctttgatgcgtcgtgcagcgaagaccatcaatttcggtgttctctacggtatgagtgcctttcgtttgtcgcaggaattaggcattccctatgaagaagctcaggcgttcattcagaaatactttcaaagctatcccaaagttaaagcatggatcgagaagactctcgaagaaggccgcacacgtggttacgtagagaccttatttggacgtcgccgctatgttcccgatttaaacgctcgcgtgaaaggcaagcgtgaagccgccgaacgcatggcgttcaacatgcctgtacagggcacggcagctgacctcatgaaacttgcaatggtgcgcctttttccacaattgcgtgaagttggtgcccgcatgctcttgcaggtccacgatgaactcttgttagaagcgccaaaagagcgtgcggaagaggtggcagccctcgcgaaagaagttatggaaggcgtgtggcccttagcggtgcctcttgaagtcgaagttggtattggcgaggattggctggctgccaaagga

SEQ ID NO: 3778 - protein, 841 aa, synthetic construct
  REGION 1..841: note = Variant of DNA polymerase I from Thermus sp. strain 2.9
MHHHHHHGGSGVLPVFEPKGRVLLVDGHHLAYRNFFALKGLTTSSGEPVQGVYGFAKSLLKALKEDGDVVIVVFDAKAPSFRHEAYEAYKAGRAPTPEDFPRQLALMKELVDLLGLERLEVPGFEADDVLATLAKKAERECYEVQILTADRDLFQLLSPRISVLHPEGHRITPEWLWEKYGLRPEQWVDFRALAGDPSDNIPGVKGIGEKTALKLLKEWGSLENLLKNLDQVKPESVREKILAHLEDLKLSRELSRVRTDLPLEVDFQRRREPDWEGLKAFLERLEFGSLLHEFGLLESPLPAEEAPWPPPEGAFLGYRLSRPEPMWAELLALAASAQGRVYRAEDPHGALRGLFEVRGLLAKDLAVVALREGLDLPPTDDPMLLAYLLDPSNTTPEGVARRYGGEWTEDAAKRALLAERLHANLLGRLQGEERLLWLYEEVEKPLSRVLAHMEATGVKLDVAYLENLSLEVAAHMRRLEEEVFRLAGRSFRLNSRDQLERVLFDELGLPPIGKTEKTGKRSTSAAVLEALREVHPIVDKILQYRELAKLKGTYIDRLPALVHPKTGRLHTRFNQTATATGRLSSSDPNLQNIPVRTPLGQKIRRAFVAEEGWRLVALDYSQIELRVLAHLSGDENLIRVFQEGKDIHTQTASWMFGLSAEAIDPLMRRAAKTINFGVLYGMSAFRLSQELGIPYEEAQAFIQKYFQSYPKVKAWIEKTLEEGRTRGYVETLFGRRRYVPDLNARVKGKREAAERMAFNMPVQGTAADLMKLAMVRLFPQLREVGARMLLQVHDELLLEAPKERAEEVAALAKEVMEGVWPLAVPLEVEVGIGEDWLAAKG

SEQ ID NO: 3779 - DNA, 2523 bp, synthetic construct
  misc_feature 1..2523: note = Variant of DNA polymerase I from Thermus sp. strain 2.9
  source 1..2523: mol_type = other DNA
atgcaccatcatcatcatcatggcggtagcggcgtgttaccggtgttcgagcataaaggtcgcgtgcttctggttgatggccatcatctcgcgtatcgtaacttctttgccctgaaaggattaaccaccagcagcggcgagccggtacagggtgtctacggctttgcaaagtcgctcctgaaagctctgaaagaagacggtgatgtggtgattgttgtctttgatgcgaaagcgccaagttttcgccacgaagcgtacgaagcttacaaagccgggcgtgctccaacgccggaagactttcctcgccaattggcgcttatgaaggaattagtggatttgcttggcctcgaacgcttggaagttcccggtttcgaggcagacgacgtattagcgactctcgcaaagaaagccgaacgtgagggctatgaagtccagatcttgacagcagatcgcgatcttttccagcttttatctccgcgcatctcggtgttacacccggaagggcatcgtatcaccccggaatggctctgggagaaatatggtttgcgtcccgaacaatgggtggattttcgcgccttagcaggcgatccgagcgacaatattccgggagttaaaggtatcggcgagaagacggcgctcaagctccttaaagaatgggggtcgttggagaacttgcttaagaatttagatcaggtcaaaccagagtcagtgcgtgagaagattcttgctcacctcgaagacctcaaattaagccgcgaattgtcccgtgtacgcaccgatttgccgctcgaagttgatttccaacgccgccgcgaacctgactgggagggtcttaaagcgtttttagagcgtcttgaatttggttcgctcctgcatgaattcggccttttagaaagcccgttaccagccgaagaagcaccttggccaccgcccgagggcgcgtttttaggttaccgtttgagtcgcccggaaccgatgtgggccgaattactggctcttgcagcgtctgcccagggacgtgtgtatcgcgcggaagaccctcatggtgcgctccgcggcctcttcgaagtccgtggactccttgccaaagacttagctgttgttgcattgcgcgaaggtcttgatttacctccgactgatgatccaatgcttcttgcgtacctcttggacccgtcaaacacgacgcccgaaggcgtagcccgtcgttacggcggcgagtggaccgaagatgcagcgaaacgcgcgttattggccgaacgtttgcacgccaatttattaggacgtttgcaaggcgaggaacgtctcctctggctttacgaagaagtggagaaaccattgagtcgcgtgctcgcgcatatggaagctaccggtgtcaaattagacgtggcgtatttggagaatctcagccttgaagttgctgcccacatgcgccgcttggaggaagaagtattccgtttagcaggccgttcctttcgccttaattctcgcgatcagttagaacgtgtgctgttcgatgaacttggtctccctcctatcggcaagacagagaagaccggtaaacgtagcactgacgcggctgttttagaagctctgcgcgaagtccatcccattgtggacaagatcttgcaataccgcgaaatggcgaaattgaaaggcacctatattgaccgtcttccggcattagtccacccgaaaacgggacgcctccatacccgcttcaaccaaacagccacggcgaccggtcgtttgtcctcctctgatccaaaccttcagaatattccagtacgtaccccattgggccagaagatccgccgtgcgtttgtagctgaggagggttggcgtttagtggccctcgattatagccaaattgaattacgtgtccttgcccatctttctggcgatgagaacctcatccgcgtgtttcaggaaggcaaagacattcacactcaaacggcaagctggatgtttggattatcagctgaagcgatcgatcctttgatgcgtcgtgcagcgaagacgatcaatttcggtgttctctacggtatgagtgcgtttcgtttgtcgcaggaattaggcattccctatgaagaagctcaggcgttcattcagaaatactttcaaagctatcccaaagttaaagcatggatcgagaagactctcgaagaaggccgcacacgtggttacgtagagaccttatttggacgtcgccgctatgttcccgatttaaacgctcgcgtgaaaggcaagcgtgaagccgccgaacgcatggcgttcaacatgcctgtacagggcacggcagctgacctcatgaaacttgcaatggtgcgcctttttccacaattgcgtgaagttggtgcccgcatgctcttgcaggtccacgatgaactcttgttagaagcgccaaaagagcgtgcggaagaggtggcagccctcgcgaaagaagttatggaaggcgtgtggcccttagcggtgcctcttgaagtcgaagttggtattggcgaggattggctggctgccaaagga

SEQ ID NO: 3780 - protein, 841 aa, synthetic construct
  REGION 1..841: note = Variant of DNA polymerase I from Thermus sp. strain 2.9
MHHHHHHGGSGVLPVFEHKGRVLLVDGHHLAYRNFFALKGLTTSSGEPVQGVYGFAKSLLKALKEDGDVVIVVFDAKAPSFRHEAYEAYKAGRAPTPEDFPRQLALMKELVDLLGLERLEVPGFEADDVLATLAKKAEREGYEVQILTADRDLFQLLSPRISVLHPEGHRITPEWLWEKYGLRPEQWVDFRALAGDPSDNIPGVKGIGEKTALKLLKEWGSLENLLKNLDQVKPESVREKILAHLEDLKLSRELSRVRTDLPLEVDFQRRREPDWEGLKAFLERLEFGSLLHEFGLLESPLPAEEAPWPPPEGAFLGYRLSRPEPMWAELLALAASAQGRVYRAEDPHGALRGLFEVRGLLAKDLAVVALREGLDLPPTDDPMLLAYLLDPSNTTPEGVARRYGGEWTEDAAKRALLAERLHANLLGRLQGEERLLWLYEEVEKPLSRVLAHMEATGVKLDVAYLENLSLEVAAHMRRLEEEVFRLAGRSFRLNSRDQLERVLFDELGLPPIGKTEKTGKRSTDAAVLEALREVHPIVDKILQYREMAKLKGTYIDRLPALVHPKTGRLHTRFNQTATATGRLSSSDPNLQNIPVRTPLGQKIRRAFVAEEGWRLVALDYSQIELRVLAHLSGDENLIRVFQEGKDIHTQTASWMFGLSAEAIDPLMRRAAKTINFGVLYGMSAFRLSQELGIPYEEAQAFIQKYFQSYPKVKAWIEKTLEEGRTRGYVETLFGRRRYVPDLNARVKGKREAAERMAFNMPVQGTAADLMKLAMVRLFPQLREVGARMLLQVHDELLLEAPKERAEEVAALAKEVMEGVWPLAVPLEVEVGIGEDWLAAKG

SEQ ID NO: 3781 - DNA, 2523 bp, synthetic construct
  misc_feature 1..2523: note = Variant of DNA polymerase I from Thermus sp. strain 2.9
  source 1..2523: mol_type = other DNA
atgcaccatcatcatcatcatggcggtagcggcgtgttaccggtgttcgagcctaaaggtcgcgtgcttctggttgatggccatcatctcgcgtatcgtaacttctttgccctgaaaggattaaccaccagcagcggcgagccggtacagggtgtctacggctttgcaaagtcgctcctgaaagctctgaaagaagacggtgatgtggtgattgttgtctttgatgcgaaagcgccaagttttcgccacgaagcgtacgaagcttacaaagccgggcgtgctccaacgccggaagactttcctcgccaattggcgcttatgaaggaattagtggatttgcttggcctcgaacgcttggaagttcccggtttcgaggcagacgacgtattagcgactctcgcaaagaaagccgaacgtgagggctatgaagtccagatcttgacagcagatcgcgatcttttccagcttttatctccgcgcatctcggtgttacacccggaagggcatcgtatcaccccggaatggctctgggagaaatatggtttgcgtcccgaacaatgggtggattttcgcgccttagcaggcgatccgagcgacaatattccgggagttaaaggtatcggcgagaagacggcgctcaagctccttaaagaatgggggtcgttggagaacttgcttaagaatttagatcaggtcaaaccagagtcagtgcgtgagaagattcttgctcacctcgaagacctcaaattaagccgcgaattgtcccgtgtacgcaccgatttgccgctcgaagttgatttccaacgccgccgcgaacctgactgggagggtcttaaagcgtttttagagcgtcttgaatttggttcgctcttgcatgaattcggccttttagaaagcccgttaccagccgaagaagcaccttggccaccgcccgagggcgcgtttttaggttaccgtttgagtcgcccggaaccgatgtgggccgaattactggctcttgcagcgtctgcccagggacgtgtgtatcgcgcggaagaccctcatggtgcgctccgcggcctcttcgaagtccgtggactccttgccaaagacttagctgttgttgcattgcgcgaaggtcttgatttacctccgactgatgatccaatgcttcttgcgtacctcttggacccgtcaaacacgacgcccgaaggcgtagcccgtcgttacggcggcgagtggaccgaagatgcagcgaaacgcgcgttattggccgaacgtttgcacgtgaatttattaggacgtttgcaaggcgaggaacgtctcctctggctttacgaagaagtggagaaaccattgagtcgcgtgctcgcgcatatggaagctaccggtgtcaaattagacgtggcgtatttggagaatctcagccttgaagttgctgcccacatgcgccgcttggaggaagaagtattccgtttagcaggccgttcctttcgccttaattctcgcgatcagttagaacgtgtgttgttcgatgaacttggtctccctcctatcggcaagacagagaagaccggtaaacgtagcacttcagcggcggttttagaagctcttcgcgaagtccatcccattgtggacaagatcttgcaataccgcgaactcgcgaaattgaaaggcacctatattgaccgtcttccggcattagtccacccgaaaacgggacgcctccatacccgcttcaaccaaacagccacggcgaccggtcgtttgtcctcctctgatccaaaccttcagaatattccagtacgtaccccattgggccagaagatccgccgtgcgtttgtagctgaggagggttggcgtttagtggccctcgattatagccaaattgaattacgtgtccttgcccatctttctggcgatgagaacctcatccgcgtgtttcaggaaggcaaagacattcacactcaaacggcaagctggatgtttggattatcagctgaagcgatcgatcctttgatgcgtcgtgcagcgaagaccatcaatttcggtgttctctacggtatgagtgcctttcgtttgtcgcaggaattaggcattccctatgaagaagctcaggcgttcattcagaaatactttcaaagctatcccaaagttaaagcatggatcgagaagactctcgaagaaggccgcacacgtggttacgtagagaccttatttggacgtcgccgctatgttcccgatttaaacgctcgcgtgaaaggcaagcgtgaagccgccgaacgcatggcgttcaacatgcctgtacagggcacggcagctgacctcatgaaacttgcaatggtgcgcctttttccacaattgcgtgaagttggtgcccgcatgctcttgcaggtccacgatgaactcttgttagaagcgccaaaagagcgtgcggaagaggtggcagccctcgcgaaagaagttatggaaggcgtgtggcccttagcggtgcctcttgaagtcgaagttggtattggcgaggattggctggctgccaaagga

SEQ ID NO: 3782 - protein, 841 aa, synthetic construct
  REGION 1..841: note = Variant of DNA polymerase I from Thermus sp. strain 2.9
MHHHHHHGGSGVLPVFEPKGRVLLVDGHHLAYRNFFALKGLTTSSGEPVQGVYGFAKSLLKALKEDGDVVIVVFDAKAPSFRHEAYEAYKAGRAPTPEDFPRQLALMKELVDLLGLERLEVPGFEADDVLATLAKKAEREGYEVQILTADRDLFQLLSPRISVLHPEGHRITPEWLWEKYGLRPEQWVDFRALAGDPSDNIPGVKGIGEKTALKLLKEWGSLENLLKNLDQVKPESVREKILAHLEDLKLSRELSRVRTDLPLEVDFQRRREPDWEGLKAFLERLEFGSLLHEFGLLESPLPAEEAPWPPPEGAFLGYRLSRPEPMWAELLALAASAQGRVYRAEDPHGALRGLFEVRGLLAKDLAVVALREGLDLPPTDDPMLLAYLLDPSNTTPEGVARRYGGEWTEDAAKRALLAERLHVNLLGRLQGEERLLWLYEEVEKPLSRVLAHMEATGVKLDVAYLENLSLEVAAHMRRLEEEVFRLAGRSFRLNSRDQLERVLFDELGLPPIGKTEKTGKRSTSAAVLEALREVHPIVDKILQYRELAKLKGTYIDRLPALVHPKTGRLHTRFNQTATATGRLSSSDPNLQNIPVRTPLGQKIRRAFVAEEGWRLVALDYSQIELRVLAHLSGDENLIRVFQEGKDIHTQTASWMFGLSAEAIDPLMRRAAKTINFGVLYGMSAFRLSQELGIPYEEAQAFIQKYFQSYPKVKAWIEKTLEEGRTRGYVETLFGRRRYVPDLNARVKGKREAAERMAFNMPVQGTAADLMKLAMVRLFPQLREVGARMLLQVHDELLLEAPKERAEEVAALAKEVMEGVWPLAVPLEVEVGIGEDWLAAKG

SEQ ID NO: 3783 - DNA, 2523 bp, synthetic construct
  misc_feature 1..2523: note = Variant of DNA polymerase I from Thermus sp. strain 2.9
  source 1..2523: mol_type = other DNA
atgcaccatcatcatcatcatggcggtagcggcgtgttaccggtgttcgagcctaaaggtcgcgtgcttctggttgatggccatcatctcgcgtatcgtaacttctttgccctgaaaggattaaccaccagcagcggcgagccggtacagggtgtctacggctttgcaaagtcgctcctgaaagctctgaaagaagacggtgatgtggtgattgttgtctttgatgcgaaagcgccaagttttcgccacgaagcgtacgaagcttacaaagccgggcgtgctccaacgccggaagactttcctcgccaattggggcttatgaaggaattagtggatttgcttggcctcgaacgcttggaagttcccggtttcgaggcagacgacgtattagcgactctcgcaaagaaagccgaacgtgagggctatgaagtccagatcttgacagcagatcgcgatcttttccagcttttatctccgcgcatctcggtgttacacccggaagggcatcgtatcaccccggaatggctctgggagaaatatggtttgcgtcccgaacaatgggtggattttcgcgccttagcaggcgatccgagcgacaatattccgggagttaaaggtatcggcgagaagacggcgctcaagctccttaaagaatgggggtcgttggagaacttgcttaagaatttagatcaggtcaaaccagagtcagtgcgtgagaagattcttgctcacctcgaagacctcaaattaagccgcgaattgtcccgtgtacgcaccgatttgccgctcgaagttgatttccaacgccgccgcgaacctgactgggagggtcttaaagcgtttttagagcgtcttgaatttggttcgctcttgcatgaattcggccttttagaaagcccgttaccagccgaagaagcaccttggccaccgcccgagggcgcgtttttaggttaccgtttgagtcgcccggaaccgatgtgggccgaattactggctcttgcagcgtctgcccagggacgtgtgtatcgcgcggaagaccctcatggtgcgctccgcggcctcttcgaagtccgtggactccttgccaaagacttagctgttgttgcattgcgcgaaggtcttgatttacctccgactgatgatccaatgcttcttgcgtacctcttggacccgtcaaacacgacgcccgaaggcgtagcccgtcgttacggcggcgagtggaccgaagatgcagcgaaacgcgcgttattggccgaacgtttgcacgccaatttattaggacgtttgcaaggcgaggaacgtctcctctggctttacgaagaagtggagaaaccattgagtcgcgtgctcgcgcatatggaagctaccggtgtcaaattagacgtggcgtatttggagaatctcagccttgaagttgctgcccacatgcgccgcttggaggaagaagtattccgtttagcaggccgttcctttcgccttaattctcgcgatcagttagaacgtgtgttgttcgatgaacttggtctccctcctatcggcaagacagagaagaccggtaaacgtagcacttcagcggcggttttagaagctcttcgcgaagtccatcccattgtggacaagatcttgcaataccgcgaactcgcgaaattgaaaggcacctatattgaccgtcttccggcattagtccacccgaaaacgggacgcctccatacccgcttcaaccaaacagccacggcgaccggtcgtttgtcctcctctgatccaaaccttcagaatattccagtacgtaccccattgggccagaagatccgccgtgcgtttgtagctgaggagggttggcgtttagtggccctcgattatagccaaattgaattacgtgtccttgcccatctttctggcgatgagaacctcatccgcgtgtttcaggaaggcaaagacattcacactcaaacggcaagctggatgtttggattatcagctgaagcgatcgatcctttgatgcgtcgtgcagcgaagaccatcaatttcggtgttctctacggtatgagtgcctttcgtttgtcgcaggaattaggcattccctatgaagaagctcaggcgttcattcagaaatactttcaaagctatcccaaagttaaagcatggatcgagaagactctcgaagaaggccgcacacgtggttacgtagagaccttatttggacgtcgccgctatgttcccgatttaaacgctcgcgtgaaaggcaagcgtgaagccgccgaacgcatggcgttcaacatgcctgtacagggcacggcagctgacctcatgaaacttgcaatggtgcgcctttttccacaattgcgtgaagttggtgcccgcatgctcttgcaggtccacgatgaactcttgttagaagcgccaaaagagcgtgcggaagaggtggcagccctcgcgaaagaagttatggaaggcgtgtggcccttagcggtgcctcttgaagtcgaagttggtattggcgaggattggctggctgccaaagga

SEQ ID NO: 3784 - protein, 841 aa, synthetic construct
  REGION 1..841: note = Variant of DNA polymerase I from Thermus sp. strain 2.9
MHHHHHHGGSGVLPVFEPKGRVLLVDGHHLAYRNFFALKGLTTSSGEPVQGVYGFAKSLLKALKEDGDVVIVVFDAKAPSFRHEAYEAYKAGRAPTPEDFPRQLGLMKELVDLLGLERLEVPGFEADDVLATLAKKAEREGYEVQILTADRDLFQLLSPRISVLHPEGHRITPEWLWEKYGLRPEQWVDFRALAGDPSDNIPGVKGIGEKTALKLLKEWGSLENLLKNLDQVKPESVREKILAHLEDLKLSRELSRVRTDLPLEVDFQRRREPDWEGLKAFLERLEFGSLLHEFGLLESPLPAEEAPWPPPEGAFLGYRLSRPEPMWAELLALAASAQGRVYRAEDPHGALRGLFEVRGLLAKDLAVVALREGLDLPPTDDPMLLAYLLDPSNTTPEGVARRYGGEWTEDAAKRALLAERLHANLLGRLQGEERLLWLYEEVEKPLSRVLAHMEATGVKLDVAYLENLSLEVAAHMRRLEEEVFRLAGRSFRLNSRDQLERVLFDELGLPPIGKTEKTGKRSTSAAVLEALREVHPIVDKILQYRELAKLKGTYIDRLPALVHPKTGRLHTRFNQTATATGRLSSSDPNLQNIPVRTPLGQKIRRAFVAEEGWRLVALDYSQIELRVLAHLSGDENLIRVFQEGKDIHTQTASWMFGLSAEAIDPLMRRAAKTINFGVLYGMSAFRLSQELGIPYEEAQAFIQKYFQSYPKVKAWIEKTLEEGRTRGYVETLFGRRRYVPDLNARVKGKREAAERMAFNMPVQGTAADLMKLAMVRLFPQLREVGARMLLQVHDELLLEAPKERAEEVAALAKEVMEGVWPLAVPLEVEVGIGEDWLAAKG

SEQ ID NO: 3785 - DNA, 2523 bp, synthetic construct
  misc_feature 1..2523: note = Variant of DNA polymerase I from Thermus sp. strain 2.9
  source 1..2523: mol_type = other DNA
atgcaccatcatcatcatcatggcggtagcggcgtgttaccggtgttcgagcctaaaggtcgcgtgcttctggttgatggccatcatctcgcgtatcgtaacttctttgccctgaaaggattaaccaccagcagcggcgagccggtacagggtgtctacggctttgcaaagtcgctcctgaaagctctgaaagaagacggtgatgtggtgattgttgtctttgatgcgaaagcgccaagttttcgccacgaagcgtacgaagcttacaaagccgggcgtgctccaacgccggaaacttttcctcgccaattggcgcttatgaaggaattagtggatttgcttggcctcgaacgcttggaagttcccggtttcgaggcagacgacgtattagcgactctcgcaaagaaagccgaacgtgagggctatgaagtccagatcttgacagcagatcgcgatcttttccagcttttatctccgcgcatctcggtgttacacccggaagggcatcgtatcaccccggaatggctctgggagaaatatggtttgcgtcccgaacaatgggtggattttcgcgccttagcaggcgatccgagcgacaatattccgggagttaaaggtatcggcgagaagacggcgctcaagctccttaaagaatgggggtcgttggagaacttgcttaagaatttagatcaggtcaaaccagagtcagtgcgtgagaagattcttgctcacctcgaagacctcaaattaagccgcgaattgtcccgtgtacgcaccgatttgccgctcgaagttgatttccaacgccgccgcgaacctgactgggagggtcttaaagcgtttttagagcgtcttgaatttggttcgctcttgcatgaattcggccttttagaaagcccgttaccagccgaagaagcaccttggccaccgcccgagggcgcgtttttaggttaccgtttgagtcgcccggaaccgatgtgggccgaattactggctcttgcagcgtctgcccagggacgtgtgtatcgcgcggaagaccctcatggtgcgctccgcggcctcttcgaagtccgtggactccttgccaaagacttagctgttgttgcattgcgcgaaggtcttgatttacctccgactgatgatccaatgcttcttgcgtacctcttggacccgtcaaacacgacgcccgaaggcgtagcccgtcgttacggcggcgagtggaccgaagatgcagcgaaacgcgcgttattggccgaacgtttgcacgccaatttattaggacgtttgcaaggcgaggaacgtctcctctggctttacgaagaagtggagaaaccattgagtcgcgtgctcgcgcatatggaagctaccggtgtcaaattagacgtggcgtatttggagaatctcagccttgaagttgctgcccacatgcgccgcttggaggaagaagtattccgtttagcaggccgttcctttcgccttaattctcgcgatcagttagaacgtgtgttgttcgatgaacttggtctccctcctatcggcaagacagagaagaccggtaaacgtagcacttcagcggcggttttagaagctcttcgcgaagtccatcccattgtggacaagatcttgcaataccgcgaactcgcgaaattgaaaggcacctatattgaccgtcttccggcattagtccacccgaaaacgggacgcctccatacccgcttcaaccaaacagccacggcgaccggtcgtttgtcctcctctgatccaaaccttcagaatattccagtacgtaccccattgggccagaagatccgccgtgcgtttgtagctgaggagggttggcgtttagtggccctcgattatagccaaattgaattacgtgtccttgcccatctttctggcgatgagaacctcatccgcgtgtttcaggaaggcaaagacattcacactcaaacggcaagctggatgtttggattatcagctgaagcgatcgatcctttgatgcgtcgtgcagcgaagaccatcaatttcggtgttctctacggtatgagtgcctttcgtttgtcgcaggaattaggcattccctatgaagaagctcaggcgttcattcagaaatactttcaaagctatcccaaagttaaagcatggatcgagaagactctcgaagaaggccgcacacgtggttacgtagagaccttatttggacgtcgccgctatgttcccgatttaaacgctcgcgtgaaaggcaagcgtgaagccgccgaacgcatggcgttcaacatgcctgtacagggcacggcagctgacctcatgaaacttgcaatggtgcgcctttttccacaattgcgtgaagttggtgcccgcatgctcttgcaggtccacgatgaactcttgttagaagcgccaaaagagcgtgcggaagaggtggcagccctcgcgaaagaagttatggaaggcgtgtggcccttagcggtgcctcttgaagtcgaagttggtattggcgaggattggctggctgccaaagga

SEQ ID NO: 3786 - protein, 841 aa, synthetic construct; identical to SEQ ID NO: 3288
  REGION 1..841: note = Variant of DNA polymerase I from Thermus sp. strain 2.9

SEQ ID NO: 3787 - DNA, 2523 bp, synthetic construct
  misc_feature 1..2523: note = Variant of DNA polymerase I from Thermus sp. strain 2.9
  source 1..2523: mol_type = other DNA
atgcaccatcatcatcatcatggcggtagcggcgtgttaccggtgttcgagcctaaaggtcgcgtgcttctggttgatggccatcatctcgcgtatcgtaacttctttgccctgaaaggattaaccaccagcagcggcgagccggtacagggtgtctacggctttgcaaagtcgctcctgaaagctctgaaagaagacggtgatgtggtgattgttgtctttgatgcgaaagcgccaagttttcgccacgaagcgtacgaagcttacaaagccgggcgtgctccaacgccggaagactttcctcgccaattggcgcttatgaaggaattagtggatttgcttggcctcgaacgcttggaagttcccggtttcgaggcagacgacgtattagcgactctcgcaaagaaagccgaacgtgagggctatgaagtccagatcttgacagcagatcgcgatcttttccagcttttatctccgcgcatctcggtgttacacccggaagggcatcgtatcaccccggaatggctctgggagaaatatggtttgcgtcccgaacaatgggtggattttcgcgccttagcaggcgatccgagcgacaatattccgggagttaaaggtatcggcgagaagacggcgctcaagctccttaaagaatgggggtcgttggagaacttgcttaagaatttagatcaggtcaaaccagagtcagtgcgtgagaagattcttgctcacctcgaagacctcaaattaagccgcgaattgtcccgtgtacgcaccgatttgccgctcgaagttgatttccaacgccgccgcgaacctgactgggagggtcttaaagcgtttttagagcgtcttgaatttggttcgctcttgcatgaattcggccttttagaaaagccgttaccagccgaagaagcaccttggccaccgcccgagggcgcgtttttaggttaccgtttgagtcgcccggaaccgatgtgggccgaattactggctcttgcagcgtctgcccagggacgtgtgtatcgcgcggaagaccctcatggtgcgctccgcggcctcttcgaagtccgtggactccttgccaaagacttagctgttgttgcattgcgcgaaggtcttgatttacctccgactgatgatccaatgcttcttgcgtacctcttggacccgtcaaacacgacgcccgaaggcgtagcccgtcgttacggcggcgagtggaccgaagatgcagcgaaacgcgcgttattggccgaacgtttgcacgccaatttattaggacgtttgcaaggcgaggaacgtctcctctggctttacgaagaagtggagaaaccattgagtcgcgtgctcgcgcatatggaagctaccggtgtcaaattagacgtggcgtatttggagaatctcagccttgaagttgctgcccacatgcgccgcttggaggaagaagtattccgtttagcaggccgttcctttcgccttaattctcgcgatcagttagaacgtgtgttgttcgatgaacttggtctccctcctatcggcaagacagagaagaccggtaaacgtagcacttcagcggcggttttagaagctcttcgcgaagtccatcccattgtggacaagatcttgcaataccgcgaactcgcgaaattgaaaggcacctatattgaccgtcttccggcattagtccacccgaaaacgggacgcctccatacccgcttcaaccaaacagccacggcgaccggtcgtttgtcctcctctgatccaaaccttcagaatattccagtacgtaccccattgggccagaagatccgccgtgcgtttgtagctgaggagggttggcgtttagtggccctcgattatagccaaattgaattacgtgtccttgcccatctttctggcgatgagaacctcatccgcgtgtttcaggaaggcaaagacattcacactcaaacggcaagctggatgtttggattatcagctgaagcgatcgatcctttgatgcgtcgtgcagcgaagaccatcaatttcggtgttctctacggtatgagtgcctttcgtttgtcgcaggaattaggcattccctatgaagaagctcaggcgttcattcagaaatactttcaaagctatcccaaagttaaagcatggatcgagaagactctcgaagaaggccgcacacgtggttacgtagagaccttatttggacgtcgccgctatgttcccgatttaaacgctcgcgtgaaaggcaagcgtgaagccgccgaacgcatggcgttcaacatgcctgtacagggcacggcagctgacctcatgaaacttgcaatggtgcgcctttttccacaattgcgtgaagttggtgcccgcatgctcttgcaggtccacgatgaactcttgttagaagcgccaaaagagcgtgcggaagaggtggcagccctcgcgaaagaagttatggaaggcgtgtggcccttagcggtgcctcttgaagtcgaagttggtattggcgaggattggctggctgccaaagga

SEQ ID NO: 3788 - protein, 841 aa, synthetic construct
  REGION 1..841: note = Variant of DNA polymerase I from Thermus sp. strain 2.9
MHHHHHHGGSGVLPVFEPKGRVLLVDGHHLAYRNFFALKGLTTSSGEPVQGVYGFAKSLLKALKEDGDVVIVVFDAKAPSFRHEAYEAYKAGRAPTPEDFPRQLALMKELVDLLGLERLEVPGFEADDVLATLAKKAEREGYEVQILTADRDLFQLLSPRISVLHPEGHRITPEWLWEKYGLRPEQWVDFRALAGDPSDNIPGVKGIGEKTALKLLKEWGSLENLLKNLDQVKPESVREKILAHLEDLKLSRELSRVRTDLPLEVDFQRRREPDWEGLKAFLERLEFGSLLHEFGLLEKPLPAEEAPWPPPEGAFLGYRLSRPEPMWAELLALAASAQGRVYRAEDPHGALRGLFEVRGLLAKDLAVVALREGLDLPPTDDPMLLAYLLDPSNTTPEGVARRYGGEWTEDAAKRALLAERLHANLLGRLQGEERLLWLYEEVEKPLSRVLAHMEATGVKLDVAYLENLSLEVAAHMRRLEEEVFRLAGRSFRLNSRDQLERVLFDELGLPPIGKTEKTGKRSTSAAVLEALREVHPIVDKILQYRELAKLKGTYIDRLPALVHPKTGRLHTRFNQTATATGRLSSSDPNLQNIPVRTPLGQKIRRAFVAEEGWRLVALDYSQIELRVLAHLSGDENLIRVFQEGKDIHTQTASWMFGLSAEAIDPLMRRAAKTINFGVLYGMSAFRLSQELGIPYEEAQAFIQKYFQSYPKVKAWIEKTLEEGRTRGYVETLFGRRRYVPDLNARVKGKREAAERMAFNMPVQGTAADLMKLAMVRLFPQLREVGARMLLQVHDELLLEAPKERAEEVAALAKEVMEGVWPLAVPLEVEVGIGEDWLAAKG

SEQ ID NO: 3789 - DNA, 2523 bp, synthetic construct
  misc_feature 1..2523: note = Variant of DNA polymerase I from Thermus sp. strain 2.9
  source 1..2523: mol_type = other DNA
atgcaccatcatcatcatcatggcggtagcggcgtgttaccggtgttcgagcctaaaggtcgcgtgcttctggttgatggccatcatctcgcgtatcgtaacttctttgccctgaaaggattaaccaccagcagcggcgagccggtacagggtgtctacggctttgcaaagtcgctcctgaaagctctgaaagaagacggtgatgtggtgattgttgtctttgatgcgaaagcgccaagttttcgccacgaagcgtacgaagcttacaaagccgggcgtgctccaacgccggaagactttcctcgccaattggcgcttatgaaggaattagtggatttgcttggcctcgaacgcttggaagttcccggtttcgaggcagacgacgtattagcgactctcgcaaagaaagccgaacgtgagggctatgaagtccagatcttgacagcagatcgcgatcttttccagcttttatctccgcgcatctcggtgttacacccggaagggcatcgtatcaccccggaatggctctgggagaaatatggtttgcgtcccgaacaatgggtggattttcgcgccttagcaggcgatccgagcgacaatattccgggagttaaaggtatcggcgagaagacggcgctcaagctccttaaagaatgggggtcgttggagaacttgcttaagaatttagatcaggtcaaaccagagtcagtgcgtgagaagattcttgctcacctcgaagacctcaaattaagccgcgaattgtcccgtgtacgcaccgatttgccgctcgaagttgatttccaacgccgccgcgaacctgactgggagggtcttaaagcgtttttagagcgtcttgaatttggttcgctcttgcatgaattcggccttttagaaagcccgttaccagccgaagaagcaccttggccaccgcccgagggcgcgtttttaggttaccgtttgagtcgcccggaaccgatgtgggccgaattactggctcttgcagcgtctgcccagggacgtgtgtatcgcgcggaagaccctcatggtgcgctccgcggcctcttcgaagtccgtggactccttgccaaagacttagctgttgttgcattgcgcgaaggtcttgatttacctccgactgatgatccaatgcttcttgcgtacctcttggacccgtcaaacacgacgcccgaaggcgtagcccgtcgttacggcggcgagtggaccgaagatgcagcgaaacgcgcgttattggccgaacgtttgcaccggaatttattaggacgtttgcaaggcgaggaacgtctcctctggctttacgaagaagtggagaaaccattgagtcgcgtgctcgcgcatatggaagctaccggtgtcaaattagacgtggcgtatttggagaatctcagccttgaagttgctgcccacatgcgccgcttggaggaagaagtattccgtttagcaggccgttcctttcgccttaattctcgcgatcagttagaacgtgtgttgttcgatgaacttggtctccctcctatcggcaagacagagaagaccggtaaacgtagcacttcagcggcggttttagaagctcttcgcgaagtccatcccattgtggacaagatcttgcaataccgcgaactcgcgaaattgaaaggcacctatattgaccgtcttccggcattagtccacccgaaaacgggacgcctccatacccgcttcaaccaaacagccacggcgaccggtcgtttgtcctcctctgatccaaaccttcagaatattccagtacgtaccccattgggccagaagatccgccgtgcgtttgtagctgaggagggttggcgtttagtggccctcgattatagccaaattgaattacgtgtccttgcccatctttctggcgatgagaacctcatccgcgtgtttcaggaaggcaaagacattcacactcaaacggcaagctggatgtttggattatcagctgaagcgatcgatcctttgatgcgtcgtgcagcgaagaccatcaatttcggtgttctctacggtatgagtgcctttcgtttgtcgcaggaattaggcattccctatgaagaagctcaggcgttcattcagaaatactttcaaagctatcccaaagttaaagcatggatcgagaagactctcgaagaaggccgcacacgtggttacgtagagaccttatttggacgtcgccgctatgttcccgatttaaacgctcgcgtgaaaggcaagcgtgaagccgccgaacgcatggcgttcaacatgcctgtacagggcacggcagctgacctcatgaaacttgcaatggtgcgcctttttccacaattgcgtgaagttggtgcccgcatgctcttgcaggtccacgatgaactcttgttagaagcgccaaaagagcgtgcggaagaggtggcagccctcgcgaaagaagttatggaaggcgtgtggcccttagcggtgcctcttgaagtcgaagttggtattggcgaggattggctggctgccaaagga

SEQ ID NO: 3790 - protein, 841 aa, synthetic construct
  REGION 1..841: note = Variant of DNA polymerase I from Thermus sp. strain 2.9
MHHHHHHGGSGVLPVFEPKGRVLLVDGHHLAYRNFFALKGLTTSSGEPVQGVYGFAKSLLKALKEDGDVVIVVFDAKAPSFRHEAYEAYKAGRAPTPEDFPRQLALMKELVDLLGLERLEVPGFEADDVLATLAKKAEREGYEVQILTADRDLFQLLSPRISVLHPEGHRITPEWLWEKYGLRPEQWVDFRALAGDPSDNIPGVKGIGEKTALKLLKEWGSLENLLKNLDQVKPESVREKILAHLEDLKLSRELSRVRTDLPLEVDFQRRREPDWEGLKAFLERLEFGSLLHEFGLLESPLPAEEAPWPPPEGAFLGYRLSRPEPMWAELLALAASAQGRVYRAEDPHGALRGLFEVRGLLAKDLAVVALREGLDLPPTDDPMLLAYLLDPSNTTPEGVARRYGGEWTEDAAKRALLAERLHRNLLGRLQGEERLLWLYEEVEKPLSRVLAHMEATGVKLDVAYLENLSLEVAAHMRRLEEEVFRLAGRSFRLNSRDQLERVLFDELGLPPIGKTEKTGKRSTSAAVLEALREVHPIVDKILQYRELAKLKGTYIDRLPALVHPKTGRLHTRFNQTATATGRLSSSDPNLQNIPVRTPLGQKIRRAFVAEEGWRLVALDYSQIELRVLAHLSGDENLIRVFQEGKDIHTQTASWMFGLSAEAIDPLMRRAAKTINFGVLYGMSAFRLSQELGIPYEEAQAFIQKYFQSYPKVKAWIEKTLEEGRTRGYVETLFGRRRYVPDLNARVKGKREAAERMAFNMPVQGTAADLMKLAMVRLFPQLREVGARMLLQVHDELLLEAPKERAEEVAALAKEVMEGVWPLAVPLEVEVGIGEDWLAAKG

SEQ ID NO: 3791 - DNA, 2523 bp, synthetic construct
  misc_feature 1..2523: note = Variant of DNA polymerase I from Thermus sp. strain 2.9
  source 1..2523: mol_type = other DNA
atgcaccatcatcatcatcatggcggtagcggcgtgttaccggtgttcgagcctaaaggtcgcgtgcttctggttgatggccatcatctcgcgtatcgtaacttctttgccctgaaaggattaaccaccagcagcggcgagccggtacagggtgtctacggctttgcaaagtcgctcctgaaagctctgaaagaagacggtgatgtggtgattgttgtctttgatgcgaaagcgccaagttttcgccacgaagcgtacgaagcttacaaagccgggcgtgctccaacgccggaagactttcctcgccaattggcgcttatgaaggaattagtggatttgcttggcctcgaacgcttggaagttcccggtttcgaggcagacgacgtattagcgactctcgcaaagaaagccgaacgtgagggctatgaagtccagatcttgacagcagatcgcgatcttttccagcttttatctccgcgcatctcggtgttacacccggaagggcatcgtatcaccccggaatggctctgggagaaatatggtttgcgtcccgaacaatgggtggattttcgcgccttagcaggcgatccgagcgacaatattccgggagttaaaggtatcggcgagaagacggcgctcaagctccttaaagaatgggggtcgttggagaacttgcttaagaatttagatcaggtcaaaccagagtcagtgcgtgagaagattcttgctcacctcgaagacctcaaattaagccgcgaattgtcccgtgtacgcaccgatttgccgctcgaagttgatttccaacgccgccgcgaacctgactgggagggtcttaaagcgtttttagagcgtcttgaatttggttcgctcttgcatgaattcggccttttagaaagcccgttaccagccgaagaagcaccttggccaccgcccgagggcgcgtttttaggttaccgtttgagtcgcccggaaccgatgtgggccgaattactggctcttgcagcgtctgcccagggacgtgtgtatcgcgcggaagaccctcatggtgcgctccgcggcctcttcgaagtccgtggactccttgccaaagacttagctgttgttgcaacgcgcgaaggtcttgatttacctccgactgatgatccaatgcttcttgcgtacctcttggacccgtcaaacacgacgcccgaaggcgtagcccgtcgttacggcggcgagtggaccgaagatgcagcgaaacgcgcgttattggccgaacgtttgcacgccaatttattaggacgtttgcaaggcgaggaacgtctcctctggctttacgaagaagtggagaaaccattgagtcgcgtgctcgcgcatatggaagctaccggtgtcaaattagacgtggcgtatttggagaatctcagccttgaagttgctgcccacatgcgccgcttggaggaagaagtattccgtttagcaggccgttcctttcgccttaattctcgcgatcagttagaacgtgtgttgttcgatgaacttggtctccctcctatcggcaagacagagaagaccggtaaacgtagcacttcagcggcggttttagaagctcttcgcgaagtccatcccattgtggacaagatcttgcaataccgcgaactcgcgaaattgaaaggcacctatattgaccgtcttccggcattagtccacccgaaaacgggacgcctccatacccgcttcaaccaaacagccacggcgaccggtcgtttgtcctcctctgatccaaaccttcagaatattccagtacgtaccccattgggccagaagatccgccgtgcgtttgtagctgaggagggttggcgtttagtggccctcgattatagccaaattgaattacgtgtccttgcccatctttctggcgatgagaacctcatccgcgtgtttcaggaaggcaaagacattcacactcaaacggcaagctggatgtttggattatcagctgaagcgatcgatcctttgatgcgtcgtgcagcgaagaccatcaatttcggtgttctctacggtatgagtgcctttcgtttgtcgcaggaattaggcattccctatgaagaagctcaggcgttcattcagaaatactttcaaagctatcccaaagttaaagcatggatcgagaagactctcgaagaaggccgcacacgtggttacgtagagaccttatttggacgtcgccgctatgttcccgatttaaacgctcgcgtgaaaggcaagcgtgaagccgccgaacgcatggcgttcaacatgcctgtacagggcacggcagctgacctcatgaaacttgcaatggtgcgcctttttccacaattgcgtgaagttggtgcccgcatgctcttgcaggtccacgatgaactcttgttagaagcgccaaaagagcgtgcggaagaggtggcagccctcgcgaaagaagttatggaaggcgtgtggcccttagcggtgcctcttgaagtcgaagttggtattggcgaggattggctggctgccaaagga

SEQ ID NO: 3792 - protein, 841 aa, synthetic construct
  REGION 1..841: note = Variant of DNA polymerase I from Thermus sp. strain 2.9
MHHHHHHGGSGVLPVFEPKGRVLLVDGHHLAYRNFFALKGLTTSSGEPVQGVYGFAKSLLKALKEDGDVVIVVFDAKAPSFRHEAYEAYKAGRAPTPEDFPRQLALMKELVDLLGLERLEVPGFEADDVLATLAKKAEREGYEVQILTADRDLFQLLSPRISVLHPEGHRITPEWLWEKYGLRPEQWVDFRALAGDPSDNIPGVKGIGEKTALKLLKEWGSLENLLKNLDQVKPESVREKILAHLEDLKLSRELSRVRTDLPLEVDFQRRREPDWEGLKAFLERLEFGSLLHEFGLLESPLPAEEAPWPPPEGAFLGYRLSRPEPMWAELLALAASAQGRVYRAEDPHGALRGLFEVRGLLAKDLAVVATREGLDLPPTDDPMLLAYLLDPSNTTPEGVARRYGGEWTEDAAKRALLAERLHANLLGRLQGEERLLWLYEEVEKPLSRVLAHMEATGVKLDVAYLENLSLEVAAHMRRLEEEVFRLAGRSFRLNSRDQLERVLFDELGLPPIGKTEKTGKRSTSAAVLEALREVHPIVDKILQYRELAKLKGTYIDRLPALVHPKTGRLHTRFNQTATATGRLSSSDPNLQNIPVRTPLGQKIRRAFVAEEGWRLVALDYSQIELRVLAHLSGDENLIRVFQEGKDIHTQTASWMFGLSAEAIDPLMRRAAKTINFGVLYGMSAFRLSQELGIPYEEAQAFIQKYFQSYPKVKAWIEKTLEEGRTRGYVETLFGRRRYVPDLNARVKGKREAAERMAFNMPVQGTAADLMKLAMVRLFPQLREVGARMLLQVHDELLLEAPKERAEEVAALAKEVMEGVWPLAVPLEVEVGIGEDWLAAKG

SEQ ID NO: 3793 - DNA, 2523 bp, synthetic construct
  misc_feature 1..2523: note = Variant of DNA polymerase I from Thermus sp. strain 2.9
  source 1..2523: mol_type = other DNA
atgcaccatcatcatcatcatggcggtagcggcgtgttacctgtgttcgagcctaaaggtcgcgtgcttctggttgatggccatcatctcgcgtatcgtaacttctttgccctgaaaggattaaccaccagcagcggcgagccggtacagggtgtctacggctttgcaaagtcgctcctgaaagctctgaaagaagacggtgatgtggtgattgttgtctttgatgcgaaagcgccaagttttcgccacgaagcgtacgaagcttacaaagccgggcgtgctccaacgccggaagactttcctcgccaattggcgcttatgaaggaattagtggatttgcttggcctcgaacgcttggaagttcccggtttcgaggcagacgacgtattagcgactctcgcaaagaaagccgaacgtgagggctatgaagtccagatcttgacagcagatcgcgatcttttccagcttttatctccgcgcatctcggtgttacacccggatgggcatcgtatcaccccggaatggctctgggagaaatatggtttgcgtcccgaacaatgggtggattttcgcgccttagcaggcgataaaagcgacaatattccgggagttaaaggtatcggcgagaagacggcgctcaagctccttaaagaatgggggtcgttggagaacttgcttaagaatttagatcaggtcaaaccagagtcagtgcgtgagaagattcttgctcacctcgaagacctcaaattaagccgcgaattgtcccgtgtacgcaccgatttgccgctcgaagttgatttccaacgccgccgcgaacctgactgggagggtcttaaagcgtttttagagcgtcttgaatttggttcgctcttgcatgaattcggccttttagaaagcccgttaccagccgaagaagcaccttggccaccgcccgagggcgcgtttttaggttaccgtttgagtcgcccggaaccgatgtgggccgaattactggctcttgcagcgtctgcccagggacgtgtgtatcgcgcggaagaccctcatggtgcgctccgcggcctcttcgaagtccgtggactccttgccaaagacttagctgttgttgcattgcgcgaaggtcttgatttacctccgactgatgatccaatgcttcttgcgtacctcttggacccgtcaaacacgacgcctgaaggcgtagcccgtcgttacggcggcgagtggaccgaagatgcagcgaaacgcgcgttattggccgaacgtttgcacgccaatttattaggacgtttgcaaggcgaggagcgtctcctctggctttacgaagaagtggagaaaccattgagtcgcgtgctcgcgcatatggaagctaccggtgtcaaattagacgtggcgtatttggagaatctcagccttgaagttgctgcccacatgcgccgcttggaggaagaagtattccgtttagcaggccgttcctttcgccttaattctcgcgatcagttagaacgtgtgttgttcgatgaacttggtctccctcctatcggcaagacagagaagaccggtaaacgtagcacttcagcggcggttttagaagctcttcgcgaagtccatcccattgtggacaagatcttgcaataccgcgaactcgcgaaattgaaaggcacctatattgaccgtcttccggcattagtccacccgaaaacgggacgcctccatacccgcttcaaccaaacagccacggcgaccggtcgtttgtcctcctctgatccaaaccttcagaatattccagtacgtaccccgttgggccagaagatccgccgtgcgtttgtagctgaggagggttggcgtttagtggccctcgattatagccaaattgaattacgtgtccttgcccatctttctggcgatgagaacctcatccgcgtgtttcaggaaggcaaagacattcacactcaaacggcaagctggatgtttggattatcagctgaagcgatcgatcctttgatgcgtcgtgcagcgaagaccatcaatttcggtgttctctacggtatgagtgcctttcgtttgtcgcaggaattaggcattccctacgaagaagctcaggcgttcattcagaaatactttcaaagctatcccaaagttaaagcatggatcgagaagactctcgaagaaggccgcacacgtggttacgtagagaccttatttggacgtcgccgctatgttcccgatttaaacgctcgcgtgaaaggcaagcgtgaagccgccgaacgcatggcgttcaacatgcctgtacagggcacggcagctgacctcatgaaacttgcaatggtgcgcctttttccacaattgcgtgaagttggtgcccgcatgctcttgcaggtccacgatgaactcttgttagaagcgccaaaagagcgtgcggaagaggtggcagccctcgcgaaagaagttatggaaggcgtgtggcccttagcggtgcctcttgaagtcgaagttggtattggcgaggattggctggctgccaaagga

SEQ ID NO: 3794 - protein, 841 aa, synthetic construct; identical to SEQ ID NO: 3754
  REGION 1..841: note = Variant of DNA polymerase I from Thermus sp. strain 2.9

SEQ ID NO: 3795 - DNA, 2523 bp, synthetic construct
  misc_feature 1..2523: note = Variant of DNA polymerase I from Thermus sp. strain 2.9
  source 1..2523: mol_type = other DNA
atgcaccatcatcatcatcatggcggtagcggcgtgttaccggtgttcgagcctaaaggtcgcgtgcttctggttgatggccatcatctcgcgtatcgtaacttctttgccctgaaaggattaaccaccagcctgggcgagccggtacagggtgtctacggctttgcaaagtcgctcctgaaagctctgaaagaagacggtgatgtggtgattgttgtctttgatgcgaaagcgccaagttttcgccacgaagcgtacgaagcttacaaagccgggcgtgctccaacgccggaagactttcctcgccaattggcgcttatgaaggaattagtggatttgcttggcctcgaacgcttggaagttcccggtttcgaggcagacgacgtattagcgactctcgcaaagaaagccgaacgtgagggctatgaagtccagatcttgacagcagatcgcgatcttttccagcttttatctccgcgcatctcggtgttacacccggaagggcatcgtatcaccccggaatggctctgggagaaatatggtttgcgtcccgaacaatgggtggattttcgcgccttagcaggcgatccgagcgacaatattccgggagttaaaggtatcggcgagaagacggcgctcaagctccttaaagaatgggggtcgttggagaacttgcttaagaatttagatcaggtcaaaccagagtcagtgcgtgagaagattcttgctcacctcgaagacctcaaattaagccgcgaattgtcccgtgtacgcaccgatttgccgctcgaagttgatttcggtcgccgccgcgaacctgactgggagggtcttaaagcgtttttagagcgtcttgaatttggttcgctcttgcatgaattcggccttttagaaagcccgttactggccgaagaagcaccttggccaccgcccgagggcgcgtttttaggttaccgtttgagtcgcccggaaccgatgtgggccgaattactggctcttgcagcgtctgcccagggacgtgtgtatcgcgcggaagaccctcatggtgcgctccgcggcctcttcgaagtccgtggactccttgccaaagacttagctgttgttgcattgcgcgaaggtcttgatttacctccgactgatgatccaatgcttcttgcgtacctcttggacccgtcaaacacgacgcccgaaggcgtagcccgtcgttacggcggcgagtggaccgaagatgcagcgaaacgcgcgttattggccgaacgtttgcacgccaatttattaggacgtttgcaaggcgaggaacgtctcctctggctttacgaagaagtggagaaaccattgagtcgcgtgctcgcgcatatggaagctaccggtgtcaaattagacgtggcgtatttggagaatctcagccttgaagttgctgcccacatgcgccgcttggaggaagaagtattccgtttagcaggccgttcctttcgccttaactctcgcgatcagttagaacgtgtgttgttcgatgaacttggtctccctcctatcggcaagacagagaagaccggtaaacgtagcacttcagcggcggttttagaagctcttcgcgaagtccatcccattgtggacaagatcttgcagtaccgcgaactcgcgaaattgaaaggcacctatattgaccgtcttccggcattagtccacccgaaaacgggacgcctccatacccgcttcaaccaaacagccacggcgaccggtcgtttgtcctcctctgatccaaaccttcagaatattccagtacgtaccccattgggccagaagatccgccgtgcgtttgtagctgaggagggttggcgtttagtggccctcgattatcgtcaaattgaattacgtgtccttgcccatctttctggcgatgagaacctcatccgcgtgtttcaggaaggcaaagacattcacactcaaacggcaagctggatgtttggattatcagctgaagcgatcgatcctttgatgcgtcgtgcagcgaagaccatcaatttcggtgttctctacggtatgagtgcctttcgtttgtcgcaggaattaggcattccctatgaagaagctcaggcgttcattcagaaatactttcaaagctatcccaaagttaaagcatggatcgagaagactctccgtgaaggccgcacacgtggttacgtagagaccttatttggacgtcgccgctatgttcccgatttaaacgctcgcgtgaaaggcaagcgtgaagccgccgaacgcatggcgttcaacatgcctgtacagggcacggcagctgacctcatgaaacttgcaatggtgcgcctttttccacaattgcgtgaagttggtgcccgcatgctcttgcaggtccacgatgaactcttgttagaagcgccaaaagagcgtgcggaagaggtggcagccctcgcgaaagaagttatggaaggcgtgtggcccttagcggtgcctcttgaagtcgaagttggtattggcgaggattggctggctgccaaagga

SEQ ID NO: 3796 - protein, 841 aa, synthetic construct
  REGION 1..841: note = Variant of DNA polymerase I from Thermus sp. strain 2.9
MHHHHHHGGSGVLPVFEPKGRVLLVDGHHLAYRNFFALKGLTTSLGEPVQGVYGFAKSLLKALKEDGDVVIVVFDAKAPSFRHEAYEAYKAGRAPTPEDFPRQLALMKELVDLLGLERLEVPGFEADDVLATLAKKAEREGYEVQILTADRDLFQLLSPRISVLHPEGHRITPEWLWEKYGLRPEQWVDFRALAGDPSDNIPGVKGIGEKTALKLLKEWGSLENLLKNLDQVKPESVREKILAHLEDLKLSRELSRVRTDLPLEVDFGRRREPDWEGLKAFLERLEFGSLLHEFGLLESPLLAEEAPWPPPEGAFLGYRLSRPEPMWAELLALAASAQGRVYRAEDPHGALRGLFEVRGLLAKDLAVVALREGLDLPPTDDPMLLAYLLDPSNTTPEGVARRYGGEWTEDAAKRALLAERLHANLLGRLQGEERLLWLYEEVEKPLSRVLAHMEATGVKLDVAYLENLSLEVAAHMRRLEEEVFRLAGRSFRLNSRDQLERVLFDELGLPPIGKTEKTGKRSTSAAVLEALREVHPIVDKILQYRELAKLKGTYIDRLPALVHPKTGRLHTRFNQTATATGRLSSSDPNLQNIPVRTPLGQKIRRAFVAEEGWRLVALDYRQIELRVLAHLSGDENLIRVFQEGKDIHTQTASWMFGLSAEAIDPLMRRAAKTINFGVLYGMSAFRLSQELGIPYEEAQAFIQKYFQSYPKVKAWIEKTLREGRTRGYVETLFGRRRYVPDLNARVKGKREAAERMAFNMPVQGTAADLMKLAMVRLFPQLREVGARMLLQVHDELLLEAPKERAEEVAALAKEVMEGVWPLAVPLEVEVGIGEDWLAAKG

SEQ ID NO: 3797 - DNA, 2523 bp, synthetic construct
  misc_feature 1..2523: note = Variant of DNA polymerase I from Thermus sp. strain 2.9
  source 1..2523: mol_type = other DNA
atgcaccatcatcatcatcatggcggtagcggcgtgttaccggtgttcgagcctaaaggtcgcgtgcttctggttgatggccatcatctcgcgtatcgtaacttctttgccctgaaaggattaaccaccagcagcggcgagccggtacagggtgtctacggctttgcaaagtcgctcctgaaagctctgaaagaagacggtgatgtggtgattgttgtctttgatgcgaaagcgccaagttttcgccacgaagcgtacgaagcttacaaagccgggcgtgctccaacgccggaagactttcctcgccaattggcgcttatgaaggaattagtggatttgcttggcctcgaacgcttggaagttcccggtttcgaggcagacgacgtattagcgactctcgcaaagaaagccgaacgtgagggctatgaagtccagatcttgacagcagatcgcgatcttttccagcttttatctccgcgcatctcggtgttacacccggaagggcatcgtatcaccccggaatggctctgggagaaatatggtttgcgtcccgaacaatgggtggattttcgcgccttagcaggcgatccgagcgacaatattccgggagttaaaggtatcggcgagaagacggcgctcaagctccttaaagaatgggggtcgttggagaacttgcttaagaatttagatcaggtcaaaccagagtcagtgcgtgagaagattcttgctcacctcgaagacctcaaattaagccgcgaattgtcccgtgtacgcaccgatttgccgctcgaagttgatttccaacgccgccgcgaacctgactgggagggtcttaaagcgtttttagagcgtcttgaatttggttcgctcttgcatgaattcggccttttagaaagcccgttaccagccgaagaagcaccttggccaccgcccgagggcgcgtttttaggttaccgtttgagtcgcccggaaccgatgtgggccgaattactggctcttgcagcgtctgcccagggacgtgtgtatcgcgcggaagaccctcatactgcgctccgcggcctcttcgaagtccgtggactccttgccaaagacttagctgttgttgcattgcgcgaaggtcttgatttacctccgactgatgatccaatgcttcttgcgtacctcttggacccgtcaaacacgacgcccgaaggcgtagcccgtcgttacggcggcgagtggaccgaagatgcagcgaaacgcgcgttattggccgaacgtttgcacgccaatttattaggacgtttgcaaggcgaggaacgtctcctctggctttacgaagaagtggagaaaccattgagtcgcgtgctcgcgcatatggaagctaccggtgtcaaattagacgtggcgtatttggagaatctcagccttgaagttgctgcccacatgcgccgcttggaggaagaagtattccgtttagcaggccgttcctttcgccttaattctcgcgatcagttagaacgtgtgttgttcgatgaacttggtctccctcctatcggcaagacagagaagaccggtaaacgtagcacttcagcggcggttttagaagctcttcgcgaagtccatcccattgtggacaagatcttgcaataccgcgaactcgcgaaattgaaaggcacctatattgaccgtcttccggcattagtccacccgaaaacgggacgcctccatacccgcttcaaccaaacagccacggcgaccggtcgtttgtcctcctctgatccaaaccttcagaatattccagtacgtaccccattgggccagaagatccgccgtgcgtttgtagctgaggagggttggcgtttagtggccctcgattatagccaaattgaattacgtgtccttgcccatctttctggcgatgagaacctcatccgcgtgtttcaggaaggcaaagacattcacactcaaacggcaagctggatgtttggattatcagctgaagcgatcgatcctttgatgcgtcgtgcagcgaagaccatcaatttcggtgttctctacggtatgagtgcctttcgtttgtcgcaggaattaggcattccctatgaagaagctcaggcgttcattcagaaatactttcaaagctatcccaaagttaaagcatggatcgagaagactctcgaagaaggccgcacacgtggttacgtagagaccttatttggacgtcgccgctatgttcccgatttaaacgctcgcgtgaaaggcaagcgtgaagccgccgaacgcatggcgttcaacatgcctgtacagggcacggcagctgacctcatgaaacttgcaatggtgcgcctttttccacaattgcgtgaagttggtgcccgcatgctcttgcaggtccacgatgaactcttgttagaagcgccaaaagagcgtgcggaagaggtggcagccctcgcgaaagaagttatggaaggcgtgtggcccttagcggtgcctcttgaagtcgaagttggtattggcgaggattggctggctgccaaagga

SEQ ID NO: 3798 - protein, 841 aa, synthetic construct
  REGION 1..841: note = Variant of DNA polymerase I from Thermus sp. strain 2.9
MHHHHHHGGSGVLPVFEPKGRVLLVDGHHLAYRNFFALKGLTTSSGEPVQGVYGFAKSLLKALKEDGDVVIVVFDAKAPSFRHEAYEAYKAGRAPTPEDFPRQLALMKELVDLLGLERLEVPGFEADDVLATLAKKAEREGYEVQILTADRDLFQLLSPRISVLHPEGHRITPEWLWEKYGLRPEQWVDFRALAGDPSDNIPGVKGIGEKTALKLLKEWGSLENLLKNLDQVKPESVREKILAHLEDLKLSRELSRVRTDLPLEVDFQRRREPDWEGLKAFLERLEFGSLLHEFGLLESPLPAEEAPWPPPEGAFLGYRLSRPEPMWAELLALAASAQGRVYRAEDPHTALRGLFEVRGLLAKDLAVVALREGLDLPPTDDPMLLAYLLDPSNTTPEGVARRYGGEWTEDAAKRALLAERLHANLLGRLQGEERLLWLYEEVEKPLSRVLAHMEATGVKLDVAYLENLSLEVAAHMRRLEEEVFRLAGRSFRLNSRDQLERVLFDELGLPPIGKTEKTGKRSTSAAVLEALREVHPIVDKILQYRELAKLKGTYIDRLPALVHPKTGRLHTRFNQTATATGRLSSSDPNLQNIPVRTPLGQKIRRAFVAEEGWRLVALDYSQIELRVLAHLSGDENLIRVFQEGKDIHTQTASWMFGLSAEAIDPLMRRAAKTINFGVLYGMSAFRLSQELGIPYEEAQAFIQKYFQSYPKVKAWIEKTLEEGRTRGYVETLFGRRRYVPDLNARVKGKREAAERMAFNMPVQGTAADLMKLAMVRLFPQLREVGARMLLQVHDELLLEAPKERAEEVAALAKEVMEGVWPLAVPLEVEVGIGEDWLAAKG

SEQ ID NO: 3799 - DNA, 2523 bp, synthetic construct
  misc_feature 1..2523: note = Variant of DNA polymerase I from Thermus sp. strain 2.9
  source 1..2523: mol_type = other DNA
atgcaccatcatcatcatcatggcggtagcggcgtgttaccggtgttcgagcctaaaggtcgcgtgcttctggttgatggccatcatctcgcgtatcgtaacttctttgccctgaaaggattaaccaccagcagcggcgagccggtacagggtgtctacggctttgcaaagtcgctcctgaaagctctgaaagaagacggtgatgtggtgattgttgtctttgatgcgaaagcgccaagttttcgccacgaagcgtacgaagcttacaaagccgggcgtgctccaacgccggaagactttcctcgccaattggcgcttatgaaggaattagtggatttgcttggcctcgaacgcttggaagttcccggtttcgaggcagacgacgtattagcgactctcgcaaagaaagccgaacgtgagggctatgaagtccagatcttgacagcagatcgcgatcttttccagcttttatctccgcgcatctcggtgttacacccggaagggcatcgtatcaccccggaatggctctgggagaaatatggtttgcgtcccgaacaatgggtggattttcgcgccttagcaggcgatccgagcgacaatattccgggagttaaaggtatcggcgagaagacggcgctcaagctccttaaagaatgggggtcgttggagaacttgcttaagaatttagatcaggtcaaaccagagtcagtgcgtgagaagattcttgctcacctcgaagacctcaaattaagccgcgaattgtcccgtgtacgcaccgatttgccgctcgaagttgatttccaacgccgccgcgaacctgactgggagggtcttaaagcgtttttagagcgtcttgaatttggttcgctcttgcatgaattcggccttttagaaagcccgttaccagccgaagaagcaccttggccaccgcccgagggcgcgtttttaggttaccgtttgagtcgcccggaaccgatgtgggccgaattactggctcttgcagcgtctgcccagggacgtgtgtatcgcgcggaagaccctcatggtgcgctccgcggcctcttcgaagtccgtggactccttgccaaagacttagctgttgttgcattgcgcgaaggtcttgatttacctccgactgatgatccaatgcttcttgcgtacctcttggacccgtcaaacacgacgcccgaaggcgtagcccgtcgttacggcggcgagtggaccgaagatgcagcgaaacgcgcgttattggccgaacgtttgcacgccaatttattaggacgtttgcaaggcgaggaacgtctcctctggctttacgaagaagtggagaaaccattgagtcgcgtgctcgcgcatatggaagctaccggtgtcaaattagacgtggcgtatttggagaatctcagccttgaagttgctgcccacatgcgccgcttggaggaagaagtattccgtttagcaggccgttcctttcgccttaattctcgcgatcagttagaacgtgtgttgttcgatgaacttggtctccctcctatcggcaagacagagaagaccggtaaacgtagcacttcagcggcggttttagaagctcttcgcgaagtccatcccattgtggacaagatcttgcaataccgcgaactcgcgaaattgaaaggcacctatattgaccgtcttccggcattagtccacccgaaaacgggacgcctccatacccgcttcaaccaaacagccacggcgaccggtcgtttgtcctcctctgatccaaaccttcagaatattccagtacgtaccccattgggccagaagatccgccgtgcgtttgtagctgaggagggttggcgtttagtggccctcgattatagccaaattgaattacgtgtccttgcccatctttctggcgatgagaacctcatccgcgtgtttcaggaaggcaaagacattcacactcaaacggcaagctggatgtttggattatcagctgaagcgatcgatcctttgatgcgtcgtgcagcgaagaccatcaatttcggtgttctctacggtatgagtgcctttcgtttgtcgcaggaattaggcattccctatgaagaagctcaggcgttcattcagaaatactttcaaagctatcccaaagttaaagcatggatcgagaagactctcgaagaaggccgcacacgtggttacgtagagaccttatttggacgtcgccgctatgttcccgatttaaacgctcgcgtgaaaggcaagcgtgaagccgccgaacgcatggcgttcaacatgcctgtacagggcacggcagctgacctcatgaaacttgcaatggtgcgcctttttccacaattgcgtgaagttggtgcccgcatgctcttgcaggtccacgatgaactcttgttagaagcgccaaaagagcgtgcggaagaggtggcagccctcgcgaaagaagttatggaaggcgtgtggcccttagcggtgcctcttgaagtcgaagttggttttggcgaggattggctggctgccaaagga

SEQ ID NO: 3800 - protein, 841 aa, synthetic construct
  REGION 1..841: note = Variant of DNA polymerase I from Thermus sp. strain 2.9
MHHHHHHGGSGVLPVFEPKGRVLLVDGHHLAYRNFFALKGLTTSSGEPVQGVYGFAKSLLKALKEDGDVVIVVFDAKAPSFRHEAYEAYKAGRAPTPEDFPRQLALMKELVDLLGLERLEVPGFEADDVLATLAKKAEREGYEVQILTADRDLFQLLSPRISVLHPEGHRITPEWLWEKYGLRPEQWVDFRALAGDPSDNIPGVKGIGEKTALKLLKEWGSLENLLKNLDQVKPESVREKILAHLEDLKLSRELSRVRTDLPLEVDFQRRREPDWEGLKAFLERLEFGSLLHEFGLLESPLPAEEAPWPPPEGAFLGYRLSRPEPMWAELLALAASAQGRVYRAEDPHGALRGLFEVRGLLAKDLAVVALREGLDLPPTDDPMLLAYLLDPSNTTPEGVARRYGGEWTEDAAKRALLAERLHANLLGRLQGEERLLWLYEEVEKPLSRVLAHMEATGVKLDVAYLENLSLEVAAHMRRLEEEVFRLAGRSFRLNSRDQLERVLFDELGLPPIGKTEKTGKRSTSAAVLEALREVHPIVDKILQYRELAKLKGTYIDRLPALVHPKTGRLHTRFNQTATATGRLSSSDPNLQNIPVRTPLGQKIRRAFVAEEGWRLVALDYSQIELRVLAHLSGDENLIRVFQEGKDIHTQTASWMFGLSAEAIDPLMRRAAKTINFGVLYGMSAFRLSQELGIPYEEAQAFIQKYFQSYPKVKAWIEKTLEEGRTRGYVETLFGRRRYVPDLNARVKGKREAAERMAFNMPVQGTAADLMKLAMVRLFPQLREVGARMLLQVHDELLLEAPKERAEEVAALAKEVMEGVWPLAVPLEVEVGFGEDWLAAKG

SEQ ID NO: 3801 - DNA, 2523 bp, synthetic construct
  misc_feature 1..2523: note = Variant of DNA polymerase I from Thermus sp. strain 2.9
  source 1..2523: mol_type = other DNA
atgcaccatcatcatcatcatggcggtagcggcgtgttaccggtgttcgagcctaaaggtcgcgtgcttctggttgatggccatcatctcgcgtatcgtaacttctttgccctgaaaggattaaccaccagcagcggcgagccggtacagggtgtctacggctttgcaaagtcgctcctgaaagctctgaaagaagacggtgatgtggtgattgttgtctttgatgcgaaagcgccaagttttcgccacgaagcgtacgaagcttacaaagccgggcgtgctccaacgccggaagactttcctcgccaattggcgcttatgaaggaattagtggatttgcttggcctcgaacgcttggaagttcccggtttcgaggcagacgacgtattagcgactctcgcaaagaaagccgaacgtgagggctatgaagtccagatcttgacagcagatcgcgatcttttccagcttttatctccgcgcatctcggtgttacacccggaagggcatcgtatcaccccggaatggctctgggagaaatatggtttgcgtcccgaacaatgggtggattttcgcgccttagcaggcgatccgagcgacaatattccgggagttaaaggtatcggcgagaagacggcgctcaagctccttaaagaatgggggtcgttggagaacttgcttaagaatttagatcaggtcaaaccagagtcagtgcgtgagaagattcttgctcacctcgaagacctcaaattaagccgcgaattgtcccgtgtacgcaccgatttgccgctcgaagttgatttccaacgccgccgcgaacctgactgggagggtcttaaagcgtttttagagcgtcttgaatttggttcgctcttgcatgaattcggccttttagaaagcccgttaccagccgaagaagcaccttggccaccgcccgagggcgcgtttttaggttaccgtttgagtcgcccggaaccgatgtgggccgaattactggctcttgcagcgtctgcccagggacgtgtgtatcgcgcggaagaccctcatggtgcgctccgcggcctcttcgaagtccgtggactccttgccaaagacttagctgttgttgcattgcgcgaaggtcttgatttacctccgactgatgatccaatgcttcttgcgtacctcttggacccgtcaaacacgacgcccgaaggcgtagcccgtcgttacggcggcgagtggaccgaagatgcagcgaaacgcgcgttattggccgaacgtttgcacgccaatttattaggacgtttgcaaggcgaggaacgtctcctctggctttacgaagaagtggagaaaccattgagtcgcgtgctcgcgcatatggaagctaccggtgtcaaattagacgtggcgtatttggagaatctcagccttgaagttgctgcccacatgcgccgcttggaggaagaagtattccgtttagcaggccgttcctttcgccttaattctcgcgatcagttagaacgtgtgttgttcgatgaacttggtctccctcctatcggcaagacagagaagaccggtaaacgtagcacttcagcggcggttttagaagctcttcgcgaagtccatcccattgtggacaagatcttgcaataccgcgaactcgcgaaattgaaaggcacctatattgaccgtcttccggcattagtccacccgaaaacgggacgcctccatacccgcttcaaccaaacagccacggcgaccggtcgtttgtcctcctctgatccaaaccttcagaatattccagtacgtaccccattgggccagaagatccgccgtgcgtttgtagctgaggagggttggcgtttagtggccctcgattatagccaaattgaattacgtgtccttgcccatctttctggcgatgagaacctcatccgcgtgtttcaggaaggcaaagacattcacactcaaacggcaagctggatgtttggattatcagctgaagcgatcgatcctttgatgcgtcgtgcagcgaagaccatcaatttcggtgttctctacggtatgaaggcctttcgtttgtcgcaggaattaggcattccctatgaagaagctcaggcgttcattcagaaatactttcaaagctatcccaaagttaaagcatggatcgagaagactctcgaagaaggccgcacacgtggttacgtagagaccttatttggacgtcgccgctatgttcccgatttaaacgctcgcgtgaaaggcaagcgtgaagccgccgaacgcatggcgttcaacatgcctgtacagggcacggcagctgacctcatgaaacttgcaatggtgcgcctttttccacaattgcgtgaagttggtgcccgcatgctcttgcaggtccacgatgaactcttgttagaagcgccaaaagagcgtgcggaagaggtggcagccctcgcgaaagaagttatggaaggcgtgtggcccttagcggtgcctcttgaagtcgaagttggtattggcgaggattggctggctgccaaagga

SEQ ID NO: 3802 - protein, 841 aa, synthetic construct
  REGION 1..841: note = Variant of DNA polymerase I from Thermus sp. strain 2.9
MHHHHHHGGSGVLPVFEPKGRVLLVDGHHLAYRNFFALKGLTTSSGEPVQGVYGFAKSLLKALKEDGDVVIVVFDAKAPSFRHEAYEAYKAGRAPTPEDFPRQLALMKELVDLLGLERLEVPGFEADDVLATLAKKAEREGYEVQILTADRDLFQLLSPRISVLHPEGHRITPEWLWEKYGLRPEQWVDFRALAGDPSDNIPGVKGIGEKTALKLLKEWGSLENLLKNLDQVKPESVREKILAHLEDLKLSRELSRVRTDLPLEVDFQRRREPDWEGLKAFLERLEFGSLLHEFGLLESPLPAEEAPWPPPEGAFLGYRLSRPEPMWAELLALAASAQGRVYRAEDPHGALRGLFEVRGLLAKDLAVVALREGLDLPPTDDPMLLAYLLDPSNTTPEGVARRYGGEWTEDAAKRALLAERLHANLLGRLQGEERLLWLYEEVEKPLSRVLAHMEATGVKLDVAYLENLSLEVAAHMRRLEEEVFRLAGRSFRLNSRDQLERVLFDELGLPPIGKTEKTGKRSTSAAVLEALREVHPIVDKILQYRELAKLKGTYIDRLPALVHPKTGRLHTRFNQTATATGRLSSSDPNLQNIPVRTPLGQKIRRAFVAEEGWRLVALDYSQIELRVLAHLSGDENLIRVFQEGKDIHTQTASWMFGLSAEAIDPLMRRAAKTINFGVLYGMKAFRLSQELGIPYEEAQAFIQKYFQSYPKVKAWIEKTLEEGRTRGYVETLFGRRRYVPDLNARVKGKREAAERMAFNMPVQGTAADLMKLAMVRLFPQLREVGARMLLQVHDELLLEAPKERAEEVAALAKEVMEGVWPLAVPLEVEVGIGEDWLAAKG

SEQ ID NO: 3803 - DNA, 2523 bp, synthetic construct; identical to SEQ ID NO: 3699
  misc_feature 1..2523: note = Variant of DNA polymerase I from Thermus sp. strain 2.9
  source 1..2523: mol_type = other DNA

SEQ ID NO: 3804 - protein, 841 aa, synthetic construct; identical to SEQ ID NO: 3700
  REGION 1..841: note = Variant of DNA polymerase I from Thermus sp. strain 2.9

SEQ ID NO: 3805 - DNA, 2523 bp, synthetic construct
  misc_feature 1..2523: note = Variant of DNA polymerase I from Thermus sp. strain 2.9
  source 1..2523: mol_type = other DNA
atgcaccatcatcatcatcatggcggtagcggcgtgttagaggtgttcgagcctaaaggtcgcgtgcttctggttgatggccatcatctcgcgtatcgtaacttctttgccctgaaaggattaaccaccagcagcggcgagccggtacagggtgtctacggctttgcaaagtcgctcctgaaagctctgaaagaagacggtgatgtggtgattgttgtctttgatgcgaaagcgccaagttttcgccacgaagcgtacgaagcttacaaagccgggcgtgctccaacgccggaagactttcctcgccaattggcgcttatgaaggaattagtggatttgcttggcctcgaacgcttggaagttcccggtttcgaggcagacgacgtattagcgactctcgcaaagaaagccgaacgtgagggctatgaagtccagatcttgacagcagatcgcgatcttttccagcttttatctccgcgcatctcggtgttacacccggaagggcatcgtatcaccccggaatggctctgggagaaatatggtttgcgtcccgaacaatgggtggattttcgcgccttagcaggcgatccgagcgacaatattccgggagttaaaggtatcggcgagaagacggcgctcaagctccttaaagaatgggggtcgttggagaacttgcttaagaatttagatcaggtcaaaccagagtcagtgcgtgagaagattcttgctcacctcgaagacctcaaattaagccgcgaattgtcccgtgtacgcaccgatttgccgctcgaagttgatttccaacgccgccgcgaacctgactgggagggtcttaaagcgtttttagagcgtcttgaatttggttcgctcttgcatgaattcggccttttagaaagcccgttaccagccgaagaagcaccttggccaccgcccgagggcgcgtttttaggttaccgtttgagtcgcccggaaccgatgtgggccgaattactggctcttgcagcgtctgcccagggacgtgtgtatcgcgcggaagaccctcatggtgcgctccgcggcctcttcgaagtccgtggactccttgccaaagacttagctgttgttgcattgcgcgaaggtcttgatttacctccgactgatgatccaatgcttcttgcgtacctcttggacccgtcaaacacgacgcctgaaggcgtagcccgtcgttacggcggcgagtggaccgaagatgcagcgaaacgcgcgttattggccgaacgtttgcacgccaatttattaggacgtttgcaaggcgaggagcgtctcctctggctttacgaagaagtggagaaaccattgagtcgcgtgctcgcgcatatggaagctaccggtgtcaaattagacgtggcgtatttggagaatctcagccttgaagttgctgcccacatgcgccgcttggaggaagaagtattccgtttagcaggccgttcctttcgccttaattctcgcgatcagttagaacgtgtgttgttcgatgaacttggtctccctcctatcggcaagacagagaagaccggtaaacgtagcacttcagcggcggttttagaagctcttcgcgaagtccatcccattgtggacaagatcttgcaataccgcgaactcgcgaaattgaaaggcacctatattgaccgtcttccggcattagtccacccgaaaacgggacgcctccatacccgcttcaaccaaacagccacggcgaccggtcgtttgtcctcctctgatccaaaccttcagaatattccagtacgtaccaaattgggccagaagatccgccgtgcgtttgtagctgaggagggttggcgtttagtggccctcgattatagccaaattgaattacgtgtccttgcccatctttctggcgatgagaacctcatccgcgtgtttcaggaaggcaaagacattcacactcaaacggcaagctggatgtttggattatcagctgaagcgatcgatcctttgatgcgtcgtgcagcgaagaccatcaatttcggtgttctctacggtatgagtgcctttcgtttgtcgcaggaattaggcattcccaaagaagaagctcaggcgttcattcagaaatactttcaaagctatcccaaagttaaagcatggatcgagaagactctcgaagaaggccgccaccgtggttacgtagagaccttatttggacgtcgccgctatgttcccgatttaaacgctcgcgtgaaaggcaagcgtgaagccgccgaacgcatggcgttcaacatgcctgtacagggcacggcagctgacctcatgaaacttgcaatggtgcgcctttttccacaattgcgtgaagttggtgcccgcatgctcttgcaggtccacgatgaactcttgttagaagcgccaaaagagcgtgcggaagaggtggcagccctcgcgaaagaagttatggaaggcgtgtggcccttagcggtgcctcttgaagtcgaagttggtattggcgaggattggctggctgccaaagga

SEQ ID NO: 3806 - protein, 841 aa, synthetic construct
  REGION 1..841: note = Variant of DNA polymerase I from Thermus sp. strain 2.9
MHHHHHHGGSGVLEVFEPKGRVLLVDGHHLAYRNFFALKGLTTSSGEPVQGVYGFAKSLLKALKEDGDVVIVVFDAKAPSFRHEAYEAYKAGRAPTPEDFPRQLALMKELVDLLGLERLEVPGFEADDVLATLAKKAEREGYEVQILTADRDLFQLLSPRISVLHPEGHRITPEWLWEKYGLRPEQWVDFRALAGDPSDNIPGVKGIGEKTALKLLKEWGSLENLLKNLDQVKPESVREKILAHLEDLKLSRELSRVRTDLPLEVDFQRRREPDWEGLKAFLERLEFGSLLHEFGLLESPLPAEEAPWPPPEGAFLGYRLSRPEPMWAELLALAASAQGRVYRAEDPHGALRGLFEVRGLLAKDLAVVALREGLDLPPTDDPMLLAYLLDPSNTTPEGVARRYGGEWTEDAAKRALLAERLHANLLGRLQGEERLLWLYEEVEKPLSRVLAHMEATGVKLDVAYLENLSLEVAAHMRRLEEEVFRLAGRSFRLNSRDQLERVLFDELGLPPIGKTEKTGKRSTSAAVLEALREVHPIVDKILQYRELAKLKGTYIDRLPALVHPKTGRLHTRFNQTATATGRLSSSDPNLQNIPVRTKLGQKIRRAFVAEEGWRLVALDYSQIELRVLAHLSGDENLIRVFQEGKDIHTQTASWMFGLSAEAIDPLMRRAAKTINFGVLYGMSAFRLSQELGIPKEEAQAFIQKYFQSYPKVKAWIEKTLEEGRHRGYVETLFGRRRYVPDLNARVKGKREAAERMAFNMPVQGTAADLMKLAMVRLFPQLREVGARMLLQVHDELLLEAPKERAEEVAALAKEVMEGVWPLAVPLEVEVGIGEDWLAAKG

SEQ ID NO: 3807 - DNA, 2523 bp, synthetic construct
  misc_feature 1..2523: note = Variant of DNA polymerase I from Thermus sp. strain 2.9
  source 1..2523: mol_type = other DNA
atgcaccatcatcatcatcatggcggtagcggcgtgttacctgtgttcgagcctaaaggtcgcgtgcttctggttgatggccatcatctcgcgtatcgtaacttctttgccctgaaaggattaaccaccagcagcggcgagccggtacagggtgtctacggctttgcaaagtcgctcctgaaagctctgaaagaagacggtgatgtggtgattgttgtctttgatgcgaaagcgccaagttttcgccacgaagcgtacgaagcttacaaagccgggcgtgctccaacgccggaagactttcctcgccaattggcgcttatgaaggaattagtggatttgcttggcctcgaacgcttggaagttcccggtttcgaggcagacgacgtattagcgactctcgcaaagaaagccgaacgcgagggctatgaagtccagatcttgacagcagatcgcgatcttttccagcttttatctccgcgcatctcggtgttacacccggatgggcatcgtatcaccccggaatggctctgggagaaatatggtttgcgtcccgaacaatgggtggattttcgcgccttagcaggcgatccgagcgacaatattccgggagttaaaggtatcggcgagaagacggcgctcaagctccttaaagaatgggggtcgttggagaacttgcttaagaatttagatcaggtcaaaccagagtcagtgcgtgagaagattcttgctcacctcgaagacctcaaattaagccgcgaattgtcccgtgtacgcaccgatttgccgctcgaagttgatttccaacgccgccgcgaacctgactgggagggtcttaaagcgtttttagagcgtcttgaatttggttcgctcttgcatgaattcggccttttagaaagcccgttaccagccgaagaagcaccttggccaccgcccgagggcgcgtttttaggttaccgtttgagtcgcccggaaccgatgtgggccgaattactggctcttgcagcgtctgcccagggacgtgtgtatcgcgcggaagaccctcatggtgcgctccgcggcctcttcgaagtccgtggactccttgccaaagacttagctgttgttgcattgcgcgaaggtcttgatttacctccgactgatgatccaatgcttcttgcgtacctcttggacccgtcaaacacgacgccagaaggcgtagcccgtcgttacggcggcgagtggaccgaagatgcagcgaaacgcgcgttattggccgaacgtttgcacgccaatttattaggacgtttgcaaggcgaggagcgtctcctctggctttacgaagaagtggagaaaccattgagtcgcgtgctcgcgcatatggaagctaccggtgtcaaattagacgtggcgtatttggagaatctcagccttgaagttgctgcccacatgcgccgcttggaggaagaagtattccgtttagcaggccgttcctttcgccttaattctcgcgatcagttagaacgtgtgttgttcgatgaacttggtctccctcctatcggcaagacagagaagaccggtaaacgtagcacttcagcggcggttttagaagctcttcgcgaagtccatcccattgtggacaagatcttgcaataccgcgaactcgcgaaattgaaaggcacctatattgaccgtcttccggcattagtccacccgaaaacgggacgcctccatacccgcttcaaccaaacagccacggcgaccggtcgtttgtcctcctctgatccaaaccttcagaatattccagtacgtaccccattgggccagaagatccgccgtgcgtttgtagctgaggagggttggcgtttagtggccctcgattatagccaaattgaattacgtgtccttgcccatctttctggcgatgagaacctcatccgcgtgtttgaggaaggcaaagacattcacactcaaacggcaagctggatgtttggattatcagctgaagcgatcgatcctttgatgcgtcgtgcagcgaagaccatcaatttcggtgttctctacggtatgagtgcctttcgtttgtcgcaggaattaggcattccctatgaagaagctcaggcgttcattcagaaatactttcaaagctatcccaaagttaaagcatggatcgagaagactctcgaagaaggccgcacccgtggttacgtagagaccttatttggacgtcgccgctatgttcccgatttaaacgctcgcgtgaaaggcaagcgtgaagccgccgaacgcatggcgttcaacatgcctgtacagggcacggcagctgacctcatgaaacttgcaatggtgcgcctttttccacaattgcgtgaagttggtgcccgcatgctcttgcaggtccacgatgaactcttgttagaagcgccaaaagagcgtgcggaagaggtggcagccctcgcgaaagaagttatggaaggcgtgtggcccttagcggtgcctcttgaagtcgaagttggtattggcgaggattggctggctgccaaagga

SEQ ID NO: 3808 - protein, 841 aa, synthetic construct
  REGION 1..841: note = Variant of DNA polymerase I from Thermus sp. strain 2.9
MHHHHHHGGSGVLPVFEPKGRVLLVDGHHLAYRNFFALKGLTTSSGEPVQGVYGFAKSLLKALKEDGDVVIVVFDAKAPSFRHEAYEAYKAGRAPTPEDFPRQLALMKELVDLLGLERLEVPGFEADDVLATLAKKAEREGYEVQILTADRDLFQLLSPRISVLHPDGHRITPEWLWEKYGLRPEQWVDFRALAGDPSDNIPGVKGIGEKTALKLLKEWGSLENLLKNLDQVKPESVREKILAHLEDLKLSRELSRVRTDLPLEVDFQRRREPDWEGLKAFLERLEFGSLLHEFGLLESPLPAEEAPWPPPEGAFLGYRLSRPEPMWAELLALAASAQGRVYRAEDPHGALRGLFEVRGLLAKDLAVVALREGLDLPPTDDPMLLAYLLDPSNTTPEGVARRYGGEWTEDAAKRALLAERLHANLLGRLQGEERLLWLYEEVEKPLSRVLAHMEATGVKLDVAYLENLSLEVAAHMRRLEEEVFRLAGRSFRLNSRDQLERVLFDELGLPPIGKTEKTGKRSTSAAVLEALREVHPIVDKILQYRELAKLKGTYIDRLPALVHPKTGRLHTRFNQTATATGRLSSSDPNLQNIPVRTPLGQKIRRAFVAEEGWRLVALDYSQIELRVLAHLSGDENLIRVFEEGKDIHTQTASWMFGLSAEAIDPLMRRAAKTINFGVLYGMSAFRLSQELGIPYEEAQAFIQKYFQSYPKVKAWIEKTLEEGRTRGYVETLFGRRRYVPDLNARVKGKREAAERMAFNMPVQGTAADLMKLAMVRLFPQLREVGARMLLQVHDELLLEAPKERAEEVAALAKEVMEGVWPLAVPLEVEVGIGEDWLAAKG

SEQ ID NO: 3809 - DNA, 2523 bp, synthetic construct
  misc_feature 1..2523: note = Variant of DNA polymerase I from Thermus sp. strain 2.9
  source 1..2523: mol_type = other DNA
atgcaccatcatcatcatcatggcggtagcggcgtgttaccggtgttcgagcctaaaggtcgcgtgcttctggttgatggccatcatctcgcgtatcgtaacttctttgccctgaaaggattaaccaccagcagcggcgagccggtacagggtgtctacggctttgcaaagtcgctcctgaaagctctgaaagaagacggtgatgtggtgattgttgtctttgatgcgaaagcgccaagttttcgccacgaagcgtacgaagcttacaaagccgggcgtgctccaacgccggaagactttcctcgccaattggcgcttatgaaggaattagtggatttgcttggcctcgaacgcttggaagttcccggtttcgaggcagacgacgtattagcgactctcgcaaagaaagccgaacgcgagggctatgaagtccagatcttgacagcagatcgcgatcttttccagcttttatctccgcgcatctcggtgttacacccggaagggcatcgtatcaccccggaatggctctgggagaaatatggtttgcgtcccgaacaatgggtggattttcgcgccttagcaggcgatccgagcgacaatattccgggagttaaaggtatcggcgagaagacggcgctcaagctccttaaagaatgggggtcgttggagaacttgcttaagaatttagatcaggtcaaaccagagtcagtgcgtgagaagattcttgctcacctcgaagacctcaagttaagccgcgaattgtcccgtgtacgcaccgatttgccgctcgaagttgatttccaacgccgccgcgaacctgactgggagggtcttaaagcgtttttagagcgtcttgaatttggttcgctcttgcatgaattcggccttttagaaagcccgttaccagccgaagaagcaccttggccaccgcccgagggcgcgtttttaggttaccgtttgagtcgcccggaaccgatgtgggccgaattactggctcttgcagcgtctgcccagggacgtgtgtatcgcgcggaagaccctcatggtgcgctccgcggcctcttcgaagtccgtggactccttgccaaagacttagctgttgttgcattgcgcgaaggtcttgatttacctccgactgatgatccaatgcttcttgcgtacctcttggacccgtcaaacacgacgcctgaaggcgtagcccgtcgttacggcggcgagtggaccgaagatgcagcgaaacgcgcgttattggccgaacgtttgcacgccaatttattaggacgtttgcaaggcgaggaacgtctcctctggctttacgaagaagtggagaaaccattgagtcgcgtgctcgcgcatatggaagctaccggtgtcaaattagacgtggcgtatttggagaatctcagccttgaagttgctgcccacatgcgccgcttggaggaagaagtattccgtttagcaggccgttcctttcgccttaattctcgcgatcagttagaacgtgtgttgttcgatgaacttggtctccctcctatcggcaagacagagaagaccggtaaacgtagcacttcagcggcggttttagaagctcttcgcgaagtccatcccattgtggacaagatcttgcaataccgcgaactcgcgaaattgaaaggcacctatattgaccgtcttccggcattagtccacccgaaaacgggacgcctccatacccgcttcaaccaaacagccacggcgaccggtcgtttgtcctcctctgatccaaaccttcagaatattccagtacgtaccccattgggccagaagatccgccgtgcgtttgtagctgaggagggttggcgtttagtggccctcgattatagccaaattgaattacgtgtccttgcccatctttctggcgatgagaacctcatccgcgtgtttcaggaaggcaaagacattcacactcaaacggcaagctggatgtttggattatcagctgaagcgatcgatcctttgatgcgtcgtgcagcgaagaccatcaatttcggtgttctctacggtatgagtgcctttcgtttgtcgcaggaattaggcattccctacgaagaagctcaggcgttcattcagaaatactttcaaagctatcccaaagttaaagcatggatcgagaagactctcgaagaaggccgccaccgtggttacgtagagaccttatttggacgtcgccgctatgttcccgatttaaacgctcgcgtgaaaggcaagcgtgaagccgccgaacgcatggcgttcaacatgcctgtacagggcacggcagctgacctcatgaaacttgcaatggtgcgcctttttccacaattgcgtgaagttggtgcccgcatgctcttgcaggtccacgatgaactcttgttagaagcgccaaaagagcgtgcggaagaggtggcagccctcgcgaaagaagttatggaaggcgtgtggcccttagcggtgcctcttgaagtcgaagttggtattggcgaggattggctggctgccaaagga

SEQ ID NO: 3810 - protein, 841 aa, synthetic construct; identical to SEQ ID NO: 3512
  REGION 1..841: note = Variant of DNA polymerase I from Thermus sp. strain 2.9

SEQ ID NO: 3811 - DNA, 2523 bp, synthetic construct
  misc_feature 1..2523: note = Variant of DNA polymerase I from Thermus sp. strain 2.9
  source 1..2523: mol_type = other DNA
atgcaccatcatcatcatcatggcggtagcggcgtgttaccggtgttcgagcctaaaggtcgcgtgcttctggttgatggccatcatctcgcgtatcgtaacttctttgccctgaaaggattaaccaccagcagcggcgagccggtacagggtgtctacggctttgcaaagtcgctcctgaaagctctgaaagaagacggtgatgtggtgattgttgtctttgatgcgaaagcgccaagttttcgccacgaagcgtacgaagcttacaaagccgggcgtgctccaacgccggaagactttcctcgccaattggcgcttatgaaggaattagtggatttgcttggcctcgaacgcttggaagttcccggtttcgaggcagacgacgtattagcgactctcgcaaagaaagccgaacgtgagggctatgaagtccagatcttgacagcagatcgcgatcttttccagcttttatctccgcgcatctcggtgttacacccggaagggcatcgtatcaccccggaatggctctgggagaaatatggtttgcgtcccgaacaatgggtggattttcgcgccttagcaggcgatccgagcgacaatattccgggagttaaaggtatcggcgagaagacggcgctcaagctccttaaagaatgggggtcgttggagaacttgcttaagaatttagatcaggtcaaaccagagtcagtgcgtgagaagattcttgctcacctcgaagacctcaaattaagccgcgaattgtcccgtgtacgcaccgatttgccgctcgaagttgatttccaacgccgccgcgaacctgactgggagggtcttaaagcgtttttagagcgtcttgaatttggttcgctcttgcatgaattcggccttttagaaagcccgttaccagccgaagaagcaccttggccaccgcccgagggcgcgtttttaggttaccgtttgagtcgcccggaaccgatgtgggccgaattactggctcttgcagcgtctgcccagggacgtgtgtatcgcgcggaagaccctcatggtgcgctccgcggcctcttcgaagtccgtggactccttgccaaagacttagctgttgttgcattgcgcgaaggtcttgatttacctccgactgatgatccaatgcttcttgcgtacctcttggacccgtcaaacacgacgcccgaaggcgtagcccgtcgttacggcggcgagtggaccgaagatgcagcgaaacgcgcgttattggccgaacgtttgcacgccaatttattaacgcgtttgcaaggcgaggaacgtctcctctggctttacgaagaagtggagaaaccattgagtcgcgtgctcgcgcatatggaagctaccggtgtcaaattagacgtggcgtatttggagaatctcagccttgaagttgctgcccacatgcgccgcttggaggaagaagtattccgtttagcaggccgttcctttcgccttaattctcgcgatcagttagaacgtgtgttgttcgatgaacttggtctccctcctatcggcaagacagagaagaccggtaaacgtagcacttcagcggcggttttagaagctcttcgcgaagtccatcccattgtggacaagatcttgcaataccgcgaactcgcgaaattgaaaggcacctatattgaccgtcttccggcattagtccacccgaaaacgggacgcctccatacccgcttcaaccaaacagccacggcgaccggtcgtttgtcctcctctgatccaaaccttcagaatattccagtacgtaccccattgggccagaagatccgccgtgcgtttgtagctgaggagggttggcgtttagtggccctcgattatagccaaattgaattacgtgtccttgcccatctttctggcgatgagaacctcatccgcgtgtttcaggaaggcaaagacattcacactcaaacggcaagctggatgtttggattatcagctgaagcgatcgatcctttgatgcgtcgtgcagcgaagaccatcaatttcggtgttctctacggtatgagtgcctttcgtttgtcgcaggaattaggcattccctatgaagaagctcaggcgttcattcagaaatactttcaaagctatcccaaagttaaagcatggatcgagaagactctcgaagaaggccgcacacgtggttacgtagagaccttatttggacgtcgccgctatgttcccgatttaaacgctcgcgtgaaaggcaagcgtgaagccgccgaacgcatggcgttcaacatgcctgtacagggcacggcagctgacctcatgaaacttgcaatggtgcgcctttttccacaattgcgtgaagttggtgcccgcatgctcttgcaggtccacgatgaactcttgttagaagcgccaaaagagcgtgcggaagaggtggcagccctcgcgaaagaagttatggaaggcgtgtggcccttagcggtgcctcttgaagtcgaagttggtattggcgaggattggctggctgccaaagga

SEQ ID NO: 3812 - protein, 841 aa, synthetic construct
  REGION 1..841: note = Variant of DNA polymerase I from Thermus sp. strain 2.9
MHHHHHHGGSGVLPVFEPKGRVLLVDGHHLAYRNFFALKGLTTSSGEPVQGVYGFAKSLLKALKEDGDVVIVVFDAKAPSFRHEAYEAYKAGRAPTPEDFPRQLALMKELVDLLGLERLEVPGFEADDVLATLAKKAEREGYEVQILTADRDLFQLLSPRISVLHPEGHRITPEWLWEKYGLRPEQWVDFRALAGDPSDNIPGVKGIGEKTALKLLKEWGSLENLLKNLDQVKPESVREKILAHLEDLKLSRELSRVRTDLPLEVDFQRRREPDWEGLKAFLERLEFGSLLHEFGLLESPLPAEEAPWPPPEGAFLGYRLSRPEPMWAELLALAASAQGRVYRAEDPHGALRGLFEVRGLLAKDLAVVALREGLDLPPTDDPMLLAYLLDPSNTTPEGVARRYGGEWTEDAAKRALLAERLHANLLTRLQGEERLLWLYEEVEKPLSRVLAHMEATGVKLDVAYLENLSLEVAAHMRRLEEEVFRLAGRSFRLNSRDQLERVLFDELGLPPIGKTEKTGKRSTSAAVLEALREVHPIVDKILQYRELAKLKGTYIDRLPALVHPKTGRLHTRFNQTATATGRLSSSDPNLQNIPVRTPLGQKIRRAFVAEEGWRLVALDYSQIELRVLAHLSGDENLIRVFQEGKDIHTQTASWMFGLSAEAIDPLMRRAAKTINFGVLYGMSAFRLSQELGIPYEEAQAFIQKYFQSYPKVKAWIEKTLEEGRTRGYVETLFGRRRYVPDLNARVKGKREAAERMAFNMPVQGTAADLMKLAMVRLFPQLREVGARMLLQVHDELLLEAPKERAEEVAALAKEVMEGVWPLAVPLEVEVGIGEDWLAAKG

SEQ ID NO: 3813 - DNA, 2523 bp, synthetic construct
  misc_feature 1..2523: note = Variant of DNA polymerase I from Thermus sp. strain 2.9
  source 1..2523: mol_type = other DNA
atgcaccatcatcatcatcatggcggtagcggcgtgttaccggtgttcgagcctaaaggtcgcgtgcttctggttgatggccatcatctcgcgtatcgtaacttctttgccctgaaaggattaaccaccagcagcggcgagccggtacagggtgtctacggctttgcaaagtcgctcctgaaagctctgaaagaagacggtgatgtggtgattgttgtctttgatgcgaaagcgccaagttttcgccacgaagcgtacgaagcttacaaagccgggcgtgctccaacgccggaagactttcctcgccaattggcgcttatgaaggaattagtggatttgcttggcctcgaacgcttggaagttcccggtttcgaggcagacgacgtattagcgactctcgcaaagaaagccgaacgtgagggctatgaagtccagatcttgacagcagatcgcgatcttttccagcttttatctccgcgcatctcggtgttacacccggaagggcatcgtatcaccccggaatggctctgggagaaatatggtttgcgtcccgaacaatgggtggattttcgcgccttagcaggcgatccgagcgacaatattccgggagttaaaggtatcggcgagaagacggcgctcaagctccttaaagaatgggggtcgttggagaacttgcttaagaatttagatcaggtcaaaccagagtcagtgcgtgagaagattcttgctcacctcgaagacctcaaattaagccgcgaattgtcccgtgtacgcaccgatttgccgctcgaagttgatttccaacgccgccgcgaacctgactgggagggtcttaaagcgtttttagagcgtcttgaatttggttcgctcttgcatgaattcggccttttagaaagcccgttaccagccgaagaagcaccttggccaccgcccgagggcgcgtttttaggttaccgtttgagtcgcccggaaccgatgtgggccgaattactggctcttgcagcgtctgcccagggacgtgtgtatcgcgcggaagaccctcatggtgcgctccgcggcctcttcgaagtccgtggactccttgccaaagacttagctgttgttgcattgcgcgaaggtcttgatttacctccgactgatgatccaatgcttcttgcgtacctcttggacccgtcaaacacgacgcccgaaggcgtagcccgtcgttacggcggcgagtggaccgaagatgcagcgaaacgcgcgttattggccgaacgtttgcacgccaatttattaggacgtttgcaaggcgaggaacgtctcctctggctttacgaagaagtggagaaaccattgagtcgcgtgctcgcgcatatggaagctaccggtgtcaaattagacgtggcgtatttggagaatctcagccttgaagttgctgcccacatgcgccgcttggaggaagaagtattccgtttagcaggccgttcctttcgccttaattctcgcgatcagttagaacgtgtgttgttcgatgaacttggtctccctcctatcggcaagacagagaagaccggtaaacgtagcacttcagcggcggttttagaagctcttcgcgaagtccatcccattgtggacaagatcttgcaataccgcgaactcgcgaaattgaaaggcacctatattgaccgtcttccggcattagtccacccgaaaacgggacgcctccatacccgcttcaaccaaacagccacggcgaccggtcgtttgtcctcctctgatccaaaccttcagaatattccagtacgtaccccattgggccagaagatccgccgtgcgtttgtagctgaggagggttggcgtttagtggccctcgattatagccaaattgaattacgtgtccttgcccatctttctggcgatgagaacctcatccgcgtgtttcaggaaggcaaagacattcacactcaaacggcaagctggatgtttggattatcagctgaagcgatcgatcctttgatgcgtcgtgcagcgaagaccatcaatttcggtgttctctacggtatgagtgcctttcgtttgtcgcaggaattaggcattccctatgaagaagctcaggcgttcattcagaaatactttcaaagctatcccaaagttaaagcatggatcgagaagactctcgaagaaggccgcacacgtggttacgtagagaccttatttggacgtcgccgctatgttcccgatttaaacgctcgcgtgaaaggcaagcgtgaagccgccgaacgcatggcgttcaacatgcctgtacagggcacggcagctgacctcatgaaacttgcaatggtgcgcctttttccacaattgcgtgaagttggtgcccgcatgctcttgcaggtccacgatgaactcttgttagaagcgccaaaagagcgtgcggaagaggtggcagggctcgcgaaagaagttatggaaggcgtgtggcccttagcggtgcctcttgaagtcgaagttggtattggcgaggattggctggctgccaaagga

SEQ ID NO: 3814 - protein, 841 aa, synthetic construct; identical to SEQ ID NO: 3544
  REGION 1..841: note = Variant of DNA polymerase I from Thermus sp. strain 2.9

SEQ ID NO: 3815 - DNA, 2523 bp, synthetic construct
  misc_feature 1..2523: note = Variant of DNA polymerase I from Thermus sp. strain 2.9
  source 1..2523: mol_type = other DNA
atgcaccatcatcatcatcatggcggtagcggcgtgttagaggtgttcgagcctaaaggtcgcgtgcttctggttgatggccatcatctcgcgtatcgtaacttctttgccctgaaaggattaaccaccagcagcggcgagccggtacagggtgtctacggctttgcaaagtcgctcctgaaagctctgaaagaagacggtgatgtggtgattgttgtctttgatgcgaaagcgccaagttttcgccacgaagcgtacgaagcttacaaagccgggcgtgctccaacgccggaagactttcctcgccaattggcgcttatgaaggaattagtggatttgcttggcctcgaacgcttggaagttcccggtttcgaggcagacgacgtattagcgactctcgcaaagaaagccgaacgtgagggctatgaagtccagatcttgacagcagatcgcgatcttttccagcttttatctccgcgcatctcggtgttacacccggatgggcatcgtatcaccccggaatggctctgggagaaatatggtttgcgtcccgaacaatgggtggattttcgcgccttagcaggcgataaaagcgacaatattccgggagttaaaggtatcggcgagaagacggcgctcaagctccttaaagaatgggggtcgttggagaacttgcttaagaatttagatcaggtcaaaccagagtcagtgcgtgagaagattcttgctcacctcgaagacctcaaattaagccgcgaattgtcccgtgtacgcaccgatttgccgctcgaagttgatttccaacgccgccgcgaacctgactgggagggtcttaaagcgtttttagagcgtcttgaatttggttcgctcttgcatgaattcggccttttagaaagcccgttaccagccgaagaagcaccttggccaccgcccgagggcgcgtttttaggttaccgtttgagtcgcccggaaccgatgtgggccgaattactggctcttgcagcgtctgcccagggacgtgtgtatcgcgcggaagaccctcatggtgcgctccgcggcctcttcgaagtccgtggactccttgccaaagacttagctgttgttgcattgcgcgaaggtcttgatttacctccgactgatgatccaatgcttcttgcgtacctcttggacccgtcaaacacgacgcctgaaggcgtagcccgtcgttacggcggcgagtggaccgaagatgcagcgaaacgcgcgttattggccgaacgtttgcacgccaatttattaggacgtttgcaaggcgaggaacgtctcctctggctttacgaagaagtggagaaaccattgagtcgcgtgctcgcgcatatggaagctaccggtgtcaaattagacgtggcgtatttggagaatctcagccttgaagttgctgcccacatgcgccgcttggaggaagaagtattccgtttagcaggccgttcctttcgccttaattctcgcgatcagttagaacgtgtgttgttcgatgaacttggtctccctcctatcggcaagacagagaagaccggtaaacgtagcacttcagcggcggttttagaagctcttcgcgaagtccatcccattgtggacaagatcttgcaataccgcgaactcgcgaaattgaaaggcacctatattgaccgtcttccggcattagtccacccgaaaacgggacgcctccatacccgcttcaaccaaacagccacggcgaccggtcgtttgtcctcctctgatccaaaccttcagaatattccagtacgtaccccgttgggccagaagatccgccgtgcgtttgtagctgaggagggttggcgtttagtggccctcgattatagccaaattgaattacgtgtccttgcccatctttctggcgatgagaacctcatccgcgtgtttgaggaaggcaaagacattcacactcaaacggcaagctggatgtttggattatcagctgaagcgatcgatcctttgatgcgtcgtgcagcgaagaccatcaatttcggtgttctctacggtatgagtgcctttcgtttgtcgcaggaattaggcattcccaaagaagaagctcaggcgttcattcagaaatactttcaaagctatcccaaagttaaagcatggatcgagaagactctcgaagaaggccgcacacgtggttacgtagagaccttatttggacgtcgccgctatgttcccgatttaaacgctcgcgtgaaaggcaagcgtgaagccgccgaacgcatggcgttcaacatgcctgtacagggcacggcagctgacctcatgaaacttgcaatggtgcgcctttttccacaattgcgtgaagttggtgcccgcatgctcttgcaggtccacgatgaactcttgttagaagcgccaaaagagcgtgcggaagaggtggcagccctcgcgaaagaagttatggaaggcgtgtggcccttagcggtgcctcttgaagtcgaagttggtattggcgaggattggctggctgccaaagga

SEQ ID NO: 3816 - protein, 841 aa, synthetic construct
  REGION 1..841: note = Variant of DNA polymerase I from Thermus sp. strain 2.9
MHHHHHHGGSGVLEVFEPKGRVLLVDGHHLAYRNFFALKGLTTSSGEPVQGVYGFAKSLLKALKEDGDVVIVVFDAKAPSFRHEAYEAYKAGRAPTPEDFPRQLALMKELVDLLGLERLEVPGFEADDVLATLAKKAEREGYEVQILTADRDLFQLLSPRISVLHPDGHRITPEWLWEKYGLRPEQWVDFRALAGDKSDNIPGVKGIGEKTALKLLKEWGSLENLLKNLDQVKPESVREKILAHLEDLKLSRELSRVRTDLPLEVDFQRRREPDWEGLKAFLERLEFGSLLHEFGLLESPLPAEEAPWPPPEGAFLGYRLSRPEPMWAELLALAASAQGRVYRAEDPHGALRGLFEVRGLLAKDLAVVALREGLDLPPTDDPMLLAYLLDPSNTTPEGVARRYGGEWTEDAAKRALLAERLHANLLGRLQGEERLLWLYEEVEKPLSRVLAHMEATGVKLDVAYLENLSLEVAAHMRRLEEEVFRLAGRSFRLNSRDQLERVLFDELGLPPIGKTEKTGKRSTSAAVLEALREVHPIVDKILQYRELAKLKGTYIDRLPALVHPKTGRLHTRFNQTATATGRLSSSDPNLQNIPVRTPLGQKIRRAFVAEEGWRLVALDYSQIELRVLAHLSGDENLIRVFEEGKDIHTQTASWMFGLSAEAIDPLMRRAAKTINFGVLYGMSAFRLSQELGIPKEEAQAFIQKYFQSYPKVKAWIEKTLEEGRTRGYVETLFGRRRYVPDLNARVKGKREAAERMAFNMPVQGTAADLMKLAMVRLFPQLREVGARMLLQVHDELLLEAPKERAEEVAALAKEVMEGVWPLAVPLEVEVGIGEDWLAAKG

SEQ ID NO: 3817 - DNA, 2523 bp, synthetic construct
  misc_feature 1..2523: note = Variant of DNA polymerase I from Thermus sp. strain 2.9
  source 1..2523: mol_type = other DNA
atgcaccatcatcatcatcatggcggtagcggcgtgttaccggtgttcgagcctaaaggtcgcgtgcttctggttgatggccatcatctcgcgtatcgtaacttctttgccctgaaaggattaaccaccagcagcggcgagccggtacagggtgtctacggctttgcaaagtcgctcctgaaagctctgaaagaagacggtgatgtggtgattgttgtctttgatgcgaaagcgccaagttttcgccacgaagcgtacgaagcttacaaagccgggcgtgctccaacgccggaagactttcctcgccaattggcgcttatgaaggaattagtggatttgcttggcctcgaacgcttggaagttcccggtttcgaggcagacgacgtattagcgactctcgcaaagaaagccgaacgtgagggctatgaagtccagatcttgacagcagatcgcgatcttttccagcttttatctccgcgcatctcggtgttacacccggaagggcatcgtatcaccccggaatggctctgggagaaatatggtttgcgtcccgaacaatgggtggattttcgcgccttagcaggcgatccgagcgacaatattccgggagttaaaggtatcggcgagaagacggcgctcaagctccttaaagaatgggggtcgttggagaacttgcttaagaatttagatcaggtcaaaccagagtcagtgcgtgagaagattcttgctcacctcgaagacctcaaattaagccgcgaattgtcccgtgtacgcaccgatttgccgctcgaagttgatttccaacgccgccgcgaacctgactgggagggtcttaaagcgtttttagagcgtcttgaatttggttcgctcttgcatgaattcggccttttagaaagcccgttaccagccgaagaagcaccttggccaccgcccgagggcgcgtttttaggttaccgtttgagtcgcccggaaccgatgtgggccgaattactggctcttgcagcgtctgcccagggacgtgtgtatcgcgcggaagaccctcatggtgcgctccgcggcctcttcgaagtccgtggactccttgccaaagacttagctgttgttgcattgcgcgaaggtcttgatttacctccgactgatgatccaatgcttcttgcgtacctcttggacccgtcaaacacgacgcccgaaggcgtagcccgtcgttacggcggcgagtggaccgaagatgcagcgaaacgcgcgttattggccgaacgtttgcacgccaatttattaggacgtttgcaaggcgaggaacgtctcctctggctttacgaagaagtggagaaaccattgagtcgcgtgctcgcgcatatggaagctaccggtgtcaaattagacgtggcgtatttggagaatctcagccttgaagttgctgcccacatgcgccgcttggaggaagaagtattccgtttagcaggccgttcctttcgccttaattctcgcgatcagttagaacgtgtgttgttcgatgaacttggtctccctcctatcggcaagacagagaagaccggtaaacgtagcacttcagcggcggttttagaagctcttcgcgaagtccatcccattgtggacaagatcttgcaataccgcgaactcgcgaaattgaaaggcacctatattgaccgtcttccggcattagtccacccgaaaacgggacgcctccatacccgcttcaaccaaacagccacggcgaccggtcgtttgtcctcctctgatccaaaccttcagaatattccagtacgtaccccattgggccagaagatccgccgtgcgtttgtagctgaggagggttggcgtttagtggccctcgattatagccaaattgaattacgtgtccttgcccatctttctggcgatgagaacctcatccgcgtgtttcaggaaggcaaagacattcacactcaaacggcaagctggatgtttggattatcagctgaagcgatcgatcctttgatgcgtcgtgcagcgaagaccatcaatttcggtgttctctacggtatgagtgcctttcgtttgtcgcaggaattaggcattccctatgaagaagctcaggcgttcattcagaaatactttcaaagctatcccaaagttaaagcatggatcgagaagactctcgaagaaggccgcacacgtggttacgtagagaccttatttggacgtcgccgctatgttcccgatttaaacgctcgcgtgaaaggcaagcgtgaagccgccgaacgcatggcgttcaacatgcctgtacagggcacggcagctgacctcatgaaacttgcaatggtgcgcctttttccacaattgcgtgaagttggtgcccgcatgctcttgcaggtccacgatgaactcttgttagaagcgccaaaagagcgtgcggaagaggtggcagccctcgcgaaagaagttatggaatcggtgtggcccttagcggtgcctcttgaagtcgaagttggtattggcgaggattggctggctgccaaagga

SEQ ID NO: 3818 - protein, 841 aa, synthetic construct; identical to SEQ ID NO: 3636
  REGION 1..841: note = Variant of DNA polymerase I from Thermus sp. strain 2.9

SEQ ID NO: 3819 - DNA, 2523 bp, synthetic construct
  misc_feature 1..2523: note = Variant of DNA polymerase I from Thermus sp. strain 2.9
  source 1..2523: mol_type = other DNA
atgcaccatcatcatcatcatggcggtagcggcgtgttacctgtgttcgagcctaaaggtcgcgtgcttctggttgatggccatcatctcgcgtatcgtaacttctttgccctgaaaggattaaccaccagcagcggcgagccggtacagggtgtctacggctttgcaaagtcgctcctgaaagctctgaaagaagacggtgatgtggtgattgttgtctttgatgcgaaagcgccaagttttcgccacgaagcgtacgaagcttacaaagccgggcgtgctccaacgccggaagactttcctcgccaattggcgcttatgaaggaattagtggatttgcttggcctcgaacgcttggaagttcccggtttcgaggcagacgacgtattagcgactctcgcaaagaaagccgaacgtgagggctatgaagtccagatcttgacagcagatcgcgatcttttccagcttttatctccgcgcatctcggtgttacacccggaagggcatcgtatcaccccggaatggctctgggagaaatatggtttgcgtcccgaacaatgggtggattttcgcgccttagcaggcgatccgagcgacaatattccgggagttaaaggtatcggcgagaagacggcgctcaagctccttaaagaatgggggtcgttggagaacttgcttaagaatttagatcaggtcaaaccagagtcagtgcgtgagaagattcttgctcacctcgaagacctcaaattaagccgcgaattgtcccgtgtacgcaccgatttgccgctcgaagttgatttccaacgccgccgcgaacctgactgggagggtcttaaagcgtttttagagcgtcttgaatttggttcgctcttgcatgaattcggccttttagaaagcccgttaccagccgaagaagcaccttggccaccgcccgagggcgcgtttttaggttaccgtttgagtcgcccggaaccgatgtgggccgaattactggctcttgcagcgtctgcccagggacgtgtgtatcgcgcggaagaccctcatggtgcgctccgcggcctcttcgaagtccgtggactccttgccaaagacttagctgttgttgcattgcgcgaaggtcttgatttacctccgactgatgatccaatgcttcttgcgtacctcttggacccgtcaaacacgacgcccgaaggcgtagcccgtcgttacggcggcgagtggaccgaagatgcagcgaaacgcgcgttattggccgaacgtttgcacgccaatttattaggacgtttgcaaggcgaggaacgtctcctctggctttacgaagaagtggagaaaccattgagtcgcgtgctcgcgcatatggaagctaccggtgtcaaattagacgtggcgtatttggagaatctcagccttgaagttgctgcccacatgcgccgcttggaggaagaagtattccgtttagcaggccgttcctttcgccttaattctcgcgatcagttagaacgtgtgttgttcgatgaacttggtctccctcctatcggcaagacagagaagaccggtaaacgtagcacttcagcggcggttttagaagctcttcgcgaagtccatcccattgtggacaagatcttgcaataccgcgaactcgcgaaattgaaaggcacctatattgaccgtcttccggcattagtccacccgaaaacgggacgcctccatacccgcttcaaccaaacagccacggcgaccggtcgtttgtcctcctctgatccaaaccttcagaatattccagtacgtaccccattgggccagaagatccgccgtgcgtttgtagctgaggagggttggcgtttagtggccctcgattatagccaaattgaattacgtgtccttgcccatctttctggcgatgagaacctcatccgcgtgtttcaggaaggcaaagacattcacactcaaacggcaagctggatgtttggattatcagctgaagcgatcgatcctttgatgcgtcgtgcagcgaagaccatcaatttcggtgttctctacggtatgagtgcctttcgtttgtcgcaggaattaggcattccctatgaagaagctcaggcgttcattcagaaatactttcaaagctatcccaaagttaaagcatggatcgagaagactctcgaagaaggccgccaccgtggttacgtagagaccttatttggacgtcgccgctatgttcccgatttaaacgctcgcgtgaaaggcaagcgtgaagccgccgaacgcatggcgttcaacatgcctgtacagggcacggcagctgacctcatgaaacttgcaatggtgcgcctttttccacaattgcgtgaagttggtgcccgcatgctcttgcaggtccacgatgaactcttgttagaagcgccaaaagagcgtgcggaagaggtggcagccctcgcgaaagaagttatggaaggcgtgtggcccttagcggtgcctcttgaagtcgaagttggtattggcgaggattggctggctgccaaagga

SEQ ID NO: 3820 - protein, 841 aa, synthetic construct; identical to SEQ ID NO: 3512
  REGION 1..841: note = Variant of DNA polymerase I from Thermus sp. strain 2.9

SEQ ID NO: 3821 - DNA, 2523 bp, synthetic construct
  misc_feature 1..2523: note = Variant of DNA polymerase I from Thermus sp. strain 2.9
  source 1..2523: mol_type = other DNA
atgcaccatcatcatcatcatggcggtagcggcgtgttaccggtgttcgagcataaaggtcgcgtgcttctggttgatggccatcatctcgcgtatcgtaacttctttgccctgaaaggattaaccaccagcagcggcgagccggtacagggtgtctacggctttgcaaagtcgctcctgaaagctctgaaagaagacggtgatgtggtgattgttgtctttgatgcgaaagcgccaagttttcgccacgaagcgtacgaagcttacaaagccgggcgtgctccaacgccggaagactttcctcgccaattggcgcttatgaaggaattagtggatttgcttggcctcgaacgcttggaagttcccggtttcgaggcagacgacgtattagcgactctcgcaaagaaagccgaacgtgagggctatgaagtccagatcttgacagcagatcgcgatcttttccagcttttatctccgcgcatctcggtgttacacccggaagggcatcgtatcaccccggaatggctctgggagaaatatggtttgcgtcccgaacaatgggtggattttcgcgccttagcaggcgatccgagcgacaatattccgggagttaaaggtatcggcgagaagacggcgctcaagctccttaaagaatgggggtcgttggagaacttgcttaagaatttagatcaggtcaaaccagagtcagtgcgtgagaagattcttgctcacctcgaagacctcaaattaagccgcgaattgtcccgtgtacgcaccgatttgccgctcgaagttgatttccaacgccgccgcgaacctgactgggagggtcttaaagcgtttttagagcgtcttgaatttggttcgctcctgcatgaattcggccttttagaaagcccgttaccagccgaagaagcaccttggccaccgcccgagggcgcgtttttaggttaccgtttgagtcgcccggaaccgatgtgggccgaattactggctcttgcagcgtctgcccagggacgtgtgtatcgcgcggaagaccctcatggtgcgctccgcggcctcttcgaagtccgtggactccttgccaaagacttagctgttgttgcattgcgcgaaggtcttgatttacctccgactgatgatccaatgcttcttgcgtacctcttggacccgtcaaacacgacgcccgaaggcgtagcccgtcgttacggcggcgagtggaccgaagatgcagcgaaacgcgcgttattggccgaacgtttgcacgccaatttattaggacgtttgcaaggcgaggaacgtctcctctggctttacgaagaagtggagaaaccattgagtcgcgtgctcgcgcatatggaagctaccggtgtcaaattagacgtggcgtatttggagaatctcagccttgaagttgctgcccacatgcgccgcttggaggaagaagtattccgtttagcaggccgttcctttcgccttaattctcgcgatcagttagaacgtgtgctgttcgatgaacttggtctccctcctatcggcaagacagagaagaccggtaaacgtagcacttcagcggcggttttagaagctcttcgcgaagtccatcccattgtggacaagatcttgcaataccgcgaactggcgaaattgaaaggcacctatattgaccgtcttccggcattagtccacccgaaaacgggacgcctccatacccgcttcaaccaaacagccacggcgaccggtcgtttgtcctcctctgatccaaaccttcagaatattccagtacgtaccccattgggccagaagatccgccgtgcgtttgtagctgaggagggttggcgtttagtggccctcgattatagccaaattgaattacgtgtccttgcccatctttctggcgatgagaacctcatccgcgtgtttcaggaaggcaaagacattcacactcaaacggcaagctggatgtttggattatcagctgaagcgatcgatcctttgatgcgtcgtgcagcgaagacgatcaatttcggtgttctctacggtatgagtgcctttcgtttgtcgcaggaattaggcattccctatgaagaagctcaggcgttcattcagaaatactttcaaagctatcccaaagttaaagcatggatcgagaagactctcgaagaaggccgcacacgtggttacgtagagaccttatttggacgtcgccgctatgttcccgatttaaacgctcgcgtgaaaggcaagcgtgaagccgccgaacgcatggcgttcaacatgcctgtacagggcacggcagctgacctcatgaaacttgcaatggtgcgcctttttccacaattgcgtgaagttggtgcccgcatgctcttgcaggtccacgatgaactcttgttagaagcgccaaaagagcgtgcggaagaggtggcagccctcgcgaaagaagttatggaaggcgtgtggcccttagcggtgcctcttgaagtcgaagttggtattggcgaggattggctggctgccaaagga

SEQ ID NO: 3822 - protein, 841 aa, synthetic construct
  REGION 1..841: note = Variant of DNA polymerase I from Thermus sp. strain 2.9
MHHHHHHGGSGVLPVFEHKGRVLLVDGHHLAYRNFFALKGLTTSSGEPVQGVYGFAKSLLKALKEDGDVVIVVFDAKAPSFRHEAYEAYKAGRAPTPEDFPRQLALMKELVDLLGLERLEVPGFEADDVLATLAKKAEREGYEVQILTADRDLFQLLSPRISVLHPEGHRITPEWLWEKYGLRPEQWVDFRALAGDPSDNIPGVKGIGEKTALKLLKEWGSLENLLKNLDQVKPESVREKILAHLEDLKLSRELSRVRTDLPLEVDFQRRREPDWEGLKAFLERLEFGSLLHEFGLLESPLPAEEAPWPPPEGAFLGYRLSRPEPMWAELLALAASAQGRVYRAEDPHGALRGLFEVRGLLAKDLAVVALREGLDLPPTDDPMLLAYLLDPSNTTPEGVARRYGGEWTEDAAKRALLAERLHANLLGRLQGEERLLWLYEEVEKPLSRVLAHMEATGVKLDVAYLENLSLEVAAHMRRLEEEVFRLAGRSFRLNSRDQLERVLFDELGLPPIGKTEKTGKRSTSAAVLEALREVHPIVDKILQYRELAKLKGTYIDRLPALVHPKTGRLHTRFNQTATATGRLSSSDPNLQNIPVRTPLGQKIRRAFVAEEGWRLVALDYSQIELRVLAHLSGDENLIRVFQEGKDIHTQTASWMFGLSAEAIDPLMRRAAKTINFGVLYGMSAFRLSQELGIPYEEAQAFIQKYFQSYPKVKAWIEKTLEEGRTRGYVETLFGRRRYVPDLNARVKGKREAAERMAFNMPVQGTAADLMKLAMVRLFPQLREVGARMLLQVHDELLLEAPKERAEEVAALAKEVMEGVWPLAVPLEVEVGIGEDWLAAKG

SEQ ID NO: 3823 - DNA, 2523 bp, synthetic construct
  misc_feature 1..2523: note = Variant of DNA polymerase I from Thermus sp. strain 2.9
  source 1..2523: mol_type = other DNA
atgcaccatcatcatcatcatggcggtagcggcgtgttaccggtgttcgagcctaaaggtcgcgtgcttctggttgatggccatcatctcgcgtatcgtaacttctttgccctgaaaggattaaccaccagcagcggcgagccggtacagggtgtctacggctttgcaaagtcgctcctgaaagctctgaaagaagacggtgatgtggtgattgttgtctttgatgcgaaagcgccaagttttcgccacgaagcgtacgaagcttacaaagccgggcgtgctccaacgccggaagactttcctcgccaattggcgcttatgaaggaattagtggatttgcttggcctcgaacgcttggaagttcccggtttcgaggcagacgacgtattagcgactctcgcaaagaaagccgaacgtgagggctatgaagtccagatcttgacagcagatcgcgatcttttccagcttttatctccgcgcatctcggtgttacacccggaagggcatcgtatcaccccggaatggctctgggagaaatatggtttgcgtcccgaacaatgggtggattttcgcgccttagcaggcgatccgagcgacaatattccgggagttaaaggtatcggcgagaagacggcgctcaagctccttaaagaatgggggtcgttggagaacttgcttaagaatttagatcaggtcaaaccagagtcagtgcgtgagaagattcttgctcacctcgaagacctcaaattaagccgcgaattgtcccgtgtacgcaccgatttgccgctcgaagttgatttccaacgccgccgcgaacctgactgggagggtcttaaagcgtttttagagcgtcttgaatttggttcgctcttgcatgaattcggccttttagaaagcccgttaccagccgaagaagcaccttggccaccgcccgagggcgcgtttttaggttaccgtttgagtcgcccggaaccgatgtgggccgaattactggctcttgcagcgtctgcccagggacgtgtgtatcgcgcggaagaccctcatggtgcgctccgcggcctcttcgaagtccgtggactccttgccaaagacttagctgttgttgcattgcgcgaaggtcttgatttacctccgactgatgatccaatgcttcttgcgtacctcttggacccgtcaaacacgacgcccgaaggcgtagcccgtcgttacggcggcgagtggaccgaagatgcagcgaaacgcgcgttattggccgaacgtttgcacgccaatttattaggacgtttgcaaggcgaggaacgtctcctctggctttacgaagaagtggagaaaccattgagtcgcgtgctcgcgcatatggaagctaccggtgtcaaattagacgtggcgtatttggagaatctcagccttgaagttgctgcccacatgcgccgcttggaggaagaagtattccgtttagcaggccgttcctttcgccttaattctcgcgatcagttagaacgtgtgttgttcgatgaacttggtctccctcctatcggcaagacagagaagaccggtaaacgtagcacttcagcggcggttttagaagctcttcgcgaagtccatcccattgtggacaagatcttgcaataccgcgaactcgcgaaattgaaaggcacctatattgaccgtcttccggcattagtccacccgaaaacgggacgcctccatacccgcttcaaccaaacagccacggcgaccggtcgtttgtcctcctctgatccaaaccttcagaatattccagtacgtaccccattgggccagaagatccgccgtgcgtttgtagctgaggagggttggcgtttagtggccctcgattatagccaaattgaattacgtgtccttgcccatctttctggcgatgagaacctcatccgcgtgtttcaggaaggcaaagacattcacactcaaacggcaagctggatgtttggattatcagctgaagcgatcgatcctttgatgcgtcgtgcagcgaagaccatcaatttcggtgttctctacggtatgagtgcctttcgtttgtcgcaggaattaggcattccctatgaagaagctcaggcgttcattcagaaatactttcaaagctatcccaaagttaaagcatggatcgagaagactctcgaagaaggccgcacacgtggttacgtagagaccttatttggacgtcgccgctatgttccctctttaaacgctcgcgtgaaaggcaagcgtgaagccgccgaacgcatggcgttcaacatgcctgtacagggcacggcagctgacctcatgaaacttgcaatggtgcgcctttttccacaattgcgtgaagttggtgcccgcatgctcttgcaggtccacgatgaactcttgttagaagcgccaaaagagcgtgcggaagaggtggcagccctcgcgaaagaagttatggaaggcgtgtggcccttagcggtgcctcttgaagtcgaagttggtattggcgaggattggctggctgccaaagga

SEQ ID NO: 3824 - protein, 841 aa, synthetic construct
  REGION 1..841: note = Variant of DNA polymerase I from Thermus sp. strain 2.9
MHHHHHHGGSGVLPVFEPKGRVLLVDGHHLAYRNFFALKGLTTSSGEPVQGVYGFAKSLLKALKEDGDVVIVVFDAKAPSFRHEAYEAYKAGRAPTPEDFPRQLALMKELVDLLGLERLEVPGFEADDVLATLAKKAEREGYEVQILTADRDLFQLLSPRISVLHPEGHRITPEWLWEKYGLRPEQWVDFRALAGDPSDNIPGVKGIGEKTALKLLKEWGSLENLLKNLDQVKPESVREKILAHLEDLKLSRELSRVRTDLPLEVDFQRRREPDWEGLKAFLERLEFGSLLHEFGLLESPLPAEEAPWPPPEGAFLGYRLSRPEPMWAELLALAASAQGRVYRAEDPHGALRGLFEVRGLLAKDLAVVALREGLDLPPTDDPMLLAYLLDPSNTTPEGVARRYGGEWTEDAAKRALLAERLHANLLGRLQGEERLLWLYEEVEKPLSRVLAHMEATGVKLDVAYLENLSLEVAAHMRRLEEEVFRLAGRSFRLNSRDQLERVLFDELGLPPIGKTEKTGKRSTSAAVLEALREVHPIVDKILQYRELAKLKGTYIDRLPALVHPKTGRLHTRFNQTATATGRLSSSDPNLQNIPVRTPLGQKIRRAFVAEEGWRLVALDYSQIELRVLAHLSGDENLIRVFQEGKDIHTQTASWMFGLSAEAIDPLMRRAAKTINFGVLYGMSAFRLSQELGIPYEEAQAFIQKYFQSYPKVKAWIEKTLEEGRTRGYVETLFGRRRYVPSLNARVKGKREAAERMAFNMPVQGTAADLMKLAMVRLFPQLREVGARMLLQVHDELLLEAPKERAEEVAALAKEVMEGVWPLAVPLEVEVGIGEDWLAAKG

SEQ ID NO: 3825 - DNA, 2523 bp, synthetic construct
  misc_feature 1..2523: note = Variant of DNA polymerase I from Thermus sp. strain 2.9
  source 1..2523: mol_type = other DNA
atgcaccatcatcatcatcatggcggtagcggcgtgttaccggtgttcgagcctaaaggtcgcgtgcttctggttgatggccatcatctcgcgtatcgtaacttctttgccctgaaaggattaaccaccagcagcggcgagccggtacagggtgtctacggctttgcaaagtcgctcctgaaagctctgaaagaagacggtgatgtggtgattgttgtctttgatgcgaaagcgccaagttttcgccacgaagcgtacgaagcttacaaagccgggcgtgctccaacgccggaagactttcctcgccaattggcgcttatgaaggaattagtggatttgcttggcctcgaacgcttggaagttcccggtttcgaggcagacgacgtattagcgactctcgcaaagaaagccgaacgtgagggctatgaagtccagatcttgacagcagatcgcgatcttttccagcttttatctccgcgcatctcggtgttacacccggaagggcatcgtatcaccccggaatggctctgggagaaatatggtttgcgtcccgaacaatgggtggattttcgcgccttagcaggcgatccgagcgacaatattccgggagttaaaggtatcggcgagaagacggcgctcaagctccttaaagaatgggggtcgttggagaacttgcttaagaatttagatcaggtcaaaccagagtcagtgcgtgagaagattcttgctcacctcgaagacctcaaattaagccgcgaattgtcccgtgtacgcaccgatttgccgctcgaagttgatttccaacgccgccgcgaacctgactgggagggtcttaaagcgtttttagagcgtcttgaatttggttcgctcttgcatgaattcggccttttagaaagcccgttaccagccgaagaagcaccttggccaccgcccgagggcgcgtttttaggttaccgtttgagtcgcccggaaccgatgtgggccgaattactggctcttgcagcgtctgcccagggacgtgtgtatcgcgcggaagaccctcatggtgcgctccgcggcctcttcgaagtccgtggactccttgccaaagacttagctgttgttgcattgcgcgaaggtcttgatttacctccgactgatgatccaatgcttcttgcgtacctcttggacccgtcaaacacgacgcccgaaggcgtagcccgtcgttacggcggcgagtggaccgaagatgcagcgaaacgcgcgttattggccgaacgtttgcacgccaatttattaggacgtttgcaaggcgaggaacgtctcctctggctttacgaagaagtggagaaaccattgagtcgcgtgctcgcgcatatggaagctaccggtgtcaaattagacgtggcgtatttggagaatctcagccttgaagttgctgcccacatgcgccgcttggaggaagaagtattccgtttagcaggccgttcctttcgccttaattctcgcgatcagttagaacgtgtgttgttcgatgaacttggtctccctcctatcggcaagacagagaagaccggtaaacgtagcacttcagcggcggttttagaagctcttcgcgaagtccatcccattgtggacaagatcttgcaataccgcgaactcgcgaaattgaaaggcacctatattgaccgtcttccggcattagtccacccgaaaacgggacgcctccatacccgcttcaaccaaacagccacggcgaccggtcgtttgtcctcctctgatccaaaccttcagaatattccagtacgtaccccattgggccagaagatccgccgtgcgtttgtagctgaggagggttggcgtttagtggccctcgattatagccaaattgaattacgtgtccttgcccatctttctggcgatgagaacctcatccgcgtgtttcaggaaggcaaagacattcacactcaaacggcaagctggatgtttggattatcagctgaagcgatcgatcctttgatgcgtcgtgcagcgaagaccatcaatttcggtgttctctacggtatgagtgcctttcgtttgtcgcaggaattaggcattccctatgaagaagctcaggcgttcattcagaaatactttcaaagctatcccaaagttaaagcatggatcgagaagactctcgaagaaggccgcacacgtggttacgtagagaccttatttggacgtcgccgctatgttcccgatttaaacgctcgcgtgaaaggcaagcgtgaagccgccgaacgcatggcgttcaacatgcctgtacagggcacggcagctgacctcatgaaacttgcaatggtgcgcctttttccacaattgcgtgaagttggtgcccgcatgctcttgcaggtccacgatgaactcttgttagaagcgagtaaagagcgtgcggaagaggtggcagccctcgcgaaagaagttatggaaggcgtgtggcccttagcggtgcctcttgaagtcgaagttggtattggcgaggattggctggctgccaaagga

SEQ ID NO: 3826 - protein, 841 aa, synthetic construct
  REGION 1..841: note = Variant of DNA polymerase I from Thermus sp. strain 2.9
MHHHHHHGGSGVLPVFEPKGRVLLVDGHHLAYRNFFALKGLTTSSGEPVQGVYGFAKSLLKALKEDGDVVIVVFDAKAPSFRHEAYEAYKAGRAPTPEDFPRQLALMKELVDLLGLERLEVPGFEADDVLATLAKKAEREGYEVQILTADRDLFQLLSPRISVLHPEGHRITPEWLWEKYGLRPEQWVDFRALAGDPSDNIPGVKGIGEKTALKLLKEWGSLENLLKNLDQVKPESVREKILAHLEDLKLSRELSRVRTDLPLEVDFQRRREPDWEGLKAFLERLEFGSLLHEFGLLESPLPAEEAPWPPPEGAFLGYRLSRPEPMWAELLALAASAQGRVYRAEDPHGALRGLFEVRGLLAKDLAVVALREGLDLPPTDDPMLLAYLLDPSNTTPEGVARRYGGEWTEDAAKRALLAERLHANLLGRLQGEERLLWLYEEVEKPLSRVLAHMEATGVKLDVAYLENLSLEVAAHMRRLEEEVFRLAGRSFRLNSRDQLERVLFDELGLPPIGKTEKTGKRSTSAAVLEALREVHPIVDKILQYRELAKLKGTYIDRLPALVHPKTGRLHTRFNQTATATGRLSSSDPNLQNIPVRTPLGQKIRRAFVAEEGWRLVALDYSQIELRVLAHLSGDENLIRVFQEGKDIHTQTASWMFGLSAEAIDPLMRRAAKTINFGVLYGMSAFRLSQELGIPYEEAQAFIQKYFQSYPKVKAWIEKTLEEGRTRGYVETLFGRRRYVPDLNARVKGKREAAERMAFNMPVQGTAADLMKLAMVRLFPQLREVGARMLLQVHDELLLEASKERAEEVAALAKEVMEGVWPLAVPLEVEVGIGEDWLAAKG

SEQ ID NO: 3827 - DNA, 2523 bp, synthetic construct
  misc_feature 1..2523: note = Variant of DNA polymerase I from Thermus sp. strain 2.9
  source 1..2523: mol_type = other DNA
atgcaccatcatcatcatcatggcggtagcggcgtgttacctgtgttcgagcctaaaggtcgcgtgcttctggttgatggccatcatctcgcgtatcgtaacttctttgccctgaaaggattaaccaccagcagcggcgagccggtacagggtgtctacggctttgcaaagtcgctcctgaaagctctgaaagaagacggtgatgtggtgattgttgtctttgatgcgaaagcgccaagttttcgccacgaagcgtacgaagcttacaaagccgggcgtgctgatacgccggaagactttcctcgccaattggcgcttatgaaggaattagtggatttgcttggcctcgaacgcttggaagttcccggtttcgaggcagacgacgtattagcgactctcgcaaagaaagccgaacgtgagggctatgaagtccagatcttgacagcagatcgcgatcttttccagcttttatctccgcgcatctcggtgttacacccggaagggcatcgtatcaccccggaatggctctgggagaaatatggtttgcgtcccgaacaatgggtggattttcgcgccttagcaggcgatccgagcgacaatattccgggagttaaaggtatcggcgagaagacggcgctcaagctccttaaagaatgggggtcgttggagaacttgcttaagaatttagatcaggtcaaaccagagtcagtgcgtgagaagattcttgctcacctcgaagacctcgagttaagccgcgaattgtcccgtgtacgcaccgatttgccgctcgaagttgatttccaacgccgccgcgaacctgactgggagggtcttaaagcgtttttagagcgtcttgaatttggttcgctcttgcatgaattcggccttttagaaagcccgttaccagccgaagaagcaccttggccaccgcccgagggcgcgtttttaggttaccgtttgagtcgcccggaaccgatgtgggccgaattactggctcttgcagcgtctgcccagggacgtgtgtatcgcgcggaagaccctcatggtgcgctccgcggcctcttcgaagtccgtggactccttgccaaagacttagctgttgttgcattgcgcgaaggtcttgatttacctccgactgatgatccaatgcttcttgcgtacctcttggacccgtcaaacacgacgcctgaaggcgtagcccgtcgttacggcggcgagtggaccgaagatgcagcgaaacgcgcgttattggccgaacgtttgcacgccaatttattaggacgtttgcaaggcgaggaacgtctcctctggctttacgaagaagtggagaaaccattgagtcgcgtgctcgcgcatatggaagctaccggtgtcaaattagacgtggcgtatttggagaatctcagccttgaagttgctgcccacatgcgccgcttggaggaagaagtattccgtttagcaggccgttcctttcgccttaattctcgcgatcagttagaacgtgtgttgttcgatgaacttggtctccctcctatcggcaagacagagaagaccggtaaacgtagcacttcagcggcggttttagaagctcttcgcgaagtccatcccattgtggacaagatcttgcaataccgcgaactcgcgaaattgaaaggcacctatattgaccgtcttccggcattagtccacccgaaaacgggacgcctccatacccgcttcaaccaaacagccacggcgaccggtcgtttgtcctcctctgatccaaaccttcagaatattccagtacgtaccaaattgggccagaagatccgccgtgcgtttgtagctgaggagggttggcgtttagtggccctcgattatagccaaattgaattacgtgtccttgcccatctttctggcgatgagaacctcatccgcgtgtttcaggaaggcaaagacattcacactcaaacggcaagctggatgtttggattatcagctgaagcgatcgatcctttgatgcgtcgtgcagcgaagaccatcaatttcggtgttctctacggtatgagtgcctttcgtttgtcgcaggaattaggcattccctatgaagaagctcaggcgttcattcagaaatactttcaaagctatcccaaagttaaagcatggatcgagaagactctcgaagaaggccgcacacgtggttacgtagagaccttatttggacgtcgccgctatgttcccgatttaaacgctcgcgtgaaaggcaagcgtgaagccgccgaacgcatggcgttcaacatgcctgtacagggcacggcagctgacctcatgaaacttgcaatggtgcgcctttttccacaattgcgtgaagttggtgcccgcatgctcttgcaggtccacgatgaactcttgttagaagcgccaaaagagcgtgcggaagaggtggcagccctcgcgaaagaagttatggaaggcgtgtggcccttagcggtgcctcttgaagtcgaagttggtattggcgaggattggctggctgccaaagga

SEQ ID NO: 3828 - protein, 841 aa, synthetic construct
  REGION 1..841: note = Variant of DNA polymerase I from Thermus sp. strain 2.9
MHHHHHHGGSGVLPVFEPKGRVLLVDGHHLAYRNFFALKGLTTSSGEPVQGVYGFAKSLLKALKEDGDVVIVVFDAKAPSFRHEAYEAYKAGRADTPEDFPRQLALMKELVDLLGLERLEVPGFEADDVLATLAKKAEREGYEVQILTADRDLFQLLSPRISVLHPEGHRITPEWLWEKYGLRPEQWVDFRALAGDPSDNIPGVKGIGEKTALKLLKEWGSLENLLKNLDQVKPESVREKILAHLEDLELSRELSRVRTDLPLEVDFQRRREPDWEGLKAFLERLEFGSLLHEFGLLESPLPAEEAPWPPPEGAFLGYRLSRPEPMWAELLALAASAQGRVYRAEDPHGALRGLFEVRGLLAKDLAVVALREGLDLPPTDDPMLLAYLLDPSNTTPEGVARRYGGEWTEDAAKRALLAERLHANLLGRLQGEERLLWLYEEVEKPLSRVLAHMEATGVKLDVAYLENLSLEVAAHMRRLEEEVFRLAGRSFRLNSRDQLERVLFDELGLPPIGKTEKTGKRSTSAAVLEALREVHPIVDKILQYRELAKLKGTYIDRLPALVHPKTGRLHTRFNQTATATGRLSSSDPNLQNIPVRTKLGQKIRRAFVAEEGWRLVALDYSQIELRVLAHLSGDENLIRVFQEGKDIHTQTASWMFGLSAEAIDPLMRRAAKTINFGVLYGMSAFRLSQELGIPYEEAQAFIQKYFQSYPKVKAWIEKTLEEGRTRGYVETLFGRRRYVPDLNARVKGKREAAERMAFNMPVQGTAADLMKLAMVRLFPQLREVGARMLLQVHDELLLEAPKERAEEVAALAKEVMEGVWPLAVPLEVEVGIGEDWLAAKG

SEQ ID NO: 3829 - DNA, 2523 bp, synthetic construct
  misc_feature 1..2523: note = Variant of DNA polymerase I from Thermus sp. strain 2.9
  source 1..2523: mol_type = other DNA
atgcaccatcatcatcatcatggcggtagcggcgtgttaccggtgttcgagcctaaaggtcgcgtgcttctggttgatggccatcatctcgcgtatcgtaacttctttgccctgaaaggattaaccaccagcagcggcgagccggtacagggtgtctacggctttgcaaagtcgctcctgaaagctctgaaagaagacggtgatgtggtgattgttgtctttgatgcgaaagcgccaagttttcgccacgaagcgtacgaagcttacaaagccgggcgtgctccaacgccggaagactttcctcgccaattggcgcttatgaaggaattagtggatttgcttggcctcgaacgcttggaagttcccggtttcgaggcagacgacgtattagcgactctcgcaaagaaagccgaacgtgagggctatgaagtccagatcttgacagcagatcgcgatcttttccagcttttatctccgcgcatctcggtgttacacccggaagggcatcgtatcaccccggaatggctctgggagaaatatggtttgcgtcccgaacaatgggtggattttcgcgccttagcaggcgatccgagcgacaatattccgggagttaaaggtatcggcgagaagacggcgctcaagctccttaaagaatgggggtcgttggagaacttgcttaagaatttagatcaggtcaaaccagagtcagtgcgtgagaagattcttgctcacctcgaagacctcaaattaagccgcgaattgtcccgtgtacgcaccgatttgccgctcgaagttgatttccaacgccgccgcgaacctgactgggagggtcttaaagcgtttttagagcgtcttgaatttggttcgctcttgcatgaattcggccttttagaaagcccgttaccagccgaagaagcaccttggccaccgcccgagggcgcgtttttaggttaccgtttgagtcgcccggaaccgatgtgggccgaattactggctcttgcagcgtctgcccagggacgtgtgtatcgcgcggaaacgcctcatggtgcgctccgcggcctcttcgaagtccgtggactccttgccaaagacttagctgttgttgcattgcgcgaaggtcttgatttacctccgactgatgatccaatgcttcttgcgtacctcttggacccgtcaaacacgacgcccgaaggcgtagcccgtcgttacggcggcgagtggaccgaagatgcagcgaaacgcgcgttattggccgaacgtttgcacgccaatttattaggacgtttgcaaggcgaggaacgtctcctctggctttacgaagaagtggagaaaccattgagtcgcgtgctcgcgcatatggaagctaccggtgtcaaattagacgtggcgtatttggagaatctcagccttgaagttgctgcccacatgcgccgcttggaggaagaagtattccgtttagcaggccgttcctttcgccttaattctcgcgatcagttagaacgtgtgttgttcgatgaacttggtctccctcctatcggcaagacagagaagaccggtaaacgtagcacttcagcggcggttttagaagctcttcgcgaagtccatcccattgtggacaagatcttgcaataccgcgaactcgcgaaattgaaaggcacctatattgaccgtcttccggcattagtccacccgaaaacgggacgcctccatacccgcttcaaccaaacagccacggcgaccggtcgtttgtcctcctctgatccaaaccttcagaatattccagtacgtaccccattgggccagaagatccgccgtgcgtttgtagctgaggagggttggcgtttagtggccctcgattatagccaaattgaattacgtgtccttgcccatctttctggcgatgagaacctcatccgcgtgtttcaggaaggcaaagacattcacactcaaacggcaagctggatgtttggattatcagctgaagcgatcgatcctttgatgcgtcgtgcagcgaagaccatcaatttcggtgttctctacggtatgagtgcctttcgtttgtcgcaggaattaggcattccctatgaagaagctcaggcgttcattcagaaatactttcaaagctatcccaaagttaaagcatggatcgagaagactctcgaagaaggccgcacacgtggttacgtagagaccttatttggacgtcgccgctatgttcccgatttaaacgctcgcgtgaaaggcaagcgtgaagccgccgaacgcatggcgttcaacatgcctgtacagggcacggcagctgacctcatgaaacttgcaatggtgcgcctttttccacaattgcgtgaagttggtgcccgcatgctcttgcaggtccacgatgaactcttgttagaagcgccaaaagagcgtgcggaagaggtggcagccctcgcgaaagaagttatggaaggcgtgtggcccttagcggtgcctcttgaagtcgaagttggtattggcgaggattggctggctgccaaagga

SEQ ID NO: 3830 - protein, 841 aa, synthetic construct
  REGION 1..841: note = Variant of DNA polymerase I from Thermus sp. strain 2.9
MHHHHHHGGSGVLPVFEPKGRVLLVDGHHLAYRNFFALKGLTTSSGEPVQGVYGFAKSLLKALKEDGDVVIVVFDAKAPSFRHEAYEAYKAGRAPTPEDFPRQLALMKELVDLLGLERLEVPGFEADDVLATLAKKAEREGYEVQILTADRDLFQLLSPRISVLHPEGHRITPEWLWEKYGLRPEQWVDFRALAGDPSDNIPGVKGIGEKTALKLLKEWGSLENLLKNLDQVKPESVREKILAHLEDLKLSRELSRVRTDLPLEVDFQRRREPDWEGLKAFLERLEFGSLLHEFGLLESPLPAEEAPWPPPEGAFLGYRLSRPEPMWAELLALAASAQGRVYRAETPHGALRGLFEVRGLLAKDLAVVALREGLDLPPTDDPMLLAYLLDPSNTTPEGVARRYGGEWTEDAAKRALLAERLHANLLGRLQGEERLLWLYEEVEKPLSRVLAHMEATGVKLDVAYLENLSLEVAAHMRRLEEEVFRLAGRSFRLNSRDQLERVLFDELGLPPIGKTEKTGKRSTSAAVLEALREVHPIVDKILQYRELAKLKGTYIDRLPALVHPKTGRLHTRFNQTATATGRLSSSDPNLQNIPVRTPLGQKIRRAFVAEEGWRLVALDYSQIELRVLAHLSGDENLIRVFQEGKDIHTQTASWMFGLSAEAIDPLMRRAAKTINFGVLYGMSAFRLSQELGIPYEEAQAFIQKYFQSYPKVKAWIEKTLEEGRTRGYVETLFGRRRYVPDLNARVKGKREAAERMAFNMPVQGTAADLMKLAMVRLFPQLREVGARMLLQVHDELLLEAPKERAEEVAALAKEVMEGVWPLAVPLEVEVGIGEDWLAAKG

SEQ ID NO: 3831 - DNA, 2523 bp, synthetic construct
  misc_feature 1..2523: note = Variant of DNA polymerase I from Thermus sp. strain 2.9
  source 1..2523: mol_type = other DNA
atgcaccatcatcatcatcatggcggtagcggcgtgttaccggtgttcgagcctaaaggtcgcgtgcttctggttgatggccatcatctcgcgtatcgtaacttctttgccctgaaaggattaaccaccagcagcggcgagccggtacagggtgtctacggctttgcaaagtcgctcctgaaagctctgaaagaagacggtgatgtggtgattgttgtctttgatgcgaaagcgccaagttttcgccacgaagcgtacgaagcttacaaagccgggcgtgctccaacgccggaagactttcctcgccaattggcgcttatgaaggaattagtggatttgcttggcctcgaacgcttggaagttcccggtttcgaggcagacgacgtattagcgactctcgcaaagaaagccgaacgtgagggctatgaagtccagatcttgacagcagatcgcgatcttttccagcttttatctccgcgcatctcggtgttacacccggaagggcatcgtatcaccccggaatggctctgggagaaatatggtttgcgtcccgaacaatgggtggattttcgcgccttagcaggcgatccgagcgacaatattccgggagttaaaggtatcggcgagaagacggcgctcaagctccttaaagaatgggggtcgttggagaacttgcttaagaatttagatcaggtcaaaccagagtcagtgcgtgagaagattcttgctcacctcgaagacctcaaattaagccgcgaattgtcccgtgtacgcaccgatttgccgctcgaagttgatttccaacgccgccgcgaacctgactgggagggtcttaaagcgtttttagagcgtcttgaatttggttcgctcttgcatgaattcggccttttagaaagcccgttaccagccgaagaagcaccttggccaccgcccgagggcgcgtttttaggttaccgtttgagtcgcccggaaccgatgtgggccgaattactggctcttgcagcgtctgcccagggacgtgtgtatcgcgcggaagaccctcatggtgcgctccgcggcctcttcgaagtccgtggactccttgccaaagacttagctgttgttgcattgcgcgaaggtcttgatttacctccgactgatgatccaatgcttcttgcgtacctcttggacccgtcaaacacgacgcccgaaggcgtagcccgtcgttacggcggcgagtggaccgaagatgcagcgaaacgcgcgttattggccgaacgtttgcacgccaatttattaggacgtttgcaaggcgaggaacgtctcctctggctttacgaagaagtggagaaaccattgagtcaggtgctcgcgcatatggaagctaccggtgtcaaattagacgtggcgtatttggagaatctcagccttgaagttgctgcccacatgcgccgcttggaggaagaagtattccgtttagcaggccgttcctttcgccttaattctcgcgatcagttagaacgtgtgttgttcgatgaacttggtctccctcctatcggcaagacagagaagaccggtaaacgtagcacttcagcggcggttttagaagctcttcgcgaagtccatcccattgtggacaagatcttgcaataccgcgaactcgcgaaattgaaaggcacctatattgaccgtcttccggcattagtccacccgaaaacgggacgcctccatacccgcttcaaccaaacagccacggcgaccggtcgtttgtcctcctctgatccaaaccttcagaatattccagtacgtaccccattgggccagaagatccgccgtgcgtttgtagctgaggagggttggcgtttagtggccctcgattatagccaaattgaattacgtgtccttgcccatctttctggcgatgagaacctcatccgcgtgtttcaggaaggcaaagacattcacactcaaacggcaagctggatgtttggattatcagctgaagcgatcgatcctttgatgcgtcgtgcagcgaagaccatcaatttcggtgttctctacggtatgagtgcctttcgtttgtcgcaggaattaggcattccctatgaagaagctcaggcgttcattcagaaatactttcaaagctatcccaaagttaaagcatggatcgagaagactctcgaagaaggccgcacacgtggttacgtagagaccttatttggacgtcgccgctatgttcccgatttaaacgctcgcgtgaaaggcaagcgtgaagccgccgaacgcatggcgttcaacatgcctgtacagggcacggcagctgacctcatgaaacttgcaatggtgcgcctttttccacaattgcgtgaagttggtgcccgcatgctcttgcaggtccacgatgaactcttgttagaagcgccaaaagagcgtgcggaagaggtggcagccctcgcgaaagaagttatggaaggcgtgtggcccttagcggtgcctcttgaagtcgaagttggtattggcgaggattggctggctgccaaagga

SEQ ID NO: 3832 - protein, 841 aa, synthetic construct
  REGION 1..841: note = Variant of DNA polymerase I from Thermus sp. strain 2.9
MHHHHHHGGSGVLPVFEPKGRVLLVDGHHLAYRNFFALKGLTTSSGEPVQGVYGFAKSLLKALKEDGDVVIVVFDAKAPSFRHEAYEAYKAGRAPTPEDFPRQLALMKELVDLLGLERLEVPGFEADDVLATLAKKAEREGYEVQILTADRDLFQLLSPRISVLHPEGHRITPEWLWEKYGLRPEQWVDFRALAGDPSDNIPGVKGIGEKTALKLLKEWGSLENLLKNLDQVKPESVREKILAHLEDLKLSRELSRVRTDLPLEVDFQRRREPDWEGLKAFLERLEFGSLLHEFGLLESPLPAEEAPWPPPEGAFLGYRLSRPEPMWAELLALAASAQGRVYRAEDPHGALRGLFEVRGLLAKDLAVVALREGLDLPPTDDPMLLAYLLDPSNTTPEGVARRYGGEWTEDAAKRALLAERLHANLLGRLQGEERLLWLYEEVEKPLSQVLAHMEATGVKLDVAYLENLSLEVAAHMRRLEEEVFRLAGRSFRLNSRDQLERVLFDELGLPPIGKTEKTGKRSTSAAVLEALREVHPIVDKILQYRELAKLKGTYIDRLPALVHPKTGRLHTRFNQTATATGRLSSSDPNLQNIPVRTPLGQKIRRAFVAEEGWRLVALDYSQIELRVLAHLSGDENLIRVFQEGKDIHTQTASWMFGLSAEAIDPLMRRAAKTINFGVLYGMSAFRLSQELGIPYEEAQAFIQKYFQSYPKVKAWIEKTLEEGRTRGYVETLFGRRRYVPDLNARVKGKREAAERMAFNMPVQGTAADLMKLAMVRLFPQLREVGARMLLQVHDELLLEAPKERAEEVAALAKEVMEGVWPLAVPLEVEVGIGEDWLAAKG

SEQ ID NO: 3833 - DNA, 2523 bp, synthetic construct
  misc_feature 1..2523: note = Variant of DNA polymerase I from Thermus sp. strain 2.9
  source 1..2523: mol_type = other DNA
atgcaccatcatcatcatcatggcggtagcggcgtgttaccggtgttcgagcctaaaggtcgcgtgcttctggttgatggccatcatctcgcgtatcgtaacttctttgccctgaaaggattaaccaccagcagcggcgagccggtacagggtgtctacggctttgcaaagtcgctcctgaaagctctgaaagaagacggtgatgtggtgattgttgtctttgatgcgaaagcgccaagttttcgccacgaagcgtacgaagcttacaaaagtgggcgtgctccaacgccggaagactttcctcgccaattggcgcttatgaaggaattagtggatttgcttggcctcgaacgcttggaagttcccggtttcgaggcagacgacgtattagcgactctcgcaaagaaagccgaacgtgagggctatgaagtccagatcttgacagcagatcgcgatcttttccagcttttatctccgcgcatctcggtgttacacccggaagggcatcgtatcaccccggaatggctctgggagaaatatggtttgcgtcccgaacaatgggtggattttcgcgccttagcaggcgatccgagcgacaatattccgggagttaaaggtatcggcgagaagacggcgctcaagctccttaaagaatgggggtcgttggagaacttgcttaagaatttagatcaggtcaaaccagagtcagtgcgtgagaagattcttgctcacctcgaagacctcaaattaagccgcgaattgtcccgtgtacgcaccgatttgccgctcgaagttgatttccaacgccgccgcgaacctgactgggagggtcttaaagcgtttttagagcgtcttgaatttggttcgctcttgcatgaattcggccttttagaaagcccgttaccagccgaagaagcaccttggccaccgcccgagggcgcgtttttaggttaccgtttgagtcgcccggaaccgatgtgggccgaattactggctcttgcagcgtctgcccagggacgtgtgtatcgcgcggaagaccctcatggtgcgctccgcggcctcttcgaagtccgtggactccttgccaaagacttagctgttgttgcattgcgcgaaggtcttgatttacctccgactgatgatccaatgcttcttgcgtacctcttggacccgtcaaacacgacgcccgaaggcgtagcccgtcgttacggcggcgagtggaccgaagatgcagcgaaacgcgcgttattggccgaacgtttgcacgccaatttattaggacgtttgcaaggcgaggaacgtctcctctggctttacgaagaagtggagaaaccattgagtcgcgtgctcgcgcatatggaagctaccggtgtcaaattagacgtggcgtatttggagaatctcagccttgaagttgctgcccacatgcgccgcttggaggaagaagtattccgtttagcaggccgttcctttcgccttaattctcgcgatcagttagaacgtgtgttgttcgatgaacttggtctccctcctatcggcaagacagagaagaccggtaaacgtagcacttcagcggcggttttagaagctcttcgcgaagtccatcccattgtggacaagatcttgcaataccgcgaactcgcgaaattgaaaggcacctatattgaccgtcttccggcattagtccacccgaaaacgggacgcctccatacccgcttcaaccaaacagccacggcgaccggtcgtttgtcctcctctgatccaaaccttcagaatattccagtacgtaccccattgggccagaagatccgccgtgcgtttgtagctgaggagggttggcgtttagtggccctcgattatagccaaattgaattacgtgtccttgcccatctttctggcgatgagaacctcatccgcgtgtttcaggaaggcaaagacattcacactcaaacggcaagctggatgtttggattatcagctgaagcgatcgatcctttgatgcgtcgtgcagcgaagaccatcaatttcggtgttctctacggtatgagtgcctttcgtttgtcgcaggaattaggcattccctatgaagaagctcaggcgttcattcagaaatactttcaaagctatcccaaagttaaagcatggatcgagaagactctcgaagaaggccgcacacgtggttacgtagagaccttatttggacgtcgccgctatgttcccgatttaaacgctcgcgtgaaaggcaagcgtgaagccgccgaacgcatggcgttcaacatgcctgtacagggcacggcagctgacctcatgaaacttgcaatggtgcgcctttttccacaattgcgtgaagttggtgcccgcatgctcttgcaggtccacgatgaactcttgttagaagcgccaaaagagcgtgcggaagaggtggcagccctcgcgaaagaagttatggaaggcgtgtggcccttagcggtgcctcttgaagtcgaagttggtattggcgaggattggctggctgccaaagga

SEQ ID NO: 3834 - protein, 841 aa, synthetic construct
  REGION 1..841: note = Variant of DNA polymerase I from Thermus sp. strain 2.9
MHHHHHHGGSGVLPVFEPKGRVLLVDGHHLAYRNFFALKGLTTSSGEPVQGVYGFAKSLLKALKEDGDVVIVVFDAKAPSFRHEAYEAYKSGRAPTPEDFPRQLALMKELVDLLGLERLEVPGFEADDVLATLAKKAEREGYEVQILTADRDLFQLLSPRISVLHPEGHRITPEWLWEKYGLRPEQWVDFRALAGDPSDNIPGVKGIGEKTALKLLKEWGSLENLLKNLDQVKPESVREKILAHLEDLKLSRELSRVRTDLPLEVDFQRRREPDWEGLKAFLERLEFGSLLHEFGLLESPLPAEEAPWPPPEGAFLGYRLSRPEPMWAELLALAASAQGRVYRAEDPHGALRGLFEVRGLLAKDLAVVALREGLDLPPTDDPMLLAYLLDPSNTTPEGVARRYGGEWTEDAAKRALLAERLHANLLGRLQGEERLLWLYEEVEKPLSRVLAHMEATGVKLDVAYLENLSLEVAAHMRRLEEEVFRLAGRSFRLNSRDQLERVLFDELGLPPIGKTEKTGKRSTSAAVLEALREVHPIVDKILQYRELAKLKGTYIDRLPALVHPKTGRLHTRFNQTATATGRLSSSDPNLQNIPVRTPLGQKIRRAFVAEEGWRLVALDYSQIELRVLAHLSGDENLIRVFQEGKDIHTQTASWMFGLSAEAIDPLMRRAAKTINFGVLYGMSAFRLSQELGIPYEEAQAFIQKYFQSYPKVKAWIEKTLEEGRTRGYVETLFGRRRYVPDLNARVKGKREAAERMAFNMPVQGTAADLMKLAMVRLFPQLREVGARMLLQVHDELLLEAPKERAEEVAALAKEVMEGVWPLAVPLEVEVGIGEDWLAAKG

SEQ ID NO: 3835 - DNA, 2523 bp, synthetic construct
  misc_feature 1..2523: note = Variant of DNA polymerase I from Thermus sp. strain 2.9
  source 1..2523: mol_type = other DNA
atgcaccatcatcatcatcatggcggtagcggcgtgttaccggtgttcgagcctaaaggtcgcgtgcttctggttgatggccatcatctcgcgtatcgtaacttctttgccctgaaaggattaaccaccagcagcggcgagccggtacagggtgtctacggctttgcaaagtcgctcctgaaagctctgaaagaagacggtgatgtggtgattgttgtctttgatgcgaaagcgccaagttttcgccacgaagcgtacgaagcttacaaagccgggcgtgctccaacgccggaagactttcctcgccaattggcgcttatgaaggaattagtggatttgcttggcctcgaacgcttggaagttcccggtttcgaggcagacgacgtattagcgactctcgcaaagaaagccgaacgtgagggctatgaagtccagatcttgacagcagatcgcgatcttttccagcttttatctccgcgcatctcggtgttacacccggaagggcatcgtatcaccccggaatggctctgggagaaatatggtttgcgtcccgaacaatgggtggattttcgcgccttagcaggcgatccgagcgacaatattccgggagttaaaggtatcggcgagaagacggcgctcaagctccttaaagaatgggggtcgttggagaacttgcttaagaatttagatcaggtcaaaccagagtcagtgcgtgagaagattcttgctcacctcgaagacctcaaattaagccgcgaattgtcccgtgtacgcaccgatttgccgctcgaagttgatttccaacgccgccgcgaacctgactgggagggtcttaaagcgtttttagagcgtcttgaatttggttcgctcttgcatgaattcggccttttagaaggtccgttaccagccgaagaagcaccttggccaccgcccgagggcgcgtttttaggttaccgtttgagtcgcccggaaccgatgtgggccgaattactggctcttgcagcgtctgcccagggacgtgtgtatcgcgcggaagaccctcatggtgcgctccgcggcctcttcgaagtccgtggactccttgccaaagacttagctgttgttgcattgcgcgaaggtcttgatttacctccgactgatgatccaatgcttcttgcgtacctcttggacccgtcaaacacgacgcccgaaggcgtagcccgtcgttacggcggcgagtggaccgaagatgcagcgaaacgcgcgttattggccgaacgtttgcacgccaatttattaggacgtttgcaaggcgaggaacgtctcctctggctttacgaagaagtggagaaaccattgagtcgcgtgctcgcgcatatggaagctaccggtgtcaaattagacgtggcgtatttggagaatctcagccttgaagttgctgcccacatgcgccgcttggaggaagaagtattccgtttagcaggccgttcctttcgccttaattctcgcgatcagttagaacgtgtgttgttcgatgaacttggtctccctcctatcggcaagacagagaagaccggtaaacgtagcacttcagcggcggttttagaagctcttcgcgaagtccatcccattgtggacaagatcttgcaataccgcgaactcgcgaaattgaaaggcacctatattgaccgtcttccggcattagtccacccgaaaacgggacgcctccatacccgcttcaaccaaacagccacggcgaccggtcgtttgtcctcctctgatccaaaccttcagaatattccagtacgtaccccattgggccagaagatccgccgtgcgtttgtagctgaggagggttggcgtttagtggccctcgattatagccaaattgaattacgtgtccttgcccatctttctggcgatgagaacctcatccgcgtgtttcaggaaggcaaagacattcacactcaaacggcaagctggatgtttggattatcagctgaagcgatcgatcctttgatgcgtcgtgcagcgaagaccatcaatttcggtgttctctacggtatgagtgcctttcgtttgtcgcaggaattaggcattccctatgaagaagctcaggcgttcattcagaaatactttcaaagctatcccaaagttaaagcatggatcgagaagactctcgaagaaggccgcacacgtggttacgtagagaccttatttggacgtcgccgctatgttcccgatttaaacgctcgcgtgaaaggcaagcgtgaagccgccgaacgcatggcgttcaacatgcctgtacagggcacggcagctgacctcatgaaacttgcaatggtgcgcctttttccacaattgcgtgaagttggtgcccgcatgctcttgcaggtccacgatgaactcttgttagaagcgccaaaagagcgtgcggaagaggtggcagccctcgcgaaagaagttatggaaggcgtgtggcccttagcggtgcctcttgaagtcgaagttggtattggcgaggattggctggctgccaaagga

SEQ ID NO: 3836 - protein, 841 aa, synthetic construct; identical to SEQ ID NO: 3686
  REGION 1..841: note = Variant of DNA polymerase I from Thermus sp. strain 2.9

SEQ ID NO: 3837 - DNA, 2523 bp, synthetic construct; identical to SEQ ID NO: 3531
  misc_feature 1..2523: note = Variant of DNA polymerase I from Thermus sp. strain 2.9
  source 1..2523: mol_type = other DNA

SEQ ID NO: 3838 - protein, 841 aa, synthetic construct; identical to SEQ ID NO: 3418
  REGION 1..841: note = Variant of DNA polymerase I from Thermus sp. strain 2.9

SEQ ID NO: 3839 - DNA, 2523 bp, synthetic construct
  misc_feature 1..2523: note = Variant of DNA polymerase I from Thermus sp. strain 2.9
  source 1..2523: mol_type = other DNA
atgcaccatcatcatcatcatggcggtagcggcgtgttacctgtgttcgagcctaaaggtcgcgtgcttctggttgatggccatcatctcgcgtatcgtaacttctttgccctgaaaggattaaccaccagcagcggcgagccggtacagggtgtctacggctttgcaaagtcgctcctgaaagctctgaaagaagacggtgatgtggtgattgttgtctttgatgcgaaagcgccaagttttcgccacgaagcgtacgaagcttacaaagccgggcgtgctccaacgccggaagactttcctcgccaattggcgcttatgaaggaattagtggatttgcttggcctcgaacgcttggaagttcccggtttcgaggcagacgacgtattagcgactctcgcaaagaaagccgaacgtgagggctatgaagtccagatcttgacagcagatcgcgatcttttccagcttttatctccgcgcatctcggtgttacacccggatgggcatcgtatcaccccggaatggctctgggagaaatatggtttgcgtcccgaacaatgggtggattttcgcgccttagcaggcgatccgagcgacaatattccgggagttaaaggtatcggcgagaagacggcgctcaagctccttaaagaatgggggtcgttggagaacttgcttaagaatttagatcaggtcaaaccagagtcagtgcgtgagaagattcttgctcacctcgaagacctcaaattaagccgcgaattgtcccgtgtacgcaccgatttgccgctcgaagttgatttccaacgccgccgcgaacctgactgggagggtcttaaagcgtttttagagcgtcttgaatttggttcgctcttgcatgaattcggccttttagaaagcccgttaccagccgaagaagcaccttggccaccgcccgagggcgcgtttttaggttaccgtttgagtcgcccggaaccgatgtgggccgaattactggctcttgcagcgtctgcccagggacgtgtgtatcgcgcggaagaccctcatggtgcgctccgcggcctcttcgaagtccgtggactccttgccaaagacttagctgttgttgcattgcgcgaaggtcttgatttacctccgactgatgatccaatgcttcttgcgtacctcttggacccgtcaaacacgacgcccgaaggcgtagcccgtcgttacggcggcgagtggaccgaagatgcagcgaaacgcgcgttattggccgaacgtttgcacgccaatttattaggacgtttgcaaggcgaggaacgtctcctctggctttacgaagaagtggagaaaccattgagtcgcgtgctcgcgcatatggaagctaccggtgtcaaattagacgtggcgtatttggagaatctcagccttgaagttgctgcccacatgcgccgcttggaggaagaagtattccgtttagcaggccgttcctttcgccttaattctcgcgatcagttagaacgtgtgttgttcgatgaacttggtctccctcctatcggcaagacagagaagaccggtaaacgtagcacttcagcggcggttttagaagctcttcgcgaagtccatcccattgtggacaagatcttgcaataccgcgaactcgcgaaattgaaaggcacctatattgaccgtcttccggcattagtccacccgaaaacgggacgcctccatacccgcttcaaccaaacagccacggcgaccggtcgtttgtcctcctctgatccaaaccttcagaatattccagtacgtaccccattgggccagaagatccgccgtgcgtttgtagctgaggagggttggcgtttagtggccctcgattatagccaaattgaattacgtgtccttgcccatctttctggcgatgagaacctcatccgcgtgtttcaggaaggcaaagacattcacactcaaacggcaagctggatgtttggattatcagctgaagcgatcgatcctttgatgcgtcgtgcagcgaagaccatcaatttcggtgttctctacggtatgagtgcctttcgtttgtcgcaggaattaggcattccctatgaagaagctcaggcgttcattcagaaatactttcaaagctatcccaaagttaaagcatggatcgagaagactctcgaagaaggccgccaccgtggttacgtagagaccttatttggacgtcgccgctatgttcccgatttaaacgctcgcgtgaaaggcaagcgtgaagccgccgaacgcatggcgttcaacatgcctgtacagggcacggcagctgacctcatgaaacttgcaatggtgcgcctttttccacaattgcgtgaagttggtgcccgcatgctcttgcaggtccacgatgaactcttgttagaagcgccaaaagagcgtgcggaagaggtggcagccctcgcgaaagaagttatggaaggcgtgtggcccttagcggtgcctcttgaagtcgaagttggtattggcgaggattggctggctgccaaagga

SEQ ID NO: 3840 - protein, 841 aa, synthetic construct; identical to SEQ ID NO: 3762
  REGION 1..841: note = Variant of DNA polymerase I from Thermus sp. strain 2.9

SEQ ID NO: 3841 - DNA, 2523 bp, synthetic construct
  misc_feature 1..2523: note = Variant of DNA polymerase I from Thermus sp. strain 2.9
  source 1..2523: mol_type = other DNA
atgcaccatcatcatcatcatggcggtagcggcgtgttagaggtgttcgagcctaaaggtcgcgtgcttctggttgatggccatcatctcgcgtatcgtaacttctttgccctgaaaggattaaccaccagcagcggcgagccggtacagggtgtctacggctttgcaaagtcgctcctgaaagctctgaaagaagacggtgatgtggtgattgttgtctttgatgcgaaagcgccaagttttcgccacgaagcgtacgaagcttacaaagccgggcgtgctccaacgccggaagactttcctcgccaattggcgcttatgaaggaattagtggatttgcttggcctcgaacgcttggaagttcccggtttcgaggcagacgacgtattagcgactctcgcaaagaaagccgaacgtgagggctatgaagtccagatcttgacagcagatcgcgatcttttccagcttttatctccgcgcatctcggtgttacacccggatgggcatcgtatcaccccggaatggctctgggagaaatatggtttgcgtcccgaacaatgggtggattttcgcgccttagcaggcgatccgagcgacaatattccgggagttaaaggtatcggcgagaagacggcgctcaagctccttaaagaatgggggtcgttggagaacttgcttaagaatttagatcaggtcaaaccagagtcagtgcgtgagaagattcttgctcacctcgaagacctcgagttaagccgcgaattgtcccgtgtacgcaccgatttgccgctcgaagttgatttccaacgccgccgcgaacctgactgggagggtcttaaagcgtttttagagcgtcttgaatttggttcgctcttgcatgaattcggccttttagaaagcccgttaccagccgaagaagcaccttggccaccgcccgagggcgcgtttttaggttaccgtttgagtcgcccggaaccgatgtgggccgaattactggctcttgcagcgtctgcccagggacgtgtgtatcgcgcggaagaccctcatggtgcgctccgcggcctcttcgaagtccgtggactccttgccaaagacttagctgttgttgcattgcgcgaaggtcttgatttacctccgactgatgatccaatgcttcttgcgtacctcttggacccgtcaaacacgacgcccgaaggcgtagcccgtcgttacggcggcgagtggaccgaagatgcagcgaaacgcgcgttattggccgaacgtttgcacgccaatttattaggacgtttgcaaggcgaggagcgtctcctctggctttacgaagaagtggagaaaccattgagtcgcgtgctcgcgcatatggaagctaccggtgtcaaattagacgtggcgtatttggagaatctcagccttgaagttgctgcccacatgcgccgcttggaggaagaagtattccgtttagcaggccgttcctttcgccttaattctcgcgatcagttagaacgtgtgttgttcgatgaacttggtctccctcctatcggcaagacagagaagaccggtaaacgtagcacttcagcggcggttttagaagctcttcgcgaagtccatcccattgtggacaagatcttgcaataccgcgaactcgcgaaattgaaaggcacctatattgaccgtcttccggcattagtccacccgaaaacgggacgcctccatacccgcttcaaccaaacagccacggcgaccggtcgtttgtcctcctctgatccaaaccttcagaatattccagtacgtaccaaattgggccagaagatccgccgtgcgtttgtagctgaggagggttggcgtttagtggccctcgattatagccaaattgaattacgtgtccttgcccatctttctggcgatgagaacctcatccgcgtgtttcaggaaggcaaagacattcacactcaaacggcaagctggatgtttggattatcagctgaagcgatcgatcctttgatgcgtcgtgcagcgaagaccatcaatttcggtgttctctacggtatgagtgcctttcgtttgtcgcaggaattaggcattcccaaagaagaagctcaggcgttcattcagaaatactttcaaagctatcccaaagttaaagcatggatcgagaagactctcgaagaaggccgccaccgtggttacgtagagaccttatttggacgtcgccgctatgttcccgatttaaacgctcgcgtgaaaggcaagcgtgaagccgccgaacgcatggcgttcaacatgcctgtacagggcacggcagctgacctcatgaaacttgcaatggtgcgcctttttccacaattgcgtgaagttggtgcccgcatgctcttgcaggtccacgatgaactcttgttagaagcgccaaaagagcgtgcggaagaggtggcagccctcgcgaaagaagttatggaaggcgtgtggcccttagcggtgcctcttgaagtcgaagttggtattggcgaggattggctggctgccaaagga

SEQ ID NO: 3842 - protein, 841 aa, synthetic construct
  REGION 1..841: note = Variant of DNA polymerase I from Thermus sp. strain 2.9
MHHHHHHGGSGVLEVFEPKGRVLLVDGHHLAYRNFFALKGLTTSSGEPVQGVYGFAKSLLKALKEDGDVVIVVFDAKAPSFRHEAYEAYKAGRAPTPEDFPRQLALMKELVDLLGLERLEVPGFEADDVLATLAKKAEREGYEVQILTADRDLFQLLSPRISVLHPDGHRITPEWLWEKYGLRPEQWVDFRALAGDPSDNIPGVKGIGEKTALKLLKEWGSLENLLKNLDQVKPESVREKILAHLEDLELSRELSRVRTDLPLEVDFQRRREPDWEGLKAFLERLEFGSLLHEFGLLESPLPAEEAPWPPPEGAFLGYRLSRPEPMWAELLALAASAQGRVYRAEDPHGALRGLFEVRGLLAKDLAVVALREGLDLPPTDDPMLLAYLLDPSNTTPEGVARRYGGEWTEDAAKRALLAERLHANLLGRLQGEERLLWLYEEVEKPLSRVLAHMEATGVKLDVAYLENLSLEVAAHMRRLEEEVFRLAGRSFRLNSRDQLERVLFDELGLPPIGKTEKTGKRSTSAAVLEALREVHPIVDKILQYRELAKLKGTYIDRLPALVHPKTGRLHTRFNQTATATGRLSSSDPNLQNIPVRTKLGQKIRRAFVAEEGWRLVALDYSQIELRVLAHLSGDENLIRVFQEGKDIHTQTASWMFGLSAEAIDPLMRRAAKTINFGVLYGMSAFRLSQELGIPKEEAQAFIQKYFQSYPKVKAWIEKTLEEGRHRGYVETLFGRRRYVPDLNARVKGKREAAERMAFNMPVQGTAADLMKLAMVRLFPQLREVGARMLLQVHDELLLEAPKERAEEVAALAKEVMEGVWPLAVPLEVEVGIGEDWLAAKG

SEQ ID NO: 3843 - DNA, 2523 bp, synthetic construct
  misc_feature 1..2523: note = Variant of DNA polymerase I from Thermus sp. strain 2.9
  source 1..2523: mol_type = other DNA
atgcaccatcatcatcatcatggcggtagcggcgatttaccggtgttcgagcctaaaggtcgcgtgcttctggttgatggccatcatctcgcgtatcgtaacttctttgccctgaaaggattaaccaccagcagcggcgagccggtacagggtgtctacggctttgcaaagtcgctcctgaaagctctgaaagaagacggtgatgtggtgattgttgtctttgatgcgaaagcgccaagttttcgccacgaagcgtacgaagcttacaaagccgggcgtgctccaacgccggaagactttcctcgccaattggcgcttatgaaggaattagtggatttgcttggcctcgaacgcttggaagttcccggtttcgaggcagacgacgtattagcgactctcgcaaagaaagccgaacgtgagggctatgaagtccagatcttgacagcagatcgcgatcttttccagcttttatctccgcgcatctcggtgttacacccggaagggcatcgtatcaccccggaatggctctgggagaaatatggtttgcgtcccgaacaatgggtggattttcgcgccttagcaggcgatccgagcgacaatattccgggagttaaaggtatcggcgagaagacggcgctcaagctccttaaagaatgggggtcgttggagaacttgcttaagaatttagatcaggtcaaaccagagtcagtgcgtgagaagattcttgctcacctcgaagacctcaaattaagccgcgaattgtcccgtgtacgcaccgatttgccgctcgaagttgatttccaacgccgccgcgaacctgactgggagggtcttaaagcgtttttagagcgtcttgaatttggttcgctcttgcatgaattcggccttttagaaagcccgttaccagccgaagaagcaccttggccaccgcccgagggcgcgtttttaggttaccgtttgagtcgcccggaaccgatgtgggccgaattactggctcttgcagcgtctgcccagggacgtgtgtatcgcgcggaagaccctcatggtgcgctccgcggcctcttcgaagtccgtggactccttgccaaagacttagctgttgttgcattgcgcgaaggtcttgatttacctccgactgatgatccaatgcttcttgcgtacctcttggacccgtcaaacacgacgcccgaaggcgtagcccgtcgttacggcggcgagtggaccgaagatgcagcgaaacgcgcgttattggccgaacgtttgcacgccaatttattaggacgtttgcaaggcgaggaacgtctcctctggctttacgaagaagtggagaaaccattgagtcgcgtgctcgcgcatatggaagctaccggtgtcaaattagacgtggcgtatttggagaatctcagccttgaagttgctgcccacatgcgccgcttggaggaagaagtattccgtttagcaggccgttcctttcgccttaattctcgcgatcagttagaacgtgtgttgttcgatgaacttggtctccctcctatcggcaagacagagaagaccggtaaacgtagcacttcagcggcggttttagaagctcttcgcgaagtccatcccattgtggacaagatcttgcaataccgcgaactcgcgaaattgaaaggcacctatattgaccgtcttccggcattagtccacccgaaaacgggacgcctccatacccgcttcaaccaaacagccacggcgaccggtcgtttgtcctcctctgatccaaaccttcagaatattccagtacgtaccccattgggccagaagatccgccgtgcgtttgtagctgaggagggttggcgtttagtggccctcgattatagccaaattgaattacgtgtccttgcccatctttctggcgatgagaacctcatccgcgtgtttcaggaaggcaaagacattcacactcaaacggcaagctggatgtttggattatcagctgaagcgatcgatcctttgatgcgtcgtgcagcgaagaccatcaatttcggtgttctctacggtatgagtgcctttcgtttgtcgcaggaattaggcattccctatgaagaagctcaggcgttcattcagaaatactttcaaagctatcccaaagttaaagcatggatcgagaagactctcgaagaaggccgcacacgtggttacgtagagaccttatttggacgtcgccgctatgttcccgatttaaacgctcgcgtgaaaggcaagcgtgaagccgccgaacgcatggcgttcaacatgcctgtacagggcacggcagctgacctcatgaaacttgcaatggtgcgcctttttccacaattgcgtgaagttggtgcccgcatgctcttgcaggtccacgatgaactcttgttagaagcgccaaaagagcgtgcggaagaggtggcagccctcgcgaaagaagttatggaaggcgtgtggcccttagcggtgcctcttgaagtcgaagttggtattggcgaggattggctggctgccaaagga

SEQ ID NO: 3844 - protein, 841 aa, synthetic construct
  REGION 1..841: note = Variant of DNA polymerase I from Thermus sp. strain 2.9
MHHHHHHGGSGDLPVFEPKGRVLLVDGHHLAYRNFFALKGLTTSSGEPVQGVYGFAKSLLKALKEDGDVVIVVFDAKAPSFRHEAYEAYKAGRAPTPEDFPRQLALMKELVDLLGLERLEVPGFEADDVLATLAKKAEREGYEVQILTADRDLFQLLSPRISVLHPEGHRITPEWLWEKYGLRPEQWVDFRALAGDPSDNIPGVKGIGEKTALKLLKEWGSLENLLKNLDQVKPESVREKILAHLEDLKLSRELSRVRTDLPLEVDFQRRREPDWEGLKAFLERLEFGSLLHEFGLLESPLPAEEAPWPPPEGAFLGYRLSRPEPMWAELLALAASAQGRVYRAEDPHGALRGLFEVRGLLAKDLAVVALREGLDLPPTDDPMLLAYLLDPSNTTPEGVARRYGGEWTEDAAKRALLAERLHANLLGRLQGEERLLWLYEEVEKPLSRVLAHMEATGVKLDVAYLENLSLEVAAHMRRLEEEVFRLAGRSFRLNSRDQLERVLFDELGLPPIGKTEKTGKRSTSAAVLEALREVHPIVDKILQYRELAKLKGTYIDRLPALVHPKTGRLHTRFNQTATATGRLSSSDPNLQNIPVRTPLGQKIRRAFVAEEGWRLVALDYSQIELRVLAHLSGDENLIRVFQEGKDIHTQTASWMFGLSAEAIDPLMRRAAKTINFGVLYGMSAFRLSQELGIPYEEAQAFIQKYFQSYPKVKAWIEKTLEEGRTRGYVETLFGRRRYVPDLNARVKGKREAAERMAFNMPVQGTAADLMKLAMVRLFPQLREVGARMLLQVHDELLLEAPKERAEEVAALAKEVMEGVWPLAVPLEVEVGIGEDWLAAKG

SEQ ID NO: 3845 - DNA, 2523 bp, synthetic construct; identical to SEQ ID NO: 3301
  misc_feature 1..2523: note = Variant of DNA polymerase I from Thermus sp. strain 2.9
  source 1..2523: mol_type = other DNA

SEQ ID NO: 3846 - protein, 841 aa, synthetic construct; identical to SEQ ID NO: 3302
  REGION 1..841: note = Variant of DNA polymerase I from Thermus sp. strain 2.9

SEQ ID NO: 3847 - DNA, 2523 bp, synthetic construct
  misc_feature 1..2523: note = Variant of DNA polymerase I from Thermus sp. strain 2.9
  source 1..2523: mol_type = other DNA
atgcaccatcatcatcatcatggcggtagcggcgtgttagaggtgttcgagcctaaaggtcgcgtgcttctggttgatggccatcatctcgcgtatcgtaacttctttgccctgaaaggattaaccaccagcagcggcgagccggtacagggtgtctacggctttgcaaagtcgctcctgaaagctctgaaagaagacggtgatgtggtgattgttgtctttgatgcgaaagcgccaagttttcgccacgaagcgtacgaagcttacaaagccgggcgtgctccaacgccggaagactttcctcgccaattggcgcttatgaaggaattagtggatttgcttggcctcgaacgcttggaagttcccggtttcgaggcagacgacgtattagcgactctcgcaaagaaagccgaacgtgagggctatgaagtccagatcttgacagcagatcgcgatcttttccagcttttatctccgcgcatctcggtgttacacccggatgggcatcgtatcaccccggaatggctctgggagaaatatggtttgcgtcccgaacaatgggtggattttcgcgccttagcaggcgatccgagcgacaatattccgggagttaaaggtatcggcgagaagacggcgctcaagctccttaaagaatgggggtcgttggagaacttgcttaagaatttagatcaggtcaaaccagagtcagtgcgtgagaagattcttgctcacctcgaagacctcaagttaagccgcgaattgtcccgtgtacgcaccgatttgccgctcgaagttgatttccaacgccgccgcgaacctgactgggagggtcttaaagcgtttttagagcgtcttgaatttggttcgctcttgcatgaattcggccttttagaaagcccgttaccagccgaagaagcaccttggccaccgcccgagggcgcgtttttaggttaccgtttgagtcgcccggaaccgatgtgggccgaattactggctcttgcagcgtctgcccagggacgtgtgtatcgcgcggaagaccctcatggtgcgctccgcggcctcttcgaagtccgtggactccttgccaaagacttagctgttgttgcattgcgcgaaggtcttgatttacctccgactgatgatccaatgcttcttgcgtacctcttggacccgtcaaacacgacgcccgaaggcgtagcccgtcgttacggcggcgagtggaccgaagatgcagcgaaacgcgcgttattggccgaacgtttgcacgccaatttattaggacgtttgcaaggcgaggaacgtctcctctggctttacgaagaagtggagaaaccattgagtcgcgtgctcgcgcatatggaagctaccggtgtcaaattagacgtggcgtatttggagaatctcagccttgaagttgctgcccacatgcgccgcttggaggaagaagtattccgtttagcaggccgttcctttcgccttaattctcgcgatcagttagaacgtgtgttgttcgatgaacttggtctccctcctatcggcaagacagagaagaccggtaaacgtagcacttcagcggcggttttagaagctcttcgcgaagtccatcccattgtggacaagatcttgcaataccgcgaactcgcgaaattgaaaggcacctatattgaccgtcttccggcattagtccacccgaaaacgggacgcctccatacccgcttcaaccaaacagccacggcgaccggtcgtttgtcctcctctgatccaaaccttcagaatattccagtacgtaccccgttgggccagaagatccgccgtgcgtttgtagctgaggagggttggcgtttagtggccctcgattatagccaaattgaattacgtgtccttgcccatctttctggcgatgagaacctcatccgcgtgtttcaggaaggcaaagacattcacactcaaacggcaagctggatgtttggattatcagctgaagcgatcgatcctttgatgcgtcgtgcagcgaagaccatcaatttcggtgttctctacggtatgagtgcctttcgtttgtcgcaggaattaggcattccctatgaagaagctcaggcgttcattcagaaatactttcaaagctatcccaaagttaaagcatggatcgagaagactctcgaagaaggccgcacacgtggttacgtagagaccttatttggacgtcgccgctatgttcccgatttaaacgctcgcgtgaaaggcaagcgtgaagccgccgaacgcatggcgttcaacatgcctgtacagggcacggcagctgacctcatgaaacttgcaatggtgcgcctttttccacaattgcgtgaagttggtgcccgcatgctcttgcaggtccacgatgaactcttgttagaagcgccaaaagagcgtgcggaagaggtggcagccctcgcgaaagaagttatggaaggcgtgtggcccttagcggtgcctcttgaagtcgaagttggtattggcgaggattggctggctgccaaagga

SEQ ID NO: 3848 - protein, 841 aa, synthetic construct; identical to SEQ ID NO: 3414
  REGION 1..841: note = Variant of DNA polymerase I from Thermus sp. strain 2.9

SEQ ID NO: 3849 - DNA, 2523 bp, synthetic construct
  misc_feature 1..2523: note = Variant of DNA polymerase I from Thermus sp. strain 2.9
  source 1..2523: mol_type = other DNA
atgcaccatcatcatcatcatggcggtagcggcgtgttagaggtgttcgagcctaaaggtcgcgtgcttctggttgatggccatcatctcgcgtatcgtaacttctttgccctgaaaggattaaccaccagcagcggcgagccggtacagggtgtctacggctttgcaaagtcgctcctgaaagctctgaaagaagacggtgatgtggtgattgttgtctttgatgcgaaagcgccaagttttcgccacgaagcgtacgaagcttacaaagccgggcgtgctccaacgccggaagactttcctcgccaattggcgcttatgaaggaattagtggatttgcttggcctcgaacgcttggaagttcccggtttcgaggcagacgacgtattagcgactctcgcaaagaaagccgaacgcgagggctatgaagtccagatcttgacagcagatcgcgatcttttccagcttttatctccgcgcatctcggtgttacacccggaagggcatcgtatcaccccggaatggctctgggagaaatatggtttgcgtcccgaacaatgggtggattttcgcgccttagcaggcgatcctagcgacaatattccgggagttaaaggtatcggcgagaagacggcgctcaagctccttaaagaatgggggtcgttggagaacttgcttaagaatttagatcaggtcaaaccagagtcagtgcgtgagaagattcttgctcacctcgaagacctcaagttaagccgcgaattgtcccgtgtacgcaccgatttgccgctcgaagttgatttccaacgccgccgcgaacctgactgggagggtcttaaagcgtttttagagcgtcttgaatttggttcgctcttgcatgaattcggccttttagaaagcccgttaccagccgaagaagcaccttggccaccgcccgagggcgcgtttttaggttaccgtttgagtcgcccggaaccgatgtgggccgaattactggctcttgcagcgtctgcccagggacgtgtgtatcgcgcggaagaccctcatggtgcgctccgcggcctcttcgaagtccgtggactccttgccaaagacttagctgttgttgcattgcgcgaaggtcttgatttacctccgactgatgatccaatgcttcttgcgtacctcttggacccgtcaaacacgacgcccgaaggcgtagcccgtcgttacggcggcgagtggaccgaagatgcagcgaaacgcgcgttattggccgaacgtttgcacgccaatttattaggacgtttgcaaggcgaggaacgtctcctctggctttacgaagaagtggagaaaccattgagtcgcgtgctcgcgcatatggaagctaccggtgtcaaattagacgtggcgtatttggagaatctcagccttgaagttgctgcccacatgcgccgcttggaggaagaagtattccgtttagcaggccgttcctttcgccttaattctcgcgatcagttagaacgtgtgttgttcgatgaacttggtctccctcctatcggcaagacagagaagaccggtaaacgtagcacttcagcggcggttttagaagctcttcgcgaagtccatcccattgtggacaagatcttgcaataccgcgaactcgcgaaattgaaaggcacctatattgaccgtcttccggcattagtccacccgaaaacgggacgcctccatacccgcttcaaccaaacagccacggcgaccggtcgtttgtcctcctctgatccaaaccttcagaatattccagtacgtaccaaattgggccagaagatccgccgtgcgtttgtagctgaggagggttggcgtttagtggccctcgattatagccaaattgaattacgtgtccttgcccatctttctggcgatgagaacctcatccgcgtgtttcaggaaggcaaagacattcacactcaaacggcaagctggatgtttggattatcagctgaagcgatcgatcctttgatgcgtcgtgcagcgaagaccatcaatttcggtgttctctacggtatgagtgcctttcgtttgtcgcaggaattaggcattccctatgaagaagctcaggcgttcattcagaaatactttcaaagctatcccaaagttaaagcatggatcgagaagactctcgaagaaggccgcacacgtggttacgtagagaccttatttggacgtcgccgctatgttcccgatttaaacgctcgcgtgaaaggcaagcgtgaagccgccgaacgcatggcgttcaacatgcctgtacagggcacggcagctgacctcatgaaacttgcaatggtgcgcctttttccacaattgcgtgaagttggtgcccgcatgctcttgcaggtccacgatgaactcttgttagaagcgccaaaagagcgtgcggaagaggtggcagccctcgcgaaagaagttatggaaggcgtgtggcccttagcggtgcctcttgaagtcgaagttggtattggcgaggattggctggctgccaaagga

SEQ ID NO: 3850 - protein, 841 aa, synthetic construct; identical to SEQ ID NO: 3516
  REGION 1..841: note = Variant of DNA polymerase I from Thermus sp. strain 2.9

SEQ ID NO: 3851 - DNA, 2523 bp, synthetic construct
  misc_feature 1..2523: note = Variant of DNA polymerase I from Thermus sp. strain 2.9
  source 1..2523: mol_type = other DNA
atgcaccatcatcatcatcatggcggtagcggcgtgttaccggtgttcgagcctaaaggtcgcgtgcttctggttgatggccatcatctcgcgtatcgtaacttctttgccctgaaaggattaaccaccagcagcggcgagccggtacagggtgtctacggctttgcaaagtcgctcctgaaagctctgaaagaagacggtgatgtggtgattgttgtctttgatgcgaaagcgccaagttttcgccacgaagcgtacgaagcttacaaagccgggcgtgctccaacgccggaagactttcctcgccaattggcgcttatgaaggaattagtggatttgcttggcctcgaacgcttggaagttcccggtttcgaggcagacgacgtattagcgactctcgcaaagaaagccgaacgtgagggctatgaagtccagatcttgacagcagatcgcgatcttttccagcttttatctccgcgcatctcggtgttacacccggaagggcatcgtatcaccccggaatggctctgggagaaatatggtttgcgtcccgaacaatgggtggattttcgcgccttagcaggcgatccgagcgacaatattccgggagttaaaggtatcggcgagaagacggcgctcaagctccttaaagaatgggggtcgttggagaacttgcttaagaatttagatcaggtcaaaccagagtcagtgcgtgagaagattcttgctcacctcgaagacctcaaattaagccgcgaattgtcccgtgtacgcaccgatttgccgctcgaagttgatttccaacgccgccgcgaacctgactgggagggtcttaaagcgtttttagagcgtcttgaatttggttcgctcttgcatgaattcggccttttagaaagcccgttaccagccgaagaagcaccttggccaccgcccgagggcgcgtttttaggttaccgtttgagtcgcccggaaccgatgtgggccgaattactggctcttgcagcgtctgcccagggacgtgtgtatcgcgcggaagaccctcatggtgcgctccgcggcctcttcgaagtccgtggactccttgccaaagacttagctgttgttgcattgcgcgaaggtcttgatttacctccgactgatgatccaatgcttcttgcgtacctcttggacccgtcaaacacgacgcccgaaggcgtagcccgtcgttacggcggcgagtggaccgaagatgcagcgaaacgcgcgttattggccgaacgtttgcacgccaatttaggtggacgtttgcaaggcgaggaacgtctcctctggctttacgaagaagtggagaaaccattgagtcgcgtgctcgcgcatatggaagctaccggtgtcaaattagacgtggcgtatttggagaatctcagccttgaagttgctgcccacatgcgccgcttggaggaagaagtattccgtttagcaggccgttcctttcgccttaattctcgcgatcagttagaacgtgtgttgttcgatgaacttggtctccctcctatcggcaagacagagaagaccggtaaacgtagcacttcagcggcggttttagaagctcttcgcgaagtccatcccattgtggacaagatcttgcaataccgcgaactcgcgaaattgaaaggcacctatattgaccgtcttccggcattagtccacccgaaaacgggacgcctccatacccgcttcaaccaaacagccacggcgaccggtcgtttgtcctcctctgatccaaaccttcagaatattccagtacgtaccccattgggccagaagatccgccgtgcgtttgtagctgaggagggttggcgtttagtggccctcgattatagccaaattgaattacgtgtccttgcccatctttctggcgatgagaacctcatccgcgtgtttcaggaaggcaaagacattcacactcaaacggcaagctggatgtttggattatcagctgaagcgatcgatcctttgatgcgtcgtgcagcgaagaccatcaatttcggtgttctctacggtatgagtgcctttcgtttgtcgcaggaattaggcattccctatgaagaagctcaggcgttcattcagaaatactttcaaagctatcccaaagttaaagcatggatcgagaagactctcgaagaaggccgcacacgtggttacgtagagaccttatttggacgtcgccgctatgttcccgatttaaacgctcgcgtgaaaggcaagcgtgaagccgccgaacgcatggcgttcaacatgcctgtacagggcacggcagctgacctcatgaaacttgcaatggtgcgcctttttccacaattgcgtgaagttggtgcccgcatgctcttgcaggtccacgatgaactcttgttagaagcgccaaaagagcgtgcggaagaggtggcagccctcgcgaaagaagttatggaaggcgtgtggcccttagcggtgcctcttgaagtcgaagttggtattggcgaggattggctggctgccaaagga

SEQ ID NO: 3852 - protein, 841 aa, synthetic construct; identical to SEQ ID NO: 3476
  REGION 1..841: note = Variant of DNA polymerase I from Thermus sp. strain 2.9

SEQ ID NO: 3853 - DNA, 2523 bp, synthetic construct
  misc_feature 1..2523: note = Variant of DNA polymerase I from Thermus sp. strain 2.9
  source 1..2523: mol_type = other DNA
atgcaccatcatcatcatcatggcggtagcggcgtgttaccggtgttcgagcctaaaggtcgcgtgcttctggttgatggccatcatctcgcgtatcgtaacttctttgccctgaaaggattaaccaccagcagcggcgagccggtacagggtgtctacggctttgcaaagtcgctcctgaaagctctgaaagaagacggtgatgtggtgattgttgtctttgatgcgaaagcgccaagttttcgccacgaagcgtacgaagcttacaaagccgggcgtgctccaacgccggaagactttcctcgccaattggcgcttatgaaggaattagtggatttgcttggcctcgaacgcttggaagttcccggtttcgaggcagacgacgtattagcgactctcgcaaagaaagccgaacgtgagggctatgaagtccagatcttgacagcagatcgcgatcttttccagcttttatctccgcgcatctcggtgttacacccggaagggcatcgtatcaccccggaatggctctgggagaaatatggtttgcgtcccgaacaatgggtggattttcgcgccttagcaggcgatccgagcgacaatattccgggagttaaaggtatcggcgagaagacggcgctcaagctccttaaagaatgggggtcgttggagaacttgcttaagaatttagatcaggtcaaaccagagtcagtgcgtgagaagattcttgctcacctcgaagacctcaaattaagccgcgaattgtcccgtgtacgcaccgatttgccgctcgaagttgatttccaacgccgccgcgaacctgactgggagggtcttaaagcgtttttagagcgtcttgaatttggttcgctcttgcatgaattcggccttttagaaagcccgttaccagccgaagaagcaccttggccaccgcccgagggcgcgtttttaggttaccgtttgagtcgcccggaaccgatgtgggccgaattactggctcttgcagcgtctgcccagggacgtgtgtatcgcgcggaagaccctcatggtgcgctccgcggcctcttcgaagtccgtggactccttgccaaagacttagctgttgttgcattgcgcgaaggtcttgatttacctccgactgatgatccaatgcttcttgcgtacctcttggacccgtcaaacacgacgcccgaaggcgtagcccgtcgttacggcggcgagtggaccgaagatgcagcgaaacgcgcgttattggccgaacgtttgcacgccaatttagttggacgtttgcaaggcgaggaacgtctcctctggctttacgaagaagtggagaaaccattgagtcgcgtgctcgcgcatatggaagctaccggtgtcaaattagacgtggcgtatttggagaatctcagccttgaagttgctgcccacatgcgccgcttggaggaagaagtattccgtttagcaggccgttcctttcgccttaattctcgcgatcagttagaacgtgtgttgttcgatgaacttggtctccctcctatcggcaagacagagaagaccggtaaacgtagcacttcagcggcggttttagaagctcttcgcgaagtccatcccattgtggacaagatcttgcaataccgcgaactcgcgaaattgaaaggcacctatattgaccgtcttccggcattagtccacccgaaaacgggacgcctccatacccgcttcaaccaaacagccacggcgaccggtcgtttgtcctcctctgatccaaaccttcagaatattccagtacgtaccccattgggccagaagatccgccgtgcgtttgtagctgaggagggttggcgtttagtggccctcgattatagccaaattgaattacgtgtccttgcccatctttctggcgatgagaacctcatccgcgtgtttcaggaaggcaaagacattcacactcaaacggcaagctggatgtttggattatcagctgaagcgatcgatcctttgatgcgtcgtgcagcgaagaccatcaatttcggtgttctctacggtatgagtgcctttcgtttgtcgcaggaattaggcattccctatgaagaagctcaggcgttcattcagaaatactttcaaagctatcccaaagttaaagcatggatcgagaagactctcgaagaaggccgcacacgtggttacgtagagaccttatttggacgtcgccgctatgttcccgatttaaacgctcgcgtgaaaggcaagcgtgaagccgccgaacgcatggcgttcaacatgcctgtacagggcacggcagctgacctcatgaaacttgcaatggtgcgcctttttccacaattgcgtgaagttggtgcccgcatgctcttgcaggtccacgatgaactcttgttagaagcgccaaaagagcgtgcggaagaggtggcagccctcgcgaaagaagttatggaaggcgtgtggcccttagcggtgcctcttgaagtcgaagttggtattggcgaggattggctggctgccaaagga

SEQ ID NO: 3854 - protein, 841 aa, synthetic construct
  REGION 1..841: note = Variant of DNA polymerase I from Thermus sp. strain 2.9
MHHHHHHGGSGVLPVFEPKGRVLLVDGHHLAYRNFFALKGLTTSSGEPVQGVYGFAKSLLKALKEDGDVVIVVFDAKAPSFRHEAYEAYKAGRAPTPEDFPRQLALMKELVDLLGLERLEVPGFEADDVLATLAKKAEREGYEVQILTADRDLFQLLSPRISVLHPEGHRITPEWLWEKYGLRPEQWVDFRALAGDPSDNIPGVKGIGEKTALKLLKEWGSLENLLKNLDQVKPESVREKILAHLEDLKLSRELSRVRTDLPLEVDFQRRREPDWEGLKAFLERLEFGSLLHEFGLLESPLPAEEAPWPPPEGAFLGYRLSRPEPMWAELLALAASAQGRVYRAEDPHGALRGLFEVRGLLAKDLAVVALREGLDLPPTDDPMLLAYLLDPSNTTPEGVARRYGGEWTEDAAKRALLAERLHANLVGRLQGEERLLWLYEEVEKPLSRVLAHMEATGVKLDVAYLENLSLEVAAHMRRLEEEVFRLAGRSFRLNSRDQLERVLFDELGLPPIGKTEKTGKRSTSAAVLEALREVHPIVDKILQYRELAKLKGTYIDRLPALVHPKTGRLHTRFNQTATATGRLSSSDPNLQNIPVRTPLGQKIRRAFVAEEGWRLVALDYSQIELRVLAHLSGDENLIRVFQEGKDIHTQTASWMFGLSAEAIDPLMRRAAKTINFGVLYGMSAFRLSQELGIPYEEAQAFIQKYFQSYPKVKAWIEKTLEEGRTRGYVETLFGRRRYVPDLNARVKGKREAAERMAFNMPVQGTAADLMKLAMVRLFPQLREVGARMLLQVHDELLLEAPKERAEEVAALAKEVMEGVWPLAVPLEVEVGIGEDWLAAKG

SEQ ID NO: 3855 - DNA, 2523 bp, synthetic construct
  misc_feature 1..2523: note = Variant of DNA polymerase I from Thermus sp. strain 2.9
  source 1..2523: mol_type = other DNA
atgcaccatcatcatcatcatggcggtagcggcgtgttaccggtgttcgagcctaaaggtcgcgtgcttctggttgatggccatcatctcgcgtatcgtaacttctttgccctgaaaggattaaccaccagcagcggcgagccggtacagggtgtctacggctttgcaaagtcgctcctgaaagctctgaaagaagacggtgatgtggtgattgttgtctttgatgcgaaagcgccaagttttcgccacgaagcgtacgaagcttacaaagccgggcgtgctccaacgccggaagactttcctcgccaattggcgcttatgaaggaattagtggatttgcttggcctcgaacgcttggaagttcccggtttcgaggcagacgacgtattagcgactctcgcaaagaaagccgaacgtgagggctatgaagtccagatcttgacagcagatcgcgatcttttccagcttttatctccgcgcatctcggtgttacacccggaagggcatcgtatcaccccggaatggctctgggagaaatatggtttgcgtcccgaacaatgggtggattttcgcgccttagcaggcgatccgagcgacaatattccgggagttaaaggtatcggcgagaagacggcgctcaagctccttaaagaatgggggtcgttggagaacttgcttaagaatttagatcaggtcaaaccagagtcagtgcgtgagaagattcttgctcacctcgaagacctcaaattaagccgcgaattgtcccgtgtacgcaccgatttgccgctcgaagttgatttccaacgccgccgcgaacctgactgggagggtcttaaagcgtttttagagcgtcttgaatttggttcgctcttgcatgaattcggccttttagaaagcccgttaccagccgaagaagcaccttggccaccgcccgagggcgcgtttttaggttaccgtttgagtcgcccggaaccgatgtgggccgaattactggctcttgcagcgtctgcccagggacgtgtgtatcgcgcggaagaccctcatggtgcgctccgcggcctcttcgaagtccgtggactccttgccaaagacttagctgttgttgcattgcgcgaaggtcttgatttacctccgactgatgatccaatgcttcttgcgtacctcttggacccgtcaaacacgacgcccgaaggcgtagcccgtcgttacggcggcgagtggaccgaagatgcagcgaaacgcgcgttattggccgaacgtttgcactttaatttattaggacgtttgcaaggcgaggaacgtctcctctggctttacgaagaagtggagaaaccattgagtcgcgtgctcgcgcatatggaagctaccggtgtcaaattagacgtggcgtatttggagaatctcagccttgaagttgctgcccacatgcgccgcttggaggaagaagtattccgtttagcaggccgttcctttcgccttaattctcgcgatcagttagaacgtgtgttgttcgatgaacttggtctccctcctatcggcaagacagagaagaccggtaaacgtagcacttcagcggcggttttagaagctcttcgcgaagtccatcccattgtggacaagatcttgcaataccgcgaactcgcgaaattgaaaggcacctatattgaccgtcttccggcattagtccacccgaaaacgggacgcctccatacccgcttcaaccaaacagccacggcgaccggtcgtttgtcctcctctgatccaaaccttcagaatattccagtacgtaccccattgggccagaagatccgccgtgcgtttgtagctgaggagggttggcgtttagtggccctcgattatagccaaattgaattacgtgtccttgcccatctttctggcgatgagaacctcatccgcgtgtttcaggaaggcaaagacattcacactcaaacggcaagctggatgtttggattatcagctgaagcgatcgatcctttgatgcgtcgtgcagcgaagaccatcaatttcggtgttctctacggtatgagtgcctttcgtttgtcgcaggaattaggcattccctatgaagaagctcaggcgttcattcagaaatactttcaaagctatcccaaagttaaagcatggatcgagaagactctcgaagaaggccgcacacgtggttacgtagagaccttatttggacgtcgccgctatgttcccgatttaaacgctcgcgtgaaaggcaagcgtgaagccgccgaacgcatggcgttcaacatgcctgtacagggcacggcagctgacctcatgaaacttgcaatggtgcgcctttttccacaattgcgtgaagttggtgcccgcatgctcttgcaggtccacgatgaactcttgttagaagcgccaaaagagcgtgcggaagaggtggcagccctcgcgaaagaagttatggaaggcgtgtggcccttagcggtgcctcttgaagtcgaagttggtattggcgaggattggctggctgccaaagga

SEQ ID NO: 3856 - protein, 841 aa, synthetic construct
  REGION 1..841: note = Variant of DNA polymerase I from Thermus sp. strain 2.9
MHHHHHHGGSGVLPVFEPKGRVLLVDGHHLAYRNFFALKGLTTSSGEPVQGVYGFAKSLLKALKEDGDVVIVVFDAKAPSFRHEAYEAYKAGRAPTPEDFPRQLALMKELVDLLGLERLEVPGFEADDVLATLAKKAEREGYEVQILTADRDLFQLLSPRISVLHPEGHRITPEWLWEKYGLRPEQWVDFRALAGDPSDNIPGVKGIGEKTALKLLKEWGSLENLLKNLDQVKPESVREKILAHLEDLKLSRELSRVRTDLPLEVDFQRRREPDWEGLKAFLERLEFGSLLHEFGLLESPLPAEEAPWPPPEGAFLGYRLSRPEPMWAELLALAASAQGRVYRAEDPHGALRGLFEVRGLLAKDLAVVALREGLDLPPTDDPMLLAYLLDPSNTTPEGVARRYGGEWTEDAAKRALLAERLHFNLLGRLQGEERLLWLYEEVEKPLSRVLAHMEATGVKLDVAYLENLSLEVAAHMRRLEEEVFRLAGRSFRLNSRDQLERVLFDELGLPPIGKTEKTGKRSTSAAVLEALREVHPIVDKILQYRELAKLKGTYIDRLPALVHPKTGRLHTRFNQTATATGRLSSSDPNLQNIPVRTPLGQKIRRAFVAEEGWRLVALDYSQIELRVLAHLSGDENLIRVFQEGKDIHTQTASWMFGLSAEAIDPLMRRAAKTINFGVLYGMSAFRLSQELGIPYEEAQAFIQKYFQSYPKVKAWIEKTLEEGRTRGYVETLFGRRRYVPDLNARVKGKREAAERMAFNMPVQGTAADLMKLAMVRLFPQLREVGARMLLQVHDELLLEAPKERAEEVAALAKEVMEGVWPLAVPLEVEVGIGEDWLAAKG

SEQ ID NO: 3857 - DNA, 2523 bp, synthetic construct
  misc_feature 1..2523: note = Variant of DNA polymerase I from Thermus sp. strain 2.9
  source 1..2523: mol_type = other DNA
atgcaccatcatcatcatcatggcggtagcggcgtgttaccggtgttcgagcctaaaggtcgcgtgcttctggttgatggccatcatctcgcgtatcgtaacttctttgccctgaaaggattaaccaccagcagcggcgagccggtacagggtgtctacggctttgcaaagtcgctcctgaaagctctgaaagaagacggtgatgtggtgattgttgtctttgatgcgaaagcgccaagttttcgccacgaagcgtacgaagcttacaaagccgggcgtgctccaacgccggaagactttcctcgccaattggcgcttatgaaggaattagtggatttgcttggcctcgaacgcttggaagttcccggtttcgaggcagacgacgtattagcgactctcgcaaagaaagccgaacgtgagggctatgaagtccagatcttgacagcagatcgcgatcttttccagcttttatctccgcgcatctcggtgttacacccggaagggcatcgtatcaccccggaatggctctgggagaaatatggtttgcgtcccgaacaatgggtggattttcgcgccttagcaggcgatccgagcgacaatattccgggagttaaaggtatcggcgagaagacggcgctcaagctccttaaagaatgggggtcgttggagaacttgctttctaatttagatcaggtcaaaccagagtcagtgcgtgagaagattcttgctcacctcgaagacctcaaattaagccgcgaattgtcccgtgtacgcaccgatttgccgctcgaagttgatttccaacgccgccgcgaacctgactgggagggtcttaaagcgtttttagagcgtcttgaatttggttcgctcttgcatgaattcggccttttagaaagcccgttaccagccgaagaagcaccttggccaccgcccgagggcgcgtttttaggttaccgtttgagtcgcccggaaccgatgtgggccgaattactggctcttgcagcgtctgcccagggacgtgtgtatcgcgcggaagaccctcatggtgcgctccgcggcctcttcgaagtccgtggactccttgccaaagacttagctgttgttgcattgcgcgaaggtcttgatttacctccgactgatgatccaatgcttcttgcgtacctcttggacccgtcaaacacgacgcccgaaggcgtagcccgtcgttacggcggcgagtggaccgaagatgcagcgaaacgcgcgttattggccgaacgtttgcacgccaatttattaggacgtttgcaaggcgaggaacgtctcctctggctttacgaagaagtggagaaaccattgagtcgcgtgctcgcgcatatggaagctaccggtgtcaaattagacgtggcgtatttggagaatctcagccttgaagttgctgcccacatgcgccgcttggaggaagaagtattccgtttagcaggccgttcctttcgccttaattctcgcgatcagttagaacgtgtgttgttcgatgaacttggtctccctcctatcggcaagacagagaagaccggtaaacgtagcacttcagcggcggttttagaagctcttcgcgaagtccatcccattgtggacaagatcttgcaataccgcgaactcgcgaaattgaaaggcacctatattgaccgtcttccggcattagtccacccgaaaacgggacgcctccatacccgcttcaaccaaacagccacggcgaccggtcgtttgtcctcctctgatccaaaccttcagaatattccagtacgtaccccattgggccagaagatccgccgtgcgtttgtagctgaggagggttggcgtttagtggccctcgattatagccaaattgaattacgtgtccttgcccatctttctggcgatgagaacctcatccgcgtgtttcaggaaggcaaagacattcacactcaaacggcaagctggatgtttggattatcagctgaagcgatcgatcctttgatgcgtcgtgcagcgaagaccatcaatttcggtgttctctacggtatgagtgcctttcgtttgtcgcaggaattaggcattccctatgaagaagctcaggcgttcattcagaaatactttcaaagctatcccaaagttaaagcatggatcgagaagactctcgaagaaggccgcacacgtggttacgtagagaccttatttggacgtcgccgctatgttcccgatttaaacgctcgcgtgaaaggcaagcgtgaagccgccgaacgcatggcgttcaacatgcctgtacagggcacggcagctgacctcatgaaacttgcaatggtgcgcctttttccacaattgcgtgaagttggtgcccgcatgctcttgcaggtccacgatgaactcttgttagaagcgccaaaagagcgtgcggaagaggtggcagccctcgcgaaagaagttatggaaggcgtgtggcccttagcggtgcctcttgaagtcgaagttggtattggcgaggattggctggctgccaaagga

SEQ ID NO: 3858 - protein, 841 aa, synthetic construct
  REGION 1..841: note = Variant of DNA polymerase I from Thermus sp. strain 2.9
MHHHHHHGGSGVLPVFEPKGRVLLVDGHHLAYRNFFALKGLTTSSGEPVQGVYGFAKSLLKALKEDGDVVIVVFDAKAPSFRHEAYEAYKAGRAPTPEDFPRQLALMKELVDLLGLERLEVPGFEADDVLATLAKKAEREGYEVQILTADRDLFQLLSPRISVLHPEGHRITPEWLWEKYGLRPEQWVDFRALAGDPSDNIPGVKGIGEKTALKLLKEWGSLENLLSNLDQVKPESVREKILAHLEDLKLSRELSRVRTDLPLEVDFQRRREPDWEGLKAFLERLEFGSLLHEFGLLESPLPAEEAPWPPPEGAFLGYRLSRPEPMWAELLALAASAQGRVYRAEDPHGALRGLFEVRGLLAKDLAVVALREGLDLPPTDDPMLLAYLLDPSNTTPEGVARRYGGEWTEDAAKRALLAERLHANLLGRLQGEERLLWLYEEVEKPLSRVLAHMEATGVKLDVAYLENLSLEVAAHMRRLEEEVFRLAGRSFRLNSRDQLERVLFDELGLPPIGKTEKTGKRSTSAAVLEALREVHPIVDKILQYRELAKLKGTYIDRLPALVHPKTGRLHTRFNQTATATGRLSSSDPNLQNIPVRTPLGQKIRRAFVAEEGWRLVALDYSQIELRVLAHLSGDENLIRVFQEGKDIHTQTASWMFGLSAEAIDPLMRRAAKTINFGVLYGMSAFRLSQELGIPYEEAQAFIQKYFQSYPKVKAWIEKTLEEGRTRGYVETLFGRRRYVPDLNARVKGKREAAERMAFNMPVQGTAADLMKLAMVRLFPQLREVGARMLLQVHDELLLEAPKERAEEVAALAKEVMEGVWPLAVPLEVEVGIGEDWLAAKG

SEQ ID NO: 3859 - DNA, 2523 bp, synthetic construct
  misc_feature 1..2523: note = Variant of DNA polymerase I from Thermus sp. strain 2.9
  source 1..2523: mol_type = other DNA
atgcaccatcatcatcatcatggcggtagcggcgtgttaccggtgttcgagcctaaaggtcgcgtgcttctggttgatggccatcatctcgcgtatcgtaacttctttgccctgaaaggattaaccaccagcagtggcgagccggtacagggtgtctacggctttgcaaagtcgctcctgaaagctctgaaagaagacggtgatgtggtgattgttgtctttgatgcgaaagcgccaagttttcgccacgaagcgtacgaagcttacaaagccgggcgtgctccaacgccggaagactttcctcgccaattggcgcttatgaaggaattagtggatttgcttggcctcgaacgcttggaagttcccggtttcgaggcagacgacgtattagcgactctcgcaaagaaagccgaacgtgagggctatgaagtccagatcttgacagcagatcgcgatcttttccagcttttatctccgcgcatctcggtgttacacccggaagggcatcgtatcaccccggaatggctctgggagaaatatggtttgcgtcccgaacaatgggtggattttcgcgccttagcaggcgatccgagcgacaatattccgggagttaaaggtatcggcgagaagacggcgctcaagctccttaaagaatgggggtcgttggagaacttgcttaagaatttagatcaggtcaaaccagagtcagtgcgtgagaagattcttgctcacctcgaagacctcaaattaagccgcgaattgtcccgtgtacgcaccgatttgccgctcgaagttgatttccaacgccgccgcgaacctgactgggagggtcttaaagcgtttttagagcgtcttgaatttggttcgctcttgcatgaattcggccttttagaaagcccgttaccagccgaagaagcaccttggccaccgcccgagggcgcgtttttaggttaccgtttgagtcgcccggaaccgatgtgggccgaattactggctcttgcagcgtctgcccagggacgtgtgtatcgcgcggaagaccctcatggtgcgctccgcggcctcttcgaagtccgtggactccttgccaaagacttagctgttgttgcattgcgcgaaggtcttgatttacctccgactgatgatccaatgcttcttgcgtacctcttggacccgtcaaacacgacgcccgaaggcgtagcccgtcgttacggcggcgagtggaccgaagatgcagcgaaacgcgcgttattggccgaacgtttgcacgccaatttattaggacgtttgcaaggcgaggaacgtctcctctggctttacgaagaagtggagaaaccattgagtcgcgtgctcgcgcatatggaagctaccggtgtcaaattagacgtggcgtatttggagaatctcagccttgaagttgctgcccacatgcgccgcttggaggaagaagtattccgtttagcaggccgttcctttcgccttaattctcgcgatcagttagaacgtgtgttgttcgatgaacttggtctccctcctatcggcaagacagagaagaccggtaaacgtagcacttcagctgcggttttagaggctcttcgcgaagtccatcccattgtggacaagatcttggtctaccgcgaactcgcgaaattgaaaggcacctatattgaccgtcttccggcattagtccacccgaaaacgggacgcctccatacccgcttcaaccaaacagccacggcgaccggtcgtttgtcctcctctgatccaaaccttcagaatattccagtacgtaccccattgggccagaagatccgccgtgcgtttgtagctgaggagggttggcgtttagtggccctcgattatcgtcaaattgaattacgtgtccttgcccatctttctggcgatgagaacctcatccgcgtgtttcaggaaggcaaagacattcacactcaaacggcaagctggatgtttggattatcagctgaagcgatcgatcctttgatgcgtcgtgcagcgaagaccatcaatttcggtgttctctacggtatgagtgcctttcgtttgtcgcaggaattaggcattccctatgaagaagctcaggcgttcattcagaaatactttcaaagctatcccaaagttaaagcatggatcgagaagactctccgtgaaggccgcacacgtggttacgtagagaccttatttggacgtcgccgctatgttcccgatttaaacgctcgcgtgaaaggcaagcgtgaagccgccgaacgcatggcgttcaacatgcctgtacagggcacggcagctgacctcatgaaacttgcaatggtgcgcctttttccacaattgcgtgaagttggtgcccgcatgctcttgcaggtccacgatgaactcttgttagaagcgccaaaagagcgtgcggaagaggtggcagccctcgcgaaagaagttatggaaggcgtgtggcccttagcggtgcctcttgaagtcgaagttggtattggcgaggattggctggctgccaaagga

SEQ ID NO: 3860 - protein, 841 aa, synthetic construct
  REGION 1..841: note = Variant of DNA polymerase I from Thermus sp. strain 2.9
MHHHHHHGGSGVLPVFEPKGRVLLVDGHHLAYRNFFALKGLTTSSGEPVQGVYGFAKSLLKALKEDGDVVIVVFDAKAPSFRHEAYEAYKAGRAPTPEDFPRQLALMKELVDLLGLERLEVPGFEADDVLATLAKKAEREGYEVQILTADRDLFQLLSPRISVLHPEGHRITPEWLWEKYGLRPEQWVDFRALAGDPSDNIPGVKGIGEKTALKLLKEWGSLENLLKNLDQVKPESVREKILAHLEDLKLSRELSRVRTDLPLEVDFQRRREPDWEGLKAFLERLEFGSLLHEFGLLESPLPAEEAPWPPPEGAFLGYRLSRPEPMWAELLALAASAQGRVYRAEDPHGALRGLFEVRGLLAKDLAVVALREGLDLPPTDDPMLLAYLLDPSNTTPEGVARRYGGEWTEDAAKRALLAERLHANLLGRLQGEERLLWLYEEVEKPLSRVLAHMEATGVKLDVAYLENLSLEVAAHMRRLEEEVFRLAGRSFRLNSRDQLERVLFDELGLPPIGKTEKTGKRSTSAAVLEALREVHPIVDKILVYRELAKLKGTYIDRLPALVHPKTGRLHTRFNQTATATGRLSSSDPNLQNIPVRTPLGQKIRRAFVAEEGWRLVALDYRQIELRVLAHLSGDENLIRVFQEGKDIHTQTASWMFGLSAEAIDPLMRRAAKTINFGVLYGMSAFRLSQELGIPYEEAQAFIQKYFQSYPKVKAWIEKTLREGRTRGYVETLFGRRRYVPDLNARVKGKREAAERMAFNMPVQGTAADLMKLAMVRLFPQLREVGARMLLQVHDELLLEAPKERAEEVAALAKEVMEGVWPLAVPLEVEVGIGEDWLAAKG

SEQ ID NO: 3861 - DNA, 2523 bp, synthetic construct
  misc_feature 1..2523: note = Variant of DNA polymerase I from Thermus sp. strain 2.9
  source 1..2523: mol_type = other DNA
atgcaccatcatcatcatcatggcggtagcggcgtgttaccggtgttcgagcctaaaggtcgcgtgcttctggttgatggccatcatctcgcgtatcgtaacttctttgccctgaaaggattaaccaccagcagcggcgagccggtacagggtgtctacggctttgcaaagtcgctcctgaaagctctgaaagaagacggtgatgtggtgattgttgtctttgatgcgaaagcgccaagttttcgccacgaagcgtacgaagcttacaaagccgggcgtgctccaacgccggaagactttcctcgccaattggcgcttatgaaggaattagtggatttgcttggcctcgaacgcttggaagttcccggtttcgaggcagacgacgtattagcgactctcgcaaagaaagccgaacgtgagggctatgaagtccagatcttgacagcagatcgcgatcttttccagcttttatctccgcgcatctcggtgttacacccggaagggcatcgtatcaccccggaatggctctgggagaaatatggtttgcgtcccgaacaatgggtggattttcgcgccttagcaggcgatccgagcgacaatattccgggagttaaaggtatcggcgagaagacggcgctcaagctccttaaagaatgggggtcgttggagaacttgcttaagaatttagatcaggtcaaaccagagtcagtgcgtgagaagattcttgctcacctcgaagacctcaaattaagccgcgaattgtcccgtgtacgcaccgatttgccgctcgaagttgatttccaacgccgccgcgaacctgactgggagggtcttaaagcgtttttagagcgtcttgaatttggttcgctcttgcatgaattcggccttttagaaagcccgttaccagccgaagaagcaccttggccaccgcccgagggcgcgtttttaggttaccgtttgagtcgcccggaaccgatgtgggccgaattactggctcttgcagcgtctgcccagggacgtgtgtatcgcgcggaagaccctcatggtgcgctccgcggcctcttcgaagtccgtggactccttgccaaagacttagctgttgttgcattgcgcgaaggtcttgatttacctccgactgatgatccaatgcttcttgcgtacctcttggacccgtcaaacacgacgcccgaaggcgtagcccgtcgttacggcggcgagtggaccgaagatgcagcgaaacgcgcgttattggccgaacgtttgcacgcaaatttattaggacgtttgcaaggcgaggaacgtctcctctggctttacgaagaagtggagaaaccattgagtcgcgtgctcgcgcatatggaagctaccggtgtcaaattagacgtggcgtatttggagaatctcagccttgaagttgctgcccacatgcgccgcttggaggaagaagtattccgtttagcaggccgttcctttcgccttaattctcgcgatcagttagaacgtgtgttgttcgatgaacttggtctccctcctatcggcaagacagagaagaccggtaaacgtagcacttcagctgcggttttagaggctcttcgcgaagtccatcccattgtggacaagatcttgcaataccgcgaactcgcgaaattgaaaggcacctatattgaccgtcttccggcattagtccacccgaaaacgggacgcctccatacccgcttcaaccaaacagccacggcgaccggtcgtttgtcctcctctgatccaaaccttcagaatattccagtacgtaccccattgggccagaagatccgccgtgcgtttgtagctgaggagggttggcgtttagtggccctcgattatcgtcaaattgaattacgtgtccttgcccatctttctggcgatgagaacctcatccgcgtgtttcaggaaggcaaagacattcacactcaaacggcaagctggatgtttggattatcagctgaagcgatcgatcctttgatgcgtcgtgcagcgaagaccatcaatttcggtgttctctacggtatgagtgcctttcgtttgtcgcaggaattaggcattccctatgaagaagctcaggcgttcattcagaaatactttcaaagctatcccaaagttaaagcatggatcgagaagactctcgaggaaggccgcacacgtggttacgtagagaccttatttggacgtcgccgctatgttcccgatttaaacgctcgcgtgaaaggcaagcgtgaagccgccgaacgcatggcgttcaacatgcctgtacagggcacggcagctgacctcatgaaacttgcaatggtgcgcctttttccacaattgcgtgaagttggtgcccgcatgctcttgcaggtccacgatgaactcttgttagaagcgccaaaagagcgtgcggaagaggtggcagccctcgcgaaagaagttatggaaggcgtgtggcccttagcggtgcctcttgaagtcgaagttggtattggcgaggattggctggctgccaaagga

SEQ ID NO: 3862 - protein, 841 aa, synthetic construct
  REGION 1..841: note = Variant of DNA polymerase I from Thermus sp. strain 2.9
MHHHHHHGGSGVLPVFEPKGRVLLVDGHHLAYRNFFALKGLTTSSGEPVQGVYGFAKSLLKALKEDGDVVIVVFDAKAPSFRHEAYEAYKAGRAPTPEDFPRQLALMKELVDLLGLERLEVPGFEADDVLATLAKKAEREGYEVQILTADRDLFQLLSPRISVLHPEGHRITPEWLWEKYGLRPEQWVDFRALAGDPSDNIPGVKGIGEKTALKLLKEWGSLENLLKNLDQVKPESVREKILAHLEDLKLSRELSRVRTDLPLEVDFQRRREPDWEGLKAFLERLEFGSLLHEFGLLESPLPAEEAPWPPPEGAFLGYRLSRPEPMWAELLALAASAQGRVYRAEDPHGALRGLFEVRGLLAKDLAVVALREGLDLPPTDDPMLLAYLLDPSNTTPEGVARRYGGEWTEDAAKRALLAERLHANLLGRLQGEERLLWLYEEVEKPLSRVLAHMEATGVKLDVAYLENLSLEVAAHMRRLEEEVFRLAGRSFRLNSRDQLERVLFDELGLPPIGKTEKTGKRSTSAAVLEALREVHPIVDKILQYRELAKLKGTYIDRLPALVHPKTGRLHTRFNQTATATGRLSSSDPNLQNIPVRTPLGQKIRRAFVAEEGWRLVALDYRQIELRVLAHLSGDENLIRVFQEGKDIHTQTASWMFGLSAEAIDPLMRRAAKTINFGVLYGMSAFRLSQELGIPYEEAQAFIQKYFQSYPKVKAWIEKTLEEGRTRGYVETLFGRRRYVPDLNARVKGKREAAERMAFNMPVQGTAADLMKLAMVRLFPQLREVGARMLLQVHDELLLEAPKERAEEVAALAKEVMEGVWPLAVPLEVEVGIGEDWLAAKG

SEQ ID NO: 3863 - DNA, 2523 bp, synthetic construct
  misc_feature 1..2523: note = Variant of DNA polymerase I from Thermus sp. strain 2.9
  source 1..2523: mol_type = other DNA
atgcaccatcatcatcatcatggcggtagcggcgtgttaccggtgttcgagcctaaaggtcgcgtgcttctggttgatggccatcatctcgcgtatcgtaacttctttgccctgaaaggattaaccaccagcagtggcgagccggtacagggtgtctacggctttgcaaagtcgctcctgaaagctctgaaagaagacggtgatgtggtgattgttgtctttgatgcgaaagcgccaagttttcgccacgaagcgtacgaagcttacaaagccgggcgtgctccaacgccggaagactttcctcgccaattggcgcttatgaaggaattagtggatttgcttggcctcgaacgcttggaagttcccggtttcgaggcagacgacgtattagcgactctcgcaaagaaagccgaacgtgagggctatgaagtccagatcttgacagcagatcgcgatcttttccagcttttatctccgcgcatctcggtgttacacccggaagggcatcgtatcaccccggaatggctctgggagaaatatggtttgcgtcccgaacaatgggtggattttcgcgccttagcaggcgatccgagcgacaatattccgggagttaaaggtatcggcgagaagacggcgctcaagctccttaaagaatgggggtcgttggagaacttgcttaagaatttagatcaggtcaaaccagagtcagtgcgtgagaagattcttgctcacctcgaagacctcaaattaagccgcgaattgtcccgtgtacgcaccgatttgccgctcgaagttgatttccaacgccgccgcgaacctgactgggagggtcttaaagcgtttttagagcgtcttgaatttggttcgctcttgcatgaattcggccttttagaaagcccgttagtcgccgaagaagcaccttggccaccgcccgagggcgcgtttttaggttaccgtttgagtcgcccggaaccgatgtgggccgaattactggctcttgcagcgtctgcccagggacgtgtgtatcgcgcggaagaccctcatggtgcgctccgcggcctcttcgaagtccgtggactccttgccaaagacttagctgttgttgcattgcgcgaaggtcttgatttacctccgactgatgatccaatgcttcttgcgtacctcttggacccgtcaaacacgacgcccgaaggcgtagcccgtcgttacggcggcgagtggaccgaagatgcagcgaaacgcgcgttattggccgaacgtttgcacgaaaatttattaggacgtttgcaaggcgaggaacgtctcctctggctttacgaagaagtggagaaaccattgagtcgcgtgctcggccatatggaagctaccggtgtcaaattagacgtggcgtatttggagaatctcagccttgaagttgctgcccacatgcgccgcttggaggaagaagtattccgtttagcaggccgttcctttcgccttagctctcgcgatcagttagaacgtgtgttgttcgatgaacttggtctccctcctatcggcaagacagagaagaccggtaaacgtagcacttcagcggcggttttagaagctcttcgcgaagtccatcccattgtggacaagatcttgcagtaccgcgaactcgcgaaattgaaaggcacctatattgaccgtcttccggcattagtccacccgaaaacgggacgcctccatacccgcttcaaccaaacagccacggcgaccggtcgtttgtcctcctctgatccaaaccttcagaatattccagtacgtaccccattgggccagaagatccgccgtgcgtttgtagctgaggagggttggcgtttagtggccctcgattatcgtcaaattgaattacgtgtccttgcccatctttctggcgatgagaacctcatccgcgtgtttcaggaaggcaaagacattcacactcaaacggcaagctggatgtttggattatcagctgaagcgatcgatcctttgatgcgtcgtgcagcgaagaccatcaatttcggtgttctctacggtatgagtgcctttcgtttgtcgcaggaattaggcattccctatgaagaagctcaggcgttcattcagaaatactttcaaagctatcccaaagttaaagcatggatcgagaagactctcgaggaaggccgcacacgtggttacgtagagaccttatttggacgtcgccgctatgttcccgatttaaacgctcgcgtgaaaggcaagcgtgaagccgccgaacgcatggcgttcaacatgcctgtacagggcacggcagctgacctcatgaaacttgcaatggtgcgcctttttccacaattgcgtgaagttggtgcccgcatgctcttgcaggtccacgatgaactcttgttagaagcgccaaaagagcgtgcggaagaggtggcagccctcgcgaaagaagttatggaaggcgtgtggcccttagcggtgcctcttgaagtcgaagttggtattggcgaggattggctggctgccaaagga

SEQ ID NO: 3864 - protein, 841 aa, synthetic construct
  REGION 1..841: note = Variant of DNA polymerase I from Thermus sp. strain 2.9
MHHHHHHGGSGVLPVFEPKGRVLLVDGHHLAYRNFFALKGLTTSSGEPVQGVYGFAKSLLKALKEDGDVVIVVFDAKAPSFRHEAYEAYKAGRAPTPEDFPRQLALMKELVDLLGLERLEVPGFEADDVLATLAKKAEREGYEVQILTADRDLFQLLSPRISVLHPEGHRITPEWLWEKYGLRPEQWVDFRALAGDPSDNIPGVKGIGEKTALKLLKEWGSLENLLKNLDQVKPESVREKILAHLEDLKLSRELSRVRTDLPLEVDFQRRREPDWEGLKAFLERLEFGSLLHEFGLLESPLVAEEAPWPPPEGAFLGYRLSRPEPMWAELLALAASAQGRVYRAEDPHGALRGLFEVRGLLAKDLAVVALREGLDLPPTDDPMLLAYLLDPSNTTPEGVARRYGGEWTEDAAKRALLAERLHENLLGRLQGEERLLWLYEEVEKPLSRVLGHMEATGVKLDVAYLENLSLEVAAHMRRLEEEVFRLAGRSFRLSSRDQLERVLFDELGLPPIGKTEKTGKRSTSAAVLEALREVHPIVDKILQYRELAKLKGTYIDRLPALVHPKTGRLHTRFNQTATATGRLSSSDPNLQNIPVRTPLGQKIRRAFVAEEGWRLVALDYRQIELRVLAHLSGDENLIRVFQEGKDIHTQTASWMFGLSAEAIDPLMRRAAKTINFGVLYGMSAFRLSQELGIPYEEAQAFIQKYFQSYPKVKAWIEKTLEEGRTRGYVETLFGRRRYVPDLNARVKGKREAAERMAFNMPVQGTAADLMKLAMVRLFPQLREVGARMLLQVHDELLLEAPKERAEEVAALAKEVMEGVWPLAVPLEVEVGIGEDWLAAKG

SEQ ID NO: 3865 - DNA, 2523 bp, synthetic construct
  misc_feature 1..2523: note = Variant of DNA polymerase I from Thermus sp. strain 2.9
  source 1..2523: mol_type = other DNA
atgcaccatcatcatcatcatggcggtagcggcgtgttaccggtgttcgagcctaaaggtcgcgtgcttctggttgatggccatcatctcgcgtatcgtaacttctttgccctgaaaggattaaccaccagcagcggcgagccggtacagggtgtctacggctttgcaaagtcgctcctgaaagctctgaaagaagacggtgatgtggtgattgttgtctttgatgcgaaagcgccaagttttcgccacgaagcgtacgaagcttacaaagccgggcgtgctccaacgccggaagactttcctcgccaattggcgcttatgaaggaattagtggatttgcttggcctcgaacgcttggaagttcccggtttcgaggcagacgacgtattagcgactctcgcaaagaaagccgaacgtgagggctatgaagtccagatcttgacagcagatcgcgatcttttccagcttttatctccgcgcatctcggtgttacacccggaagggcatcgtatcaccccggaatggctctgggagaaatatggtttgcgtcccgaacaatgggtggattttcgcgccttagcaggcgatccgagcgacaatattccgggagttaaaggtatcggcgagaagacggcgctcaagctccttaaagaatgggggtcgttggagaacttgcttaagaatttagatcaggtcaaaccagagtcagtgcgtgagaagattcttgctcacctcgaagacctcaaattaagccgcgaattgtcccgtgtacgcaccgatttgccgctcgaagttgatttccaacgccgccgcgaacctgactgggagggtcttaaagcgtttttagagcgtcttgaatttggttcgctcttgcatgaattcggccttttagaaagcccgttaccagccgaagaagcaccttggccaccgcccgagggcgcgtttttaggttaccgtttgagtcgcccggaaccgatgtgggccgaattactggctcttgcagcgtctgcccagggacgtgtgtatcgcgcggaagaccctcatggtgcgctccgcggcctcttcgaagtccgtggactccttgccaaagacttagctgttgttgcattgcgcgaaggtcttgatttacctccgactgatgatccaatgcttcttgcgtacctcttggacccgtcaaacacgacgcccgaaggcgtagcccgtcgttacggcggcgagtggaccgaagatgcagcgaaacgcgcgttattggccgaacgtttgcacgccaatttattaggacgtttgcaaggcgaggaacgtctcctctggctttacgaagaagtggagaaaccattgagtcgcgtgctcgcccatatggaagctaccggtgtcaaattagacgtggcgtatttggagaatctcagccttgaagttgctgcccacatgcgccgcttggaggaagaagtattccgtttagcaggccgttcctttcgccttaattctcgcgatcagttagaacgtgtgttgttcgatgaacttggtctccctcctatcggcaagacagagaagaccggtaaacgtagcacttcacgtgcggttttagacgctcttcgcgaagtccatcccattgtggacaagatcttgcaataccgcgaactcgcgaaattgaaaggcacctatattgaccgtcttccggcattagtccacccgaaaacgggacgcctccatacccgcttcaaccaaacagccacggcgaccggtcgtttgtcctcctctgatccaaaccttcagaatattccagtacgtaccccattgggccagaagatccgccgtgcgtttgtagctgaggagggttggcgtttagtggccctcgattatcgtcaaattgaattacgtgtccttgcccatctttctggcgatgagaacctcatccgcgtgtttcaggaaggcaaagacattcacactcaaacggcaagctggatgtttggattatcagctgaagcgatcgatcctttgatgcgtcgtgcagcgaagaccatcaatttcggtgttctctacggtatgagtgcctttcgtttgtcgcaggaattaggcattccctatgaagaagctcaggcgttcattcagaaatactttcaaagctatcccaaagttaaagcatggatcgagaagactctcgaggaaggccgcacacgtggttacgtagagaccttatttggacgtcgccgctatgttcccgatttaaacgctcgcgtgaaaggcaagcgtgaagccgccgaacgcatggcgttcaacatgcctgtacagggcacggcagctgacctcatgaaacttgcaatggtgcgcctttttccacaattgcgtgaagttggtgcccgcatgctcttgcaggtccacgatgaactcttgttagaagcgccaaaagagcgtgcggaagaggtggcagccctcgcgaaagaagttatggaaggcgtgtggcccttagcggtgcctcttgaagtcgaagttggtattggcgaggattggctggctgccaaagga

SEQ ID NO: 3866 - protein, 841 aa, synthetic construct
  REGION 1..841: note = Variant of DNA polymerase I from Thermus sp. strain 2.9
MHHHHHHGGSGVLPVFEPKGRVLLVDGHHLAYRNFFALKGLTTSSGEPVQGVYGFAKSLLKALKEDGDVVIVVFDAKAPSFRHEAYEAYKAGRAPTPEDFPRQLALMKELVDLLGLERLEVPGFEADDVLATLAKKAEREGYEVQILTADRDLFQLLSPRISVLHPEGHRITPEWLWEKYGLRPEQWVDFRALAGDPSDNIPGVKGIGEKTALKLLKEWGSLENLLKNLDQVKPESVREKILAHLEDLKLSRELSRVRTDLPLEVDFQRRREPDWEGLKAFLERLEFGSLLHEFGLLESPLPAEEAPWPPPEGAFLGYRLSRPEPMWAELLALAASAQGRVYRAEDPHGALRGLFEVRGLLAKDLAVVALREGLDLPPTDDPMLLAYLLDPSNTTPEGVARRYGGEWTEDAAKRALLAERLHANLLGRLQGEERLLWLYEEVEKPLSRVLAHMEATGVKLDVAYLENLSLEVAAHMRRLEEEVFRLAGRSFRLNSRDQLERVLFDELGLPPIGKTEKTGKRSTSRAVLDALREVHPIVDKILQYRELAKLKGTYIDRLPALVHPKTGRLHTRFNQTATATGRLSSSDPNLQNIPVRTPLGQKIRRAFVAEEGWRLVALDYRQIELRVLAHLSGDENLIRVFQEGKDIHTQTASWMFGLSAEAIDPLMRRAAKTINFGVLYGMSAFRLSQELGIPYEEAQAFIQKYFQSYPKVKAWIEKTLEEGRTRGYVETLFGRRRYVPDLNARVKGKREAAERMAFNMPVQGTAADLMKLAMVRLFPQLREVGARMLLQVHDELLLEAPKERAEEVAALAKEVMEGVWPLAVPLEVEVGIGEDWLAAKG

SEQ ID NO: 3867 - DNA, 2523 bp, synthetic construct
  misc_feature 1..2523: note = Variant of DNA polymerase I from Thermus sp. strain 2.9
  source 1..2523: mol_type = other DNA
atgcaccatcatcatcatcatggcggtagcggcgtgttaccggtgttcgagcctaaaggtcgcgtgcttctggttgatggccatcatctcgcgtatcgtaacttctttgccctgaaaggattaaccaccagcagcggcgagccggtacagggtgtctacggctttgcaaagtcgctcctgaaagctctgaaagaagacggtgatgtggtgattgttgtctttgatgcgaaagcgccaagttttcgccacgaagcgtacgaagcttacaaagccgggcgtgctccaacgccggaagactttcctcgccaattggcgcttatgaaggaattagtggatttgcttggcctcgaacgcttggaagttcccggtttcgaggcagacgacgtattagcgactctcgcaaagaaagccgaacgtgagggctatgaagtccagatcttgacagcagatcgcgatcttttccagcttttatctccgcgcatctcggtgttacacccggaagggcatcgtatcaccccggaatggctctgggagaaatatggtttgcgtcccgaacaatgggtggattttcgcgccttagcaggcgatccgagcgacaatattccgggagttaaaggtatcggcgagaagacggcgctcaagctccttaaagaatgggggtcgttggagaacttgcttaagaatttagatcaggtcaaaccagagtcagtgcgtgagaagattcttgctcacctcgaagacctcaaattaagccgcgaattgtcccgtgtacgcaccgatttgccgctcgaagttgatttccaacgccgccgcgaacctgactgggagggtcttaaagcgtttttagagcgtcttgaatttggttcgctcttgcatgaattcggccttttagaaagcccgttaccagccgaagaagcaccttggccaccgcccgagggcgcgtttttaggttaccgtttgagtcgcccggaaccgatgtgggccgaattactggctcttgcagcgtctgcccagggacgtgtgtatcgcgcggaagaccctcatggtgcgctccgcggcctcttcgaagtccgtggactccttgccaaagacttagctgttgttgcattgcgcgaaggtggggatttacctccgactgatgatccaatgcttcttgcgtacctcttggacccgtcaaacacgacgcccgaaggcgtagcccgtcgttacggcggcgagtggaccgaagatgcagcgaaacgcgcgttattggccgaacgtttgcacgccaatttattaggacgtttgcaaggcgaggaacgtctcctctggctttacgaagaagtggagaaaccattgagtcgcgtgctcgcgcatatggaagctaccggtgtcaaattagacgtggcgtatttggagaatctcagccttgaagttgctgcccacatgcgccgcttggaggaagaagtattccgtttagcaggccgttcctttcgccttaattctcgcgatcagttagaacgtgtgttgttcgatgaacttggtctccctcctatcggcaagacagagaagaccggtaaacgtagcacttcagcggcggttttagaagctcttcgcgaagtccatcccattgtggacaagatcttgcaataccgcgaactcgcgaaattgaaaggcacctatattgaccgtcttccggcattagtccacccgaaaacgggacgcctccatacccgcttcaaccaaacagccacggcgaccggtcgtttgtcctcctctgatccaaaccttcagaatattccagtacgtaccccattgggccagaagatccgccgtgcgtttgtagctgaggagggttggcgtttagtggccctcgattatagccaaattgaattacgtgtccttgcccatctttctggcgatgagaacctcatccgcgtgtttcaggaaggcaaagacattcacactcaaacggcaagctggatgtttggattatcagctgaagcgatcgatcctttgatgcgtcgtgcagcgaagaccatcaatttcggtgttctctacggtatgagtgcctttcgtttgtcgcaggaattaggcattccctatgaagaagctcaggcgttcattcagaaatactttcaaagctatcccaaagttaaagcatggatcgagaagactctcgaagaaggccgcacacgtggttacgtagagaccttatttggacgtcgccgctatgttcccgatttaaacgctcgcgtgaaaggcaagcgtgaagccgccgaacgcatggcgttcaacatgcctgtacagggcacggcagctgacctcatgaaacttgcaatggtgcgcctttttccacaattgcgtgaagttggtgcccgcatgctcttgcaggtccacgatgaactcttgttagaagcgccaaaagagcgtgcggaagaggtggcagccctcgcgaaagaagttatggaaggcgtgtggcccttagcggtgcctcttgaagtcgaagttggtattggcgaggattggctggctgccaaagga

SEQ ID NO: 3868 - protein, 841 aa, synthetic construct
  REGION 1..841: note = Variant of DNA polymerase I from Thermus sp. strain 2.9
MHHHHHHGGSGVLPVFEPKGRVLLVDGHHLAYRNFFALKGLTTSSGEPVQGVYGFAKSLLKALKEDGDVVIVVFDAKAPSFRHEAYEAYKAGRAPTPEDFPRQLALMKELVDLLGLERLEVPGFEADDVLATLAKKAEREGYEVQILTADRDLFQLLSPRISVLHPEGHRITPEWLWEKYGLRPEQWVDFRALAGDPSDNIPGVKGIGEKTALKLLKEWGSLENLLKNLDQVKPESVREKILAHLEDLKLSRELSRVRTDLPLEVDFQRRREPDWEGLKAFLERLEFGSLLHEFGLLESPLPAEEAPWPPPEGAFLGYRLSRPEPMWAELLALAASAQGRVYRAEDPHGALRGLFEVRGLLAKDLAVVALREGGDLPPTDDPMLLAYLLDPSNTTPEGVARRYGGEWTEDAAKRALLAERLHANLLGRLQGEERLLWLYEEVEKPLSRVLAHMEATGVKLDVAYLENLSLEVAAHMRRLEEEVFRLAGRSFRLNSRDQLERVLFDELGLPPIGKTEKTGKRSTSAAVLEALREVHPIVDKILQYRELAKLKGTYIDRLPALVHPKTGRLHTRFNQTATATGRLSSSDPNLQNIPVRTPLGQKIRRAFVAEEGWRLVALDYSQIELRVLAHLSGDENLIRVFQEGKDIHTQTASWMFGLSAEAIDPLMRRAAKTINFGVLYGMSAFRLSQELGIPYEEAQAFIQKYFQSYPKVKAWIEKTLEEGRTRGYVETLFGRRRYVPDLNARVKGKREAAERMAFNMPVQGTAADLMKLAMVRLFPQLREVGARMLLQVHDELLLEAPKERAEEVAALAKEVMEGVWPLAVPLEVEVGIGEDWLAAKG

SEQ ID NO: 3869 - DNA, 2523 bp, synthetic construct
  misc_feature 1..2523: note = Variant of DNA polymerase I from Thermus sp. strain 2.9
  source 1..2523: mol_type = other DNA
atgcaccatcatcatcatcatggcggtagcggcgtgttaccggtgttcgagcctaaaggtcgcgtgcttctggttgatggccatcatctcgcgtatcgtaacttctttgccctgaaaggattaaccaccagcagcggcgagccggtacagggtgtctacggctttgcaaagtcgctcctgaaagctctgaaagaagacggtgatgtggtgattgttgtctttgatgcgaaagcgccaagttttcgccacgaagcgtacgaagcttacaaagccgggcgtgctccaacgccggaagactttcctcgccaattggcgcttatgaaggaattagtggatttgcttggcctcgaacgcttggaagttcccggtttcgaggcagacgacgtattagcgactctcgcaaagaaagccgaacgtgagggctatgaagtccagatcttgacagcagatcgcgatcttttccagcttttatctccgcgcatctcggtgttacacccggaagggcatcgtatcaccccggaatggctctgggagaaatatggtttgcgtcccgaacaatgggtggattttcgcgccttagcaggcgatccgagcgacaatattccgggagttaaaggtatcggcgagaagacggcgctcaagctccttaaagaatgggggtcgttggagaacttgcttaagaatttagatcaggtcaaaccagagtcagtgcgtgagaagattcttgctcacctcgaagacctcaaattaagccgcgaattgtcccgtgtacgcaccgatttgccgctcgaagttgatttccaacgccgccgcgaacctgactgggagggtcttaaagcgtttttagagcgtcttgaatttggttcgctcttgcatgaattcggccttttagaaagcccgttaccagccgaagaagcaccttggccaccgcccgagggcgcgtttttaggttaccgtttgagtcgcccggaaccgatgtgggccgaattactggctcttgcagcgtctgcccagggacgtgtgtatcgcgcggaagaccctcatggtgcgctccgcggcctcttcgaagtccgtggactccttgccaaagacttagctgttgttgcattgcgcgaaggtcttgatttacctccgactgatgatccaatgcttcttgcgtacctcttggacccgtcaaacacgacgcccgaaggcgtagcccgtcgttacggcggcgagtggaccgaagatgcagcgaaacgcgcgttattggccgaacgtttgcacgccaatttattaggacgtttgcaaggcgaggaacgtctcctctggctttacgaagaagtggagaaaccattgagtcgcgtgctcgcgcatatggaagctaccggtgtcaaattagacgtggcgtatttggagaatctcagccttgaagttgctgcccacatgcgccgcttggaggaagaagtattccgtttagcaggccgttcctttcgccttaattctcgcgatcagttagaacgtgtgttgttcgatgaacttggtctccctcctatcggcaagacagagaagaccggtaaacgtagcacttcagcggcggttttagaagctcttcgcgaagtccatcccattgtggacaagatcttgcaataccgcgaactcgcgaaattgaaaggcacctatattgaccgtcttccggcattagtccacccgaaaacgggacgcctccatacccgcttcaaccaaacagccacggcgaccggtcgtttgtcctcctctgatccaaaccttcagaatattccagtacgtaccccattgggccagaagatccgccgtgcgtttgtagctgaggagggttggcgtttagtggccctcgattatagccaaattgaattacgtgtccttgcccatctttctggcgatgagaacctcatccgcgtgtttgaggaaggcaaagacattcacactcaaacggcaagctggatgtttggattatcagctgaagcgatcgatcctttgatgcgtcgtgcagcgaagaccatcaatttcggtgttctctacggtatgagtgcctttcgtttgtcgcaggaattaggcattccctatgaagaagctcaggcgttcattcagaaatactttcaaagctatcccaaagttaaagcatggatcgagaagactctcgaagaaggccgcacacgtggttacgtagagaccttatttggacgtcgccgctatgttcccgatttaaacgctcgcgtgaaaggcaagcgtgaagccgccgaacgcatggcgttcaacatgcctgtacagggcacggcagctgacctcatgaaacttgcaatggtgcgcctttttccacaattgcgtgaagttggtgcccgcatgctcttgcaggtccacgatgaactcttgttagaagcgccaaaagagcgtgcggaagaggtggcagccctcgcgaaagaagttatggaaggcgtgtggcccttagcggtgcctcttgaagtcgaagttggtattggcgaggattggctggctgccaaagga

SEQ ID NO: 3870 - protein, 841 aa, synthetic construct; identical to SEQ ID NO: 3444
  REGION 1..841: note = Variant of DNA polymerase I from Thermus sp. strain 2.9

SEQ ID NO: 3871 - DNA, 2523 bp, synthetic construct
  misc_feature 1..2523: note = Variant of DNA polymerase I from Thermus sp. strain 2.9
  source 1..2523: mol_type = other DNA
atgcaccatcatcatcatcatggcggtagcggcgtgttagaggtgttcgagcctaaaggtcgcgtgcttctggttgatggccatcatctcgcgtatcgtaacttctttgccctgaaaggattaaccaccagcagcggcgagccggtacagggtgtctacggctttgcaaagtcgctcctgaaagctctgaaagaagacggtgatgtggtgattgttgtctttgatgcgaaagcgccaagttttcgccacgaagcgtacgaagcttacaaagccgggcgtgctccaacgccggaagactttcctcgccaattggcgcttatgaaggaattagtggatttgcttggcctcgaacgcttggaagttcccggtttcgaggcagacgacgtattagcgactctcgcaaagaaagccgaacgcgagggctatgaagtccagatcttgacagcagatcgcgatcttttccagcttttatctccgcgcatctcggtgttacacccggaagggcatcgtatcaccccggaatggctctgggagaaatatggtttgcgtcccgaacaatgggtggattttcgcgccttagcaggcgataaaagcgacaatattccgggagttaaaggtatcggcgagaagacggcgctcaagctccttaaagaatgggggtcgttggagaacttgcttaagaatttagatcaggtcaaaccagagtcagtgcgtgagaagattcttgctcacctcgaagacctcgagttaagccgcgaattgtcccgtgtacgcaccgatttgccgctcgaagttgatttccaacgccgccgcgaacctgactgggagggtcttaaagcgtttttagagcgtcttgaatttggttcgctcttgcatgaattcggccttttagaaagcccgttaccagccgaagaagcaccttggccaccgcccgagggcgcgtttttaggttaccgtttgagtcgcccggaaccgatgtgggccgaattactggctcttgcagcgtctgcccagggacgtgtgtatcgcgcggaagaccctcatggtgcgctccgcggcctcttcgaagtccgtggactccttgccaaagacttagctgttgttgcattgcgcgaaggtcttgatttacctccgactgatgatccaatgcttcttgcgtacctcttggacccgtcaaacacgacgcctgaaggcgtagcccgtcgttacggcggcgagtggaccgaagatgcagcgaaacgcgcgttattggccgaacgtttgcacgccaatttattaggacgtttgcaaggcgaggagcgtctcctctggctttacgaagaagtggagaaaccattgagtcgcgtgctcgcgcatatggaagctaccggtgtcaaattagacgtggcgtatttggagaatctcagccttgaagttgctgcccacatgcgccgcttggaggaagaagtattccgtttagcaggccgttcctttcgccttaattctcgcgatcagttagaacgtgtgttgttcgatgaacttggtctccctcctatcggcaagacagagaagaccggtaaacgtagcacttcagcggcggttttagaagctcttcgcgaagtccatcccattgtggacaagatcttgcaataccgcgaactcgcgaaattgaaaggcacctatattgaccgtcttccggcattagtccacccgaaaacgggacgcctccatacccgcttcaaccaaacagccacggcgaccggtcgtttgtcctcctctgatccaaaccttcagaatattccagtacgtaccccgttgggccagaagatccgccgtgcgtttgtagctgaggagggttggcgtttagtggccctcgattatagccaaattgaattacgtgtccttgcccatctttctggcgatgagaacctcatccgcgtgtttgaggaaggcaaagacattcacactcaaacggcaagctggatgtttggattatcagctgaagcgatcgatcctttgatgcgtcgtgcagcgaagaccatcaatttcggtgttctctacggtatgagtgcctttcgtttgtcgcaggaattaggcattccctatgaagaagctcaggcgttcattcagaaatactttcaaagctatcccaaagttaaagcatggatcgagaagactctcgaagaaggccgcacccgtggttacgtagagaccttatttggacgtcgccgctatgttcccgatttaaacgctcgcgtgaaaggcaagcgtgaagccgccgaacgcatggcgttcaacatgcctgtacagggcacggcagctgacctcatgaaacttgcaatggtgcgcctttttccacaattgcgtgaagttggtgcccgcatgctcttgcaggtccacgatgaactcttgttagaagcgccaaaagagcgtgcggaagaggtggcagccctcgcgaaagaagttatggaaggcgtgtggcccttagcggtgcctcttgaagtcgaagttggtattggcgaggattggctggctgccaaagga

SEQ ID NO: 3872 - protein, 841 aa, synthetic construct
  REGION 1..841: note = Variant of DNA polymerase I from Thermus sp. strain 2.9
MHHHHHHGGSGVLEVFEPKGRVLLVDGHHLAYRNFFALKGLTTSSGEPVQGVYGFAKSLLKALKEDGDVVIVVFDAKAPSFRHEAYEAYKAGRAPTPEDFPRQLALMKELVDLLGLERLEVPGFEADDVLATLAKKAEREGYEVQILTADRDLFQLLSPRISVLHPEGHRITPEWLWEKYGLRPEQWVDFRALAGDKSDNIPGVKGIGEKTALKLLKEWGSLENLLKNLDQVKPESVREKILAHLEDLELSRELSRVRTDLPLEVDFQRRREPDWEGLKAFLERLEFGSLLHEFGLLESPLPAEEAPWPPPEGAFLGYRLSRPEPMWAELLALAASAQGRVYRAEDPHGALRGLFEVRGLLAKDLAVVALREGLDLPPTDDPMLLAYLLDPSNTTPEGVARRYGGEWTEDAAKRALLAERLHANLLGRLQGEERLLWLYEEVEKPLSRVLAHMEATGVKLDVAYLENLSLEVAAHMRRLEEEVFRLAGRSFRLNSRDQLERVLFDELGLPPIGKTEKTGKRSTSAAVLEALREVHPIVDKILQYRELAKLKGTYIDRLPALVHPKTGRLHTRFNQTATATGRLSSSDPNLQNIPVRTPLGQKIRRAFVAEEGWRLVALDYSQIELRVLAHLSGDENLIRVFEEGKDIHTQTASWMFGLSAEAIDPLMRRAAKTINFGVLYGMSAFRLSQELGIPYEEAQAFIQKYFQSYPKVKAWIEKTLEEGRTRGYVETLFGRRRYVPDLNARVKGKREAAERMAFNMPVQGTAADLMKLAMVRLFPQLREVGARMLLQVHDELLLEAPKERAEEVAALAKEVMEGVWPLAVPLEVEVGIGEDWLAAKG

SEQ ID NO: 3873 - DNA, 2523 bp, synthetic construct
  misc_feature 1..2523: note = Variant of DNA polymerase I from Thermus sp. strain 2.9
  source 1..2523: mol_type = other DNA
atgcaccatcatcatcatcatggcggtagcggcgtgttaccggtgttcgagcctaaaggtcgcgtgcttctggttgatggccatcatctcgcgtatcgtaacttctttgccctgaaaggattaaccaccagcagcggcgagccggtacagggtgtctacggctttgcaaagtcgctcctgaaagctctgaaagaagacggtgatgtggtgattgttgtctttgatgcgaaagcgccaagttttcgccacgaagcgtacgaagcttacaaagccgggcgtgctccaacgccggaagactttcctcgccaattggcgcttatgaaggaattagtggatttgcttggcctcgaacgcttggaagttcccggtttcgaggcagacgacgtattagcgactctcgcaaagaaagccgaacgtgagggctatgaagtccagatcttgacagcagatcgcgatcttttccagcttttatctccgcgcatctcggtgttacacccggaagggcatcgtatcaccccggaatggctctgggagaaatatggtttgcgtcccgaacaatgggtggattttcgcgccttagcaggcgatccgagcgacaatattccgggagttaaaggtatcggcgagaagacggcgctcaagctccttaaagaatgggggtcgttggagaacttgcttaagaatttagatcaggtcaaaccagagtcagtgcgtgagaagattcttgctcacctcgaagacctcaaattaagccgcgaattgtcccgtgtacgcaccgatttgccgctcgaagttgatttccaacgccgccgcgaacctgactgggagggtcttaaagcgtttttagagcgtcttgaatttggttcgctcttgcatgaattcggccttttagaaagcccgttaccagccgaagaagcaccttggccaccgcccgagggcgcgtttttaggttaccgtttgagtcgcccggaaccgatgtgggccgaattactggctcttgcagcgtctgcccagggacgtgtgtatcgcgcggaagaccctcatggtgcgctccgcggcctcttcgaagtccgtggactccttgccaaagacttagctgttgttgcattgcgcgaaggtcttgatttacctccgactgatgatccaatgcttcttgcgtacctcttggacccgtcaaacacgacgcccgaaggcgtagcccgtcgttacggcggcgagtggaccgaagatgcagcgaaacgcgcgttattggccgaacgtttgcacgccaatttattaggacgtttgcaaggcgaggaacgtctcctctggctttacgaagaagtggagaaaccattgagtcgcgtgctcgcgcatatggaagctaccggtgtcaaattagacgtggcgtatttggagaatctcagccttgaagttgctgcccacatgcgccgcttggaggaagaagtattccgtttagcaggccgttcctttcgccttaattctcgcgatcagttagaacgtgtgttgttcgatgaacttggtctccctcctatcggcaagacagagaagaccggtaaacgtagcacttcagcggcggttttagaagctcttcgcgaagtccatcccattgtggacaagatcttgcaataccgcgaactcgcgaaattgaaaggcacctatattgaccgtcttccggcattagtccacccgtgtacgggacgcctccatacccgcttcaaccaaacagccacggcgaccggtcgtttgtcctcctctgatccaaaccttcagaatattccagtacgtaccccattgggccagaagatccgccgtgcgtttgtagctgaggagggttggcgtttagtggccctcgattatagccaaattgaattacgtgtccttgcccatctttctggcgatgagaacctcatccgcgtgtttcaggaaggcaaagacattcacactcaaacggcaagctggatgtttggattatcagctgaagcgatcgatcctttgatgcgtcgtgcagcgaagaccatcaatttcggtgttctctacggtatgagtgcctttcgtttgtcgcaggaattaggcattccctatgaagaagctcaggcgttcattcagaaatactttcaaagctatcccaaagttaaagcatggatcgagaagactctcgaagaaggccgcacacgtggttacgtagagaccttatttggacgtcgccgctatgttcccgatttaaacgctcgcgtgaaaggcaagcgtgaagccgccgaacgcatggcgttcaacatgcctgtacagggcacggcagctgacctcatgaaacttgcaatggtgcgcctttttccacaattgcgtgaagttggtgcccgcatgctcttgcaggtccacgatgaactcttgttagaagcgccaaaagagcgtgcggaagaggtggcagccctcgcgaaagaagttatggaaggcgtgtggcccttagcggtgcctcttgaagtcgaagttggtattggcgaggattggctggctgccaaagga

SEQ ID NO: 3874 - protein, 841 aa, synthetic construct
  REGION 1..841: note = Variant of DNA polymerase I from Thermus sp. strain 2.9
MHHHHHHGGSGVLPVFEPKGRVLLVDGHHLAYRNFFALKGLTTSSGEPVQGVYGFAKSLLKALKEDGDVVIVVFDAKAPSFRHEAYEAYKAGRAPTPEDFPRQLALMKELVDLLGLERLEVPGFEADDVLATLAKKAEREGYEVQILTADRDLFQLLSPRISVLHPEGHRITPEWLWEKYGLRPEQWVDFRALAGDPSDNIPGVKGIGEKTALKLLKEWGSLENLLKNLDQVKPESVREKILAHLEDLKLSRELSRVRTDLPLEVDFQRRREPDWEGLKAFLERLEFGSLLHEFGLLESPLPAEEAPWPPPEGAFLGYRLSRPEPMWAELLALAASAQGRVYRAEDPHGALRGLFEVRGLLAKDLAVVALREGLDLPPTDDPMLLAYLLDPSNTTPEGVARRYGGEWTEDAAKRALLAERLHANLLGRLQGEERLLWLYEEVEKPLSRVLAHMEATGVKLDVAYLENLSLEVAAHMRRLEEEVFRLAGRSFRLNSRDQLERVLFDELGLPPIGKTEKTGKRSTSAAVLEALREVHPIVDKILQYRELAKLKGTYIDRLPALVHPCTGRLHTRFNQTATATGRLSSSDPNLQNIPVRTPLGQKIRRAFVAEEGWRLVALDYSQIELRVLAHLSGDENLIRVFQEGKDIHTQTASWMFGLSAEAIDPLMRRAAKTINFGVLYGMSAFRLSQELGIPYEEAQAFIQKYFQSYPKVKAWIEKTLEEGRTRGYVETLFGRRRYVPDLNARVKGKREAAERMAFNMPVQGTAADLMKLAMVRLFPQLREVGARMLLQVHDELLLEAPKERAEEVAALAKEVMEGVWPLAVPLEVEVGIGEDWLAAKG

SEQ ID NO: 3875 - DNA, 2523 bp, synthetic construct
  misc_feature 1..2523: note = Variant of DNA polymerase I from Thermus sp. strain 2.9
  source 1..2523: mol_type = other DNA
atgcaccatcatcatcatcatggcggtagcggcgtgttagaggtgttcgagcctaaaggtcgcgtgcttctggttgatggccatcatctcgcgtatcgtaacttctttgccctgaaaggattaaccaccagcagcggcgagccggtacagggtgtctacggctttgcaaagtcgctcctgaaagctctgaaagaagacggtgatgtggtgattgttgtctttgatgcgaaagcgccaagttttcgccacgaagcgtacgaagcttacaaagccgggcgtgctccaacgccggaagactttcctcgccaattggcgcttatgaaggaattagtggatttgcttggcctcgaacgcttggaagttcccggtttcgaggcagacgacgtattagcgactctcgcaaagaaagccgaacgtgagggctatgaagtccagatcttgacagcagatcgcgatcttttccagcttttatctccgcgcatctcggtgttacacccggatgggcatcgtatcaccccggaatggctctgggagaaatatggtttgcgtcccgaacaatgggtggattttcgcgccttagcaggcgataaaagcgacaatattccgggagttaaaggtatcggcgagaagacggcgctcaagctccttaaagaatgggggtcgttggagaacttgcttaagaatttagatcaggtcaaaccagagtcagtgcgtgagaagattcttgctcacctcgaagacctcaaattaagccgcgaattgtcccgtgtacgcaccgatttgccgctcgaagttgatttccaacgccgccgcgaacctgactgggagggtcttaaagcgtttttagagcgtcttgaatttggttcgctcttgcatgaattcggccttttagaaagcccgttaccagccgaagaagcaccttggccaccgcccgagggcgcgtttttaggttaccgtttgagtcgcccggaaccgatgtgggccgaattactggctcttgcagcgtctgcccagggacgtgtgtatcgcgcggaagaccctcatggtgcgctccgcggcctcttcgaagtccgtggactccttgccaaagacttagctgttgttgcattgcgcgaaggtcttgatttacctccgactgatgatccaatgcttcttgcgtacctcttggacccgtcaaacacgacgcctgaaggcgtagcccgtcgttacggcggcgagtggaccgaagatgcagcgaaacgcgcgttattggccgaacgtttgcacgccaatttattaggacgtttgcaaggcgaggagcgtctcctctggctttacgaagaagtggagaaaccattgagtcgcgtgctcgcgcatatggaagctaccggtgtcaaattagacgtggcgtatttggagaatctcagccttgaagttgctgcccacatgcgccgcttggaggaagaagtattccgtttagcaggccgttcctttcgccttaattctcgcgatcagttagaaaaggtgttgttcgatgaacttggtctccctcctatcggcaagacagagaagaccggtaaacgtagcacttcagcggcggttttagaagctcttcgcgaagtccatcccattgtggacaagatcttgcaataccgcgaactcgcgaaattgaaaggcacctatattgaccgtcttccggcattagtccacccgaaaacgggacgcctccatacccgcttcaaccaaacagccacggcgaccggtcgtttgtcctcctctgatccaaaccttcagaatattccagtacgtaccccgttgggccagaagatccgccgtgcgtttgtagctgaggagggttggcgtttagtggccctcgattatagccaaattgaattacgtgtccttgcccatctttctggcgatgagaacctcatccgcgtgtttcaggaaggcaaagacattcacactcaaacggcaagctggatgtttggattatcagctgaagcgatcgatcctttgatgcgtcgtgcagcgaagaccatcaatttcggtgttctctacggtatgagtgcctttcgtttgtcgcaggaattaggcattccctacgaagaagctcaggcgttcattcagaaatactttcaaagctatcccaaagttaaagcatggatcgagaagactctcgaagaaggccgccaccgtggttacgtagagaccttatttggacgtcgccgctatgttcccgatttaaacgctcgcgtgaaaggcaagcgtgaagccgccgaacgcatggcgttcaacatgcctgtacagggcacggcagctgacctcatgaaacttgcaatggtgcgcctttttccacaattgcgtgaagttggtgcccgcatgctcttgcaggtccacgatgaactcttgttagaagcgccaaaagagcgtgcggaagaggtggcagccctcgcgaaagaagttatggaaggcgtgtggcccttagcggtgcctcttgaagtcgaagttggtattggcgaggattggctggctgccaaagga

SEQ ID NO: 3876 - protein, 841 aa, synthetic construct
  REGION 1..841: note = Variant of DNA polymerase I from Thermus sp. strain 2.9
MHHHHHHGGSGVLEVFEPKGRVLLVDGHHLAYRNFFALKGLTTSSGEPVQGVYGFAKSLLKALKEDGDVVIVVFDAKAPSFRHEAYEAYKAGRAPTPEDFPRQLALMKELVDLLGLERLEVPGFEADDVLATLAKKAEREGYEVQILTADRDLFQLLSPRISVLHPDGHRITPEWLWEKYGLRPEQWVDFRALAGDKSDNIPGVKGIGEKTALKLLKEWGSLENLLKNLDQVKPESVREKILAHLEDLKLSRELSRVRTDLPLEVDFQRRREPDWEGLKAFLERLEFGSLLHEFGLLESPLPAEEAPWPPPEGAFLGYRLSRPEPMWAELLALAASAQGRVYRAEDPHGALRGLFEVRGLLAKDLAVVALREGLDLPPTDDPMLLAYLLDPSNTTPEGVARRYGGEWTEDAAKRALLAERLHANLLGRLQGEERLLWLYEEVEKPLSRVLAHMEATGVKLDVAYLENLSLEVAAHMRRLEEEVFRLAGRSFRLNSRDQLEKVLFDELGLPPIGKTEKTGKRSTSAAVLEALREVHPIVDKILQYRELAKLKGTYIDRLPALVHPKTGRLHTRFNQTATATGRLSSSDPNLQNIPVRTPLGQKIRRAFVAEEGWRLVALDYSQIELRVLAHLSGDENLIRVFQEGKDIHTQTASWMFGLSAEAIDPLMRRAAKTINFGVLYGMSAFRLSQELGIPYEEAQAFIQKYFQSYPKVKAWIEKTLEEGRHRGYVETLFGRRRYVPDLNARVKGKREAAERMAFNMPVQGTAADLMKLAMVRLFPQLREVGARMLLQVHDELLLEAPKERAEEVAALAKEVMEGVWPLAVPLEVEVGIGEDWLAAKG

SEQ ID NO: 3877 - DNA, 2523 bp, synthetic construct
  misc_feature 1..2523: note = Variant of DNA polymerase I from Thermus sp. strain 2.9
  source 1..2523: mol_type = other DNA
atgcaccatcatcatcatcatggcggtagcggcgtgttagaggtgttcgagcctaaaggtcgcgtgcttctggttgatggccatcatctcgcgtatcgtaacttctttgccctgaaaggattaaccaccagcagcggcgagccggtacagggtgtctacggctttgcaaagtcgctcctgaaagctctgaaagaagacggtgatgtggtgattgttgtctttgatgcgaaagcgccaagttttcgccacgaagcgtacgaagcttacaaagccgggcgtgctcctacgccggaagactttcctcgccaattggcgcttatgaaggaattagtggatttgcttggcctcgaacgcttggaagttcccggtttcgaggcagacgacgtattagcgactctcgcaaagaaagccgaacgcgagggctatgaagtccagatcttgacagcagatcgcgatcttttccagcttttatctccgcgcatctcggtgttacacccggatgggcatcgtatcaccccggaatggctctgggagaaatatggtttgcgtcccgaacaatgggtggattttcgcgccttagcaggcgatccgagcgacaatattccgggagttaaaggtatcggcgagaagacggcgctcaagctccttaaagaatgggggtcgttggagaacttgcttaagaatttagatcaggtcaaaccagagtcagtgcgtgagaagattcttgctcacctcgaagacctcgagttaagccgcgaattgtcccgtgtacgcaccgatttgccgctcgaagttgatttccaacgccgccgcgaacctgactgggagggtcttaaagcgtttttagagcgtcttgaatttggttcgctcttgcatgaattcggccttttagaaagcccgttaccagccgaagaagcaccttggccaccgcccgagggcgcgtttttaggttaccgtttgagtcgcccggaaccgatgtgggccgaattactggctcttgcagcgtctgcccagggacgtgtgtatcgcgcggaagaccctcatggtgcgctccgcggcctcttcgaagtccgtggactccttgccaaagacttagctgttgttgcattgcgcgaaggtcttgatttacctccgactgatgatccaatgcttcttgcgtacctcttggacccgtcaaacacgacgcctgaaggcgtagcccgtcgttacggcggcgagtggaccgaagatgcagcgaaacgcgcgttattggccgaacgtttgcacgccaatttattaggacgtttgcaaggcgaggagcgtctcctctggctttacgaagaagtggagaaaccattgagtcgcgtgctcgcgcatatggaagctaccggtgtcaaattagacgtggcgtatttggagaatctcagccttgaagttgctgcccacatgcgccgcttggaggaagaagtattccgtttagcaggccgttcctttcgccttaattctcgcgatcagttagaaaaggtgttgttcgatgaacttggtctccctcctatcggcaagacagagaagaccggtaaacgtagcacttcagcggcggttttagaagctcttcgcgaagtccatcccattgtggacaagatcttgcaataccgcgaactcgcgaaattgaaaggcacctatattgaccgtcttccggcattagtccacccgaaaacgggacgcctccatacccgcttcaaccaaacagccacggcgaccggtcgtttgtcctcctctgatccaaaccttcagaatattccagtacgtaccaaattgggccagaagatccgccgtgcgtttgtagctgaggagggttggcgtttagtggccctcgattatagccaaattgaattacgtgtccttgcccatctttctggcgatgagaacctcatccgcgtgtttgaggaaggcaaagacattcacactcaaacggcaagctggatgtttggattatcagctgaagcgatcgatcctttgatgcgtcgtgcagcgaagaccatcaatttcggtgttctctacggtatgagtgcctttcgtttgtcgcaggaattaggcattccctatgaagaagctcaggcgttcattcagaaatactttcaaagctatcccaaagttaaagcatggatcgagaagactctcgaagaaggccgcacacgtggttacgtagagaccttatttggacgtcgccgctatgttcccgatttaaacgctcgcgtgaaaggcaagcgtgaagccgccgaacgcatggcgttcaacatgcctgtacagggcacggcagctgacctcatgaaacttgcaatggtgcgcctttttccacaattgcgtgaagttggtgcccgcatgctcttgcaggtccacgatgaactcttgttagaagcgccaaaagagcgtgcggaagaggtggcagccctcgcgaaagaagttatggaaggcgtgtggcccttagcggtgcctcttgaagtcgaagttggtattggcgaggattggctggctgccaaagga

SEQ ID NO: 3878 - protein, 841 aa, synthetic construct
  REGION 1..841: note = Variant of DNA polymerase I from Thermus sp. strain 2.9
MHHHHHHGGSGVLEVFEPKGRVLLVDGHHLAYRNFFALKGLTTSSGEPVQGVYGFAKSLLKALKEDGDVVIVVFDAKAPSFRHEAYEAYKAGRAPTPEDFPRQLALMKELVDLLGLERLEVPGFEADDVLATLAKKAEREGYEVQILTADRDLFQLLSPRISVLHPDGHRITPEWLWEKYGLRPEQWVDFRALAGDPSDNIPGVKGIGEKTALKLLKEWGSLENLLKNLDQVKPESVREKILAHLEDLELSRELSRVRTDLPLEVDFQRRREPDWEGLKAFLERLEFGSLLHEFGLLESPLPAEEAPWPPPEGAFLGYRLSRPEPMWAELLALAASAQGRVYRAEDPHGALRGLFEVRGLLAKDLAVVALREGLDLPPTDDPMLLAYLLDPSNTTPEGVARRYGGEWTEDAAKRALLAERLHANLLGRLQGEERLLWLYEEVEKPLSRVLAHMEATGVKLDVAYLENLSLEVAAHMRRLEEEVFRLAGRSFRLNSRDQLEKVLFDELGLPPIGKTEKTGKRSTSAAVLEALREVHPIVDKILQYRELAKLKGTYIDRLPALVHPKTGRLHTRFNQTATATGRLSSSDPNLQNIPVRTKLGQKIRRAFVAEEGWRLVALDYSQIELRVLAHLSGDENLIRVFEEGKDIHTQTASWMFGLSAEAIDPLMRRAAKTINFGVLYGMSAFRLSQELGIPYEEAQAFIQKYFQSYPKVKAWIEKTLEEGRTRGYVETLFGRRRYVPDLNARVKGKREAAERMAFNMPVQGTAADLMKLAMVRLFPQLREVGARMLLQVHDELLLEAPKERAEEVAALAKEVMEGVWPLAVPLEVEVGIGEDWLAAKG

SEQ ID NO: 3879 - DNA, 2523 bp, synthetic construct
  misc_feature 1..2523: note = Variant of DNA polymerase I from Thermus sp. strain 2.9
  source 1..2523: mol_type = other DNA
atgcaccatcatcatcatcatggcggtagcggcgtgttaccggtgttcgagcctaaaggtcgcgtgcttctggttgatggccatcatctcgcgtatcgtaacttctttgccctgaaaggattaaccaccagcagcggcgagccggtacagggtgtctacggctttgcaaagtcgctcctgaaagctctgaaagaagacggtgatgtggtgattgttgtctttgatgcgaaagcgccaagttttcgccacgaagcgtacgaagcttacaaagccgggcgtgctccaacgccggaagactttcctcgccaattggcgcttatgaaggaattagtggatttgcttggcctcgaacgcttggaagttcccggtttcgaggcagacgacgtattagcgactctcgcaaagaaagccgaacgtgagggctatgaagtccagatcttgacagcagatcgcgatcttttccagcttttatctccgcgcatctcggtgttacacccggaagggcatcgtatcaccccggaatggctctgggagaaatatggtttgcgtcccgaacaatgggtggattttcgcgccttagcaggcgatccgagcgacaatattggtggagttaaaggtatcggcgagaagacggcgctcaagctccttaaagaatgggggtcgttggagaacttgcttaagaatttagatcaggtcaaaccagagtcagtgcgtgagaagattcttgctcacctcgaagacctcaaattaagccgcgaattgtcccgtgtacgcaccgatttgccgctcgaagttgatttccaacgccgccgcgaacctgactgggagggtcttaaagcgtttttagagcgtcttgaatttggttcgctcttgcatgaattcggccttttagaaagcccgttaccagccgaagaagcaccttggccaccgcccgagggcgcgtttttaggttaccgtttgagtcgcccggaaccgatgtgggccgaattactggctcttgcagcgtctgcccagggacgtgtgtatcgcgcggaagaccctcatggtgcgctccgcggcctcttcgaagtccgtggactccttgccaaagacttagctgttgttgcattgcgcgaaggtcttgatttacctccgactgatgatccaatgcttcttgcgtacctcttggacccgtcaaacacgacgcccgaaggcgtagcccgtcgttacggcggcgagtggaccgaagatgcagcgaaacgcgcgttattggccgaacgtttgcacgccaatttattaggacgtttgcaaggcgaggaacgtctcctctggctttacgaagaagtggagaaaccattgagtcgcgtgctcgcgcatatggaagctaccggtgtcaaattagacgtggcgtatttggagaatctcagccttgaagttgctgcccacatgcgccgcttggaggaagaagtattccgtttagcaggccgttcctttcgccttaattctcgcgatcagttagaacgtgtgttgttcgatgaacttggtctccctcctatcggcaagacagagaagaccggtaaacgtagcacttcagcggcggttttagaagctcttcgcgaagtccatcccattgtggacaagatcttgcaataccgcgaactcgcgaaattgaaaggcacctatattgaccgtcttccggcattagtccacccgaaaacgggacgcctccatacccgcttcaaccaaacagccacggcgaccggtcgtttgtcctcctctgatccaaaccttcagaatattccagtacgtaccccattgggccagaagatccgccgtgcgtttgtagctgaggagggttggcgtttagtggccctcgattatagccaaattgaattacgtgtccttgcccatctttctggcgatgagaacctcatccgcgtgtttcaggaaggcaaagacattcacactcaaacggcaagctggatgtttggattatcagctgaagcgatcgatcctttgatgcgtcgtgcagcgaagaccatcaatttcggtgttctctacggtatgagtgcctttcgtttgtcgcaggaattaggcattccctatgaagaagctcaggcgttcattcagaaatactttcaaagctatcccaaagttaaagcatggatcgagaagactctcgaagaaggccgcacacgtggttacgtagagaccttatttggacgtcgccgctatgttcccgatttaaacgctcgcgtgaaaggcaagcgtgaagccgccgaacgcatggcgttcaacatgcctgtacagggcacggcagctgacctcatgaaacttgcaatggtgcgcctttttccacaattgcgtgaagttggtgcccgcatgctcttgcaggtccacgatgaactcttgttagaagcgccaaaagagcgtgcggaagaggtggcagccctcgcgaaagaagttatggaaggcgtgtggcccttagcggtgcctcttgaagtcgaagttggtattggcgaggattggctggctgccaaagga

SEQ ID NO: 3880 - protein, 841 aa, synthetic construct
  REGION 1..841: note = Variant of DNA polymerase I from Thermus sp. strain 2.9
MHHHHHHGGSGVLPVFEPKGRVLLVDGHHLAYRNFFALKGLTTSSGEPVQGVYGFAKSLLKALKEDGDVVIVVFDAKAPSFRHEAYEAYKAGRAPTPEDFPRQLALMKELVDLLGLERLEVPGFEADDVLATLAKKAEREGYEVQILTADRDLFQLLSPRISVLHPEGHRITPEWLWEKYGLRPEQWVDFRALAGDPSDNIGGVKGIGEKTALKLLKEWGSLENLLKNLDQVKPESVREKILAHLEDLKLSRELSRVRTDLPLEVDFQRRREPDWEGLKAFLERLEFGSLLHEFGLLESPLPAEEAPWPPPEGAFLGYRLSRPEPMWAELLALAASAQGRVYRAEDPHGALRGLFEVRGLLAKDLAVVALREGLDLPPTDDPMLLAYLLDPSNTTPEGVARRYGGEWTEDAAKRALLAERLHANLLGRLQGEERLLWLYEEVEKPLSRVLAHMEATGVKLDVAYLENLSLEVAAHMRRLEEEVFRLAGRSFRLNSRDQLERVLFDELGLPPIGKTEKTGKRSTSAAVLEALREVHPIVDKILQYRELAKLKGTYIDRLPALVHPKTGRLHTRFNQTATATGRLSSSDPNLQNIPVRTPLGQKIRRAFVAEEGWRLVALDYSQIELRVLAHLSGDENLIRVFQEGKDIHTQTASWMFGLSAEAIDPLMRRAAKTINFGVLYGMSAFRLSQELGIPYEEAQAFIQKYFQSYPKVKAWIEKTLEEGRTRGYVETLFGRRRYVPDLNARVKGKREAAERMAFNMPVQGTAADLMKLAMVRLFPQLREVGARMLLQVHDELLLEAPKERAEEVAALAKEVMEGVWPLAVPLEVEVGIGEDWLAAKG

SEQ ID NO: 3881 - DNA, 2523 bp, synthetic construct
  misc_feature 1..2523: note = Variant of DNA polymerase I from Thermus sp. strain 2.9
  source 1..2523: mol_type = other DNA
atgcaccatcatcatcatcatggcggtagcggcgtgttaccggtgttcgagcctaaaggtcgcgtgcttctggttgatggccatcatctcgcgtatcgtaacttctttgccctgaaaggattaaccaccagcagcggcgagccggtacagggtgtctacggctttgcaaagtcgctcctgaaagctctgaaagaagacggtgatgtggtgattgttgtctttgatgcgaaagcgccaagttttcgccacgaagcgtacgaagcttacaaagccgggcgtgctccaacgccggaagactttcctcgccaattggcgcttatgaaggaattagtggatttgcttggcctcgaacgcttggaagttcccggtttcgaggcagacgacgtattagcgactctcgcaaagaaagccgaacgtgagggctatgaagtccagatcttgacagcagatcgcgatcttttccagcttttatctccgcgcatctcggtgttacacccggaagggcatcgtatcaccccggaatggctctgggagaaatatggtttgcgtcccgaacaatgggtggattttcgcgccttagcaggcgatccgagcgacaatattccgggagttaaaggtatcggcgagaagacggcgctcaagctccttaaagaatgggggtcgttggagaacttgcttaagaatttagatcaggtcaaaccagagtcagtgcgtgagaagattcttgctcacctcgaagacctcaaattaagccgcgaattgtcccgtgtacgcaccgatttgccgctcgaagttgatttccaacgccgccgcgaacctgactgggagggtcttaaagcgtttttagagcgtcttgaatttggttcgctcttgcatgaattcggccttttagaaagcccgttaccagccgaagaagcaccttggccaccgcccgagggcgcgtttttaggttaccgtttgagtcgcccggaaccgatgtgggccgaattactggctcttgcagcgtctgcccagggacgtgtgtatcgcgcggaagaccctcatggtgcgctccgcggcctcttcgaagtccgtggactccttgccaaagacttagctgttgttgcattgcgcgaaggtcttgatttacctccgactgatgatccaatgcttcttgcgtacctcttggacccgtcaaacacgacgcccgaaggcgtagcccgtcgttacggcggcgagtggaccgaagatgcagcgaaacgcgcgttattggccgaacgtttgcacgccaatttattaggacgtttgcaaggcgaggaacgtctcctctggctttacgaagaagtggagaaaccattgagtacggtgctcgcgcatatggaagctaccggtgtcaaattagacgtggcgtatttggagaatctcagccttgaagttgctgcccacatgcgccgcttggaggaagaagtattccgtttagcaggccgttcctttcgccttaattctcgcgatcagttagaacgtgtgttgttcgatgaacttggtctccctcctatcggcaagacagagaagaccggtaaacgtagcacttcagcggcggttttagaagctcttcgcgaagtccatcccattgtggacaagatcttgcaataccgcgaactcgcgaaattgaaaggcacctatattgaccgtcttccggcattagtccacccgaaaacgggacgcctccatacccgcttcaaccaaacagccacggcgaccggtcgtttgtcctcctctgatccaaaccttcagaatattccagtacgtaccccattgggccagaagatccgccgtgcgtttgtagctgaggagggttggcgtttagtggccctcgattatagccaaattgaattacgtgtccttgcccatctttctggcgatgagaacctcatccgcgtgtttcaggaaggcaaagacattcacactcaaacggcaagctggatgtttggattatcagctgaagcgatcgatcctttgatgcgtcgtgcagcgaagaccatcaatttcggtgttctctacggtatgagtgcctttcgtttgtcgcaggaattaggcattccctatgaagaagctcaggcgttcattcagaaatactttcaaagctatcccaaagttaaagcatggatcgagaagactctcgaagaaggccgcacacgtggttacgtagagaccttatttggacgtcgccgctatgttcccgatttaaacgctcgcgtgaaaggcaagcgtgaagccgccgaacgcatggcgttcaacatgcctgtacagggcacggcagctgacctcatgaaacttgcaatggtgcgcctttttccacaattgcgtgaagttggtgcccgcatgctcttgcaggtccacgatgaactcttgttagaagcgccaaaagagcgtgcggaagaggtggcagccctcgcgaaagaagttatggaaggcgtgtggcccttagcggtgcctcttgaagtcgaagttggtattggcgaggattggctggctgccaaagga

SEQ ID NO: 3882 - protein, 841 aa, synthetic construct
  REGION 1..841: note = Variant of DNA polymerase I from Thermus sp. strain 2.9
MHHHHHHGGSGVLPVFEPKGRVLLVDGHHLAYRNFFALKGLTTSSGEPVQGVYGFAKSLLKALKEDGDVVIVVFDAKAPSFRHEAYEAYKAGRAPTPEDFPRQLALMKELVDLLGLERLEVPGFEADDVLATLAKKAEREGYEVQILTADRDLFQLLSPRISVLHPEGHRITPEWLWEKYGLRPEQWVDFRALAGDPSDNIPGVKGIGEKTALKLLKEWGSLENLLKNLDQVKPESVREKILAHLEDLKLSRELSRVRTDLPLEVDFQRRREPDWEGLKAFLERLEFGSLLHEFGLLESPLPAEEAPWPPPEGAFLGYRLSRPEPMWAELLALAASAQGRVYRAEDPHGALRGLFEVRGLLAKDLAVVALREGLDLPPTDDPMLLAYLLDPSNTTPEGVARRYGGEWTEDAAKRALLAERLHANLLGRLQGEERLLWLYEEVEKPLSTVLAHMEATGVKLDVAYLENLSLEVAAHMRRLEEEVFRLAGRSFRLNSRDQLERVLFDELGLPPIGKTEKTGKRSTSAAVLEALREVHPIVDKILQYRELAKLKGTYIDRLPALVHPKTGRLHTRFNQTATATGRLSSSDPNLQNIPVRTPLGQKIRRAFVAEEGWRLVALDYSQIELRVLAHLSGDENLIRVFQEGKDIHTQTASWMFGLSAEAIDPLMRRAAKTINFGVLYGMSAFRLSQELGIPYEEAQAFIQKYFQSYPKVKAWIEKTLEEGRTRGYVETLFGRRRYVPDLNARVKGKREAAERMAFNMPVQGTAADLMKLAMVRLFPQLREVGARMLLQVHDELLLEAPKERAEEVAALAKEVMEGVWPLAVPLEVEVGIGEDWLAAKG

SEQ ID NO: 3883 - DNA, 2523 bp, synthetic construct
  misc_feature 1..2523: note = Variant of DNA polymerase I from Thermus sp. strain 2.9
  source 1..2523: mol_type = other DNA
atgcaccatcatcatcatcatggcggtagcggcgtgttagaggtgttcgagcctaaaggtcgcgtgcttctggttgatggccatcatctcgcgtatcgtaacttctttgccctgaaaggattaaccaccagcagcggcgagccggtacagggtgtctacggctttgcaaagtcgctcctgaaagctctgaaagaagacggtgatgtggtgattgttgtctttgatgcgaaagcgccaagttttcgccacgaagcgtacgaagcttacaaagccgggcgtgctccaacgccggaagactttcctcgccaattggcgcttatgaaggaattagtggatttgcttggcctcgaacgcttggaagttcccggtttcgaggcagacgacgtattagcgactctcgcaaagaaagccgaacgtgagggctatgaagtccagatcttgacagcagatcgcgatcttttccagcttttatctccgcgcatctcggtgttacacccggaagggcatcgtatcaccccggaatggctctgggagaaatatggtttgcgtcccgaacaatgggtggattttcgcgccttagcaggcgatccgagcgacaatattccgggagttaaaggtatcggcgagaagacggcgctcaagctccttaaagaatgggggtcgttggagaacttgcttaagaatttagatcaggtcaaaccagagtcagtgcgtgagaagattcttgctcacctcgaagacctcaaattaagccgcgaattgtcccgtgtacgcaccgatttgccgctcgaagttgatttccaacgccgccgcgaacctgactgggagggtcttaaagcgtttttagagcgtcttgaatttggttcgctcttgcatgaattcggccttttagaaagcccgttaccagccgaagaagcaccttggccaccgcccgagggcgcgtttttaggttaccgtttgagtcgcccggaaccgatgtgggccgaattactggctcttgcagcgtctgcccagggacgtgtgtatcgcgcggaagaccctcatggtgcgctccgcggcctcttcgaagtccgtggactccttgccaaagacttagctgttgttgcattgcgcgaaggtcttgatttacctccgactgatgatccaatgcttcttgcgtacctcttggacccgtcaaacacgacgcccgaaggcgtagcccgtcgttacggcggcgagtggaccgaagatgcagcgaaacgcgcgttattggccgaacgtttgcacgccaatttattaggacgtttgcaaggcgaggaacgtctcctctggctttacgaagaagtggagaaaccattgagtcgcgtgctcgcgcatatggaagctaccggtgtcaaattagacgtggcgtatttggagaatctcagccttgaagttgctgcccacatgcgccgcttggaggaagaagtattccgtttagcaggccgttcctttcgccttaattctcgcgatcagttagaaaaggtgttgttcgatgaacttggtctccctcctatcggcaagacagagaagaccggtaaacgtagcacttcagcggcggttttagaagctcttcgcgaagtccatcccattgtggacaagatcttgcaataccgcgaactcgcgaaattgaaaggcacctatattgaccgtcttccggcattagtccacccgaaaacgggacgcctccatacccgcttcaaccaaacagccacggcgaccggtcgtttgtcctcctctgatccaaaccttcagaatattccagtacgtaccccattgggccagaagatccgccgtgcgtttgtagctgaggagggttggcgtttagtggccctcgattatagccaaattgaattacgtgtccttgcccatctttctggcgatgagaacctcatccgcgtgtttcaggaaggcaaagacattcacactcaaacggcaagctggatgtttggattatcagctgaagcgatcgatcctttgatgcgtcgtgcagcgaagaccatcaatttcggtgttctctacggtatgagtgcctttcgtttgtcgcaggaattaggcattccctatgaagaagctcaggcgttcattcagaaatactttcaaagctatcccaaagttaaagcatggatcgagaagactctcgaagaaggccgcacccgtggttacgtagagaccttatttggacgtcgccgctatgttcccgatttaaacgctcgcgtgaaaggcaagcgtgaagccgccgaacgcatggcgttcaacatgcctgtacagggcacggcagctgacctcatgaaacttgcaatggtgcgcctttttccacaattgcgtgaagttggtgcccgcatgctcttgcaggtccacgatgaactcttgttagaagcgccaaaagagcgtgcggaagaggtggcagccctcgcgaaagaagttatggaaggcgtgtggcccttagcggtgcctcttgaagtcgaagttggtattggcgaggattggctggctgccaaagga

SEQ ID NO: 3884 - protein, 841 aa, synthetic construct
  REGION 1..841: note = Variant of DNA polymerase I from Thermus sp. strain 2.9
MHHHHHHGGSGVLEVFEPKGRVLLVDGHHLAYRNFFALKGLTTSSGEPVQGVYGFAKSLLKALKEDGDVVIVVFDAKAPSFRHEAYEAYKAGRAPTPEDFPRQLALMKELVDLLGLERLEVPGFEADDVLATLAKKAEREGYEVQILTADRDLFQLLSPRISVLHPEGHRITPEWLWEKYGLRPEQWVDFRALAGDPSDNIPGVKGIGEKTALKLLKEWGSLENLLKNLDQVKPESVREKILAHLEDLKLSRELSRVRTDLPLEVDFQRRREPDWEGLKAFLERLEFGSLLHEFGLLESPLPAEEAPWPPPEGAFLGYRLSRPEPMWAELLALAASAQGRVYRAEDPHGALRGLFEVRGLLAKDLAVVALREGLDLPPTDDPMLLAYLLDPSNTTPEGVARRYGGEWTEDAAKRALLAERLHANLLGRLQGEERLLWLYEEVEKPLSRVLAHMEATGVKLDVAYLENLSLEVAAHMRRLEEEVFRLAGRSFRLNSRDQLEKVLFDELGLPPIGKTEKTGKRSTSAAVLEALREVHPIVDKILQYRELAKLKGTYIDRLPALVHPKTGRLHTRFNQTATATGRLSSSDPNLQNIPVRTPLGQKIRRAFVAEEGWRLVALDYSQIELRVLAHLSGDENLIRVFQEGKDIHTQTASWMFGLSAEAIDPLMRRAAKTINFGVLYGMSAFRLSQELGIPYEEAQAFIQKYFQSYPKVKAWIEKTLEEGRTRGYVETLFGRRRYVPDLNARVKGKREAAERMAFNMPVQGTAADLMKLAMVRLFPQLREVGARMLLQVHDELLLEAPKERAEEVAALAKEVMEGVWPLAVPLEVEVGIGEDWLAAKG

SEQ ID NO: 3885 - DNA, 2523 bp, synthetic construct
  misc_feature 1..2523: note = Variant of DNA polymerase I from Thermus sp. strain 2.9
  source 1..2523: mol_type = other DNA
atgcaccatcatcatcatcatggcggtagcggcgtgttaccggtgttcgagcctaaaggtcgcgtgcttctggttgatggccatcatctcgcgtatcgtaacttctttgccctgaaaggattaaccaccagcagcggcgagccggtacagggtgtctacggctttgcaaagtcgctcctgaaagctctgaaagaagacggtgatgtggtgattgttgtctttgatgcgaaagcgccaagttttcgccacgaagcgtacgaagcttacaaagccgggcgtgctccaacgccggaattgtttcctcgccaattggcgcttatgaaggaattagtggatttgcttggcctcgaacgcttggaagttcccggtttcgaggcagacgacgtattagcgactctcgcaaagaaagccgaacgtgagggctatgaagtccagatcttgacagcagatcgcgatcttttccagcttttatctccgcgcatctcggtgttacacccggaagggcatcgtatcaccccggaatggctctgggagaaatatggtttgcgtcccgaacaatgggtggattttcgcgccttagcaggcgatccgagcgacaatattccgggagttaaaggtatcggcgagaagacggcgctcaagctccttaaagaatgggggtcgttggagaacttgcttaagaatttagatcaggtcaaaccagagtcagtgcgtgagaagattcttgctcacctcgaagacctcaaattaagccgcgaattgtcccgtgtacgcaccgatttgccgctcgaagttgatttccaacgccgccgcgaacctgactgggagggtcttaaagcgtttttagagcgtcttgaatttggttcgctcttgcatgaattcggccttttagaaagcccgttaccagccgaagaagcaccttggccaccgcccgagggcgcgtttttaggttaccgtttgagtcgcccggaaccgatgtgggccgaattactggctcttgcagcgtctgcccagggacgtgtgtatcgcgcggaagaccctcatggtgcgctccgcggcctcttcgaagtccgtggactccttgccaaagacttagctgttgttgcattgcgcgaaggtcttgatttacctccgactgatgatccaatgcttcttgcgtacctcttggacccgtcaaacacgacgcccgaaggcgtagcccgtcgttacggcggcgagtggaccgaagatgcagcgaaacgcgcgttattggccgaacgtttgcacgccaatttattaggacgtttgcaaggcgaggaacgtctcctctggctttacgaagaagtggagaaaccattgagtcgcgtgctcgcgcatatggaagctaccggtgtcaaattagacgtggcgtatttggagaatctcagccttgaagttgctgcccacatgcgccgcttggaggaagaagtattccgtttagcaggccgttcctttcgccttaattctcgcgatcagttagaacgtgtgttgttcgatgaacttggtctccctcctatcggcaagacagagaagaccggtaaacgtagcacttcagcggcggttttagaagctcttcgcgaagtccatcccattgtggacaagatcttgcaataccgcgaactcgcgaaattgaaaggcacctatattgaccgtcttccggcattagtccacccgaaaacgggacgcctccatacccgcttcaaccaaacagccacggcgaccggtcgtttgtcctcctctgatccaaaccttcagaatattccagtacgtaccccattgggccagaagatccgccgtgcgtttgtagctgaggagggttggcgtttagtggccctcgattatagccaaattgaattacgtgtccttgcccatctttctggcgatgagaacctcatccgcgtgtttcaggaaggcaaagacattcacactcaaacggcaagctggatgtttggattatcagctgaagcgatcgatcctttgatgcgtcgtgcagcgaagaccatcaatttcggtgttctctacggtatgagtgcctttcgtttgtcgcaggaattaggcattccctatgaagaagctcaggcgttcattcagaaatactttcaaagctatcccaaagttaaagcatggatcgagaagactctcgaagaaggccgcacacgtggttacgtagagaccttatttggacgtcgccgctatgttcccgatttaaacgctcgcgtgaaaggcaagcgtgaagccgccgaacgcatggcgttcaacatgcctgtacagggcacggcagctgacctcatgaaacttgcaatggtgcgcctttttccacaattgcgtgaagttggtgcccgcatgctcttgcaggtccacgatgaactcttgttagaagcgccaaaagagcgtgcggaagaggtggcagccctcgcgaaagaagttatggaaggcgtgtggcccttagcggtgcctcttgaagtcgaagttggtattggcgaggattggctggctgccaaagga

SEQ ID NO: 3886 - protein, 841 aa, synthetic construct
  REGION 1..841: note = Variant of DNA polymerase I from Thermus sp. strain 2.9
MHHHHHHGGSGVLPVFEPKGRVLLVDGHHLAYRNFFALKGLTTSSGEPVQGVYGFAKSLLKALKEDGDVVIVVFDAKAPSFRHEAYEAYKAGRAPTPELFPRQLALMKELVDLLGLERLEVPGFEADDVLATLAKKAEREGYEVQILTADRDLFQLLSPRISVLHPEGHRITPEWLWEKYGLRPEQWVDFRALAGDPSDNIPGVKGIGEKTALKLLKEWGSLENLLKNLDQVKPESVREKILAHLEDLKLSRELSRVRTDLPLEVDFQRRREPDWEGLKAFLERLEFGSLLHEFGLLESPLPAEEAPWPPPEGAFLGYRLSRPEPMWAELLALAASAQGRVYRAEDPHGALRGLFEVRGLLAKDLAVVALREGLDLPPTDDPMLLAYLLDPSNTTPEGVARRYGGEWTEDAAKRALLAERLHANLLGRLQGEERLLWLYEEVEKPLSRVLAHMEATGVKLDVAYLENLSLEVAAHMRRLEEEVFRLAGRSFRLNSRDQLERVLFDELGLPPIGKTEKTGKRSTSAAVLEALREVHPIVDKILQYRELAKLKGTYIDRLPALVHPKTGRLHTRFNQTATATGRLSSSDPNLQNIPVRTPLGQKIRRAFVAEEGWRLVALDYSQIELRVLAHLSGDENLIRVFQEGKDIHTQTASWMFGLSAEAIDPLMRRAAKTINFGVLYGMSAFRLSQELGIPYEEAQAFIQKYFQSYPKVKAWIEKTLEEGRTRGYVETLFGRRRYVPDLNARVKGKREAAERMAFNMPVQGTAADLMKLAMVRLFPQLREVGARMLLQVHDELLLEAPKERAEEVAALAKEVMEGVWPLAVPLEVEVGIGEDWLAAKG

SEQ ID NO: 3887 - DNA, 2523 bp, synthetic construct
  misc_feature 1..2523: note = Variant of DNA polymerase I from Thermus sp. strain 2.9
  source 1..2523: mol_type = other DNA
atgcaccatcatcatcatcatggcggtagcggcgtgttaccggtgttcgagcctaaaggtcgcgtgcttctggttgatggccatcatctcgcgtatcgtaacttctttgccctgaaaggattaaccaccagcagcggcgagccggtacagggtgtctacggctttgcaaagtcgctcctgaaagctctgaaagaagacggtgatgtggtgattgttgtctttgatgcgaaagcgccaagttttcgccacgaagcgtacgaagcttacaaagccgggcgtgctccaacgccggaagactttcctcgccaattggcgcttatgaaggaattagtggatttgcttggcctcgaacgcttggaagttcccggtttcgaggcagacgacgtattagcgactctcgcaaagaaagccgaacgtgagggctatgaagtccagatcttgacagcagatcgcgatcttttccagcttttatctccgcgcatctcggtgttacacccggaagggcatcgtatcaccccggaatggctctgggagaaatatggtttgcgtcccgaacaatgggtggattttcgcgccttagcaggcgatccgagcgacaatattccgggagttaaaggtatcggcgagaagacggcgctcaagctccttaaagaatgggggtcgttggagaacttgcttaagaatttagatcaggtcaaaccagagtcagtgcgtgagaagattcttgctcacctcgaagacctcaaattaagccgcgaattgtcccgtgtacgcaccgatttgccgctcgaagttgatttccaacgccgccgcgaacctgactgggagggtcttaaagcgtttttagagcgtcttgaatttggttcgctcttgcatgaattcggccttttagaaagcccgttaccagccgaagaagcaccttggccaccgcccgagggcgcgtttttaggttaccgtttgagtcgcccggaaccgatgtgggccgaattactggctcttgcagcgtctgcccagggacgtgtgtatcgcgcggaagaccctcatggtgcgctccgcggcctcttcgaagtccgtggactccttgccaaagacttagctgttgttgcattgcgcgaaggtcttgatttacctccgactgatgatccaatgcttcttgcgtacctcttggacccgtcaaacacgacgcccgaaggcgtagcccgtcgttacggcggcgagtggaccgaagatgcagcgaaacgcgcgttattggccgaacgtttgcacgccaatttattaggacgtttgcaaggcgaggaacgtctcctctggctttacgaagaagtggaggtgccattgagtcgcgtgctcgcgcatatggaagctaccggtgtcaaattagacgtggcgtatttggagaatctcagccttgaagttgctgcccacatgcgccgcttggaggaagaagtattccgtttagcaggccgttcctttcgccttaattctcgcgatcagttagaacgtgtgttgttcgatgaacttggtctccctcctatcggcaagacagagaagaccggtaaacgtagcacttcagcggcggttttagaagctcttcgcgaagtccatcccattgtggacaagatcttgcaataccgcgaactcgcgaaattgaaaggcacctatattgaccgtcttccggcattagtccacccgaaaacgggacgcctccatacccgcttcaaccaaacagccacggcgaccggtcgtttgtcctcctctgatccaaaccttcagaatattccagtacgtaccccattgggccagaagatccgccgtgcgtttgtagctgaggagggttggcgtttagtggccctcgattatagccaaattgaattacgtgtccttgcccatctttctggcgatgagaacctcatccgcgtgtttcaggaaggcaaagacattcacactcaaacggcaagctggatgtttggattatcagctgaagcgatcgatcctttgatgcgtcgtgcagcgaagaccatcaatttcggtgttctctacggtatgagtgcctttcgtttgtcgcaggaattaggcattccctatgaagaagctcaggcgttcattcagaaatactttcaaagctatcccaaagttaaagcatggatcgagaagactctcgaagaaggccgcacacgtggttacgtagagaccttatttggacgtcgccgctatgttcccgatttaaacgctcgcgtgaaaggcaagcgtgaagccgccgaacgcatggcgttcaacatgcctgtacagggcacggcagctgacctcatgaaacttgcaatggtgcgcctttttccacaattgcgtgaagttggtgcccgcatgctcttgcaggtccacgatgaactcttgttagaagcgccaaaagagcgtgcggaagaggtggcagccctcgcgaaagaagttatggaaggcgtgtggcccttagcggtgcctcttgaagtcgaagttggtattggcgaggattggctggctgccaaagga

SEQ ID NO: 3888 - protein, 841 aa, synthetic construct; identical to SEQ ID NO: 3594
  REGION 1..841: note = Variant of DNA polymerase I from Thermus sp. strain 2.9

SEQ ID NO: 3889 - DNA, 2523 bp, synthetic construct; identical to SEQ ID NO: 3537
  misc_feature 1..2523: note = Variant of DNA polymerase I from Thermus sp. strain 2.9
  source 1..2523: mol_type = other DNA

SEQ ID NO: 3890 - protein, 841 aa, synthetic construct; identical to SEQ ID NO: 3538
  REGION 1..841: note = Variant of DNA polymerase I from Thermus sp. strain 2.9

SEQ ID NO: 3891 - DNA, 2523 bp, synthetic construct
  misc_feature 1..2523: note = Variant of DNA polymerase I from Thermus sp. strain 2.9
  source 1..2523: mol_type = other DNA
atgcaccatcatcatcatcatggcggtagcggcgtgttaccggtgttcgagcctaaaggtcgcgtgcttctggttgatggccatcatctcgcgtatcgtaacttctttgccctgaaaggattaaccaccagcagcggcgagccggtacagggtgtctacggctttgcaaagtcgctcctgaaagctctgaaagaagacggtgatgtggtgattgttgtctttgatgcgaaagcgccaagttttcgccacgaagcgtacgaagcttacaaagccgggcgtgctccaacgccggaagactttcctcgccaattggcgcttatgaaggaattagtggatttgcttggcctcgaacgcttggaagttcccggtttcgaggcagacgacgtattagcgactctcgcaaagaaagccgaacgtgagggctatgaagtccagatcttgacagcagatcgcgatcttttccagcttttatctccgcgcatctcggtgttacacccggaagggcatcgtatcaccccggaatggctctgggagaaatatggtttgcgtcccgaacaatgggtggattttcgcgccttagcaggcgatccgagcgacaatattccgggagttaaaggtatcggcgagaagacggcgctcaagctccttaaagaatgggggtcgttggagaacttgcttaagaatttagatcaggtcaaaccagagtcagtgcgtgagaagattcttgctcacctcgaagacctcaaattaagccgcgaattgtcccgtgtacgcaccgatttgccgctcgaagttgatttccaacgccgccgcgaacctgactgggagggtcttaaagcgtttttagagcgtcttgaatttggttcgctcttgcatgaattcggccttttagaaagcccgttaccagccgaagaagcaccttggccaccgcccgagggcgcgtttttaggttaccgtttgagtcgcccggaaccgatgtgggccgaattactggctcttgcagcgtctgcccagggacgtgtgtatcgcgcggaagaccctcatggtgcgctccgcggcctcttcgaagtccgtggactccttgccaaagacttagctgttgttgcattgcgcgaaggtcttgatttacctccgactgatgatccaatgcttcttgcgtacctcttggacccgtcaaacacgacgcccgaaggcgtagcccgtcgttacggcggcgagtggaccgaagatgcagcgaaacgcgcgttattggccgaacgtttgcacgaaaatttattaggacgtttgcaaggcgaggaacgtctcctctggctttacgaagaagtggagaaaccattgagtcgcgtgctcggccatatggaagctaccggtgtcaaattagacgtggcgtatttggagaatctcagccttgaagttgctgcccacatgcgccgcttggaggaagaagtattccgtttagcaggccgttcctttcgccttaattctcgcgatcagttagaacgtgtgttgttcgatgaacttggtctccctcctatcggcaagacagagaagaccggtaaacgtagcacttcagcggcggttttagaagctcttcgcgaagtccatcccattgtggacaagatcttgcaataccgcgaactcgcgaaattgaaaggcacctatattgaccgtcttccggcattagtccacccgaaaacgggacgcctccatacccgcttcaaccaaacagccacggcgaccggtcgtttgtcctcctctgatccaaaccttcagaatattccagtacgtaccccattgggccagaagatccgccgtgcgtttgtagctgaggagggttggcgtttagtggccctcgattatcgtcaaattgaattacgtgtccttgcccatctttctggcgatgagaacctcatccgcgtgtttcaggaaggcaaagacattcacactcaaacggcaagctggatgtttggattatcagctgaagcgatcgatcctttgatgcgtcgtgcagcgaagaccatcaatttcggtgttctctacggtatgagtgcctttcgtttgtcgcaggaattaggcattccctatcaagaagctcaggcgttcattcagaaatactttcaaagctatcccaaagttaaagcatggatcgagaagactctcgaggaaggccgcacacgtggttacgtagagaccttatttggacgtcgccgctatgttcccgatttaaacgctcgcgtgaaaggcaagcgtgaagccgccgaacgcatggcgttcaacatgcctgtacagggcacggcagctgacctcatgaaacttgcaatggtgcgcctttttccacaattgcgtgaagttggtgcccgcatgctcttgcaggtccacgatgaactcttgttagaagcgccaaaagagcgtgcggaagaggtggcagccctcgcgaaagaagttatggaaggcgtgtggcccttagcggtgcctcttgaagtcgaagttggtattggcgaggattggctggctgccaaagga

SEQ ID NO: 3892 - protein, 841 aa, synthetic construct
  REGION 1..841: note = Variant of DNA polymerase I from Thermus sp. strain 2.9
MHHHHHHGGSGVLPVFEPKGRVLLVDGHHLAYRNFFALKGLTTSSGEPVQGVYGFAKSLLKALKEDGDVVIVVFDAKAPSFRHEAYEAYKAGRAPTPEDFPRQLALMKELVDLLGLERLEVPGFEADDVLATLAKKAEREGYEVQILTADRDLFQLLSPRISVLHPEGHRITPEWLWEKYGLRPEQWVDFRALAGDPSDNIPGVKGIGEKTALKLLKEWGSLENLLKNLDQVKPESVREKILAHLEDLKLSRELSRVRTDLPLEVDFQRRREPDWEGLKAFLERLEFGSLLHEFGLLESPLPAEEAPWPPPEGAFLGYRLSRPEPMWAELLALAASAQGRVYRAEDPHGALRGLFEVRGLLAKDLAVVALREGLDLPPTDDPMLLAYLLDPSNTTPEGVARRYGGEWTEDAAKRALLAERLHENLLGRLQGEERLLWLYEEVEKPLSRVLGHMEATGVKLDVAYLENLSLEVAAHMRRLEEEVFRLAGRSFRLNSRDQLERVLFDELGLPPIGKTEKTGKRSTSAAVLEALREVHPIVDKILQYRELAKLKGTYIDRLPALVHPKTGRLHTRFNQTATATGRLSSSDPNLQNIPVRTPLGQKIRRAFVAEEGWRLVALDYRQIELRVLAHLSGDENLIRVFQEGKDIHTQTASWMFGLSAEAIDPLMRRAAKTINFGVLYGMSAFRLSQELGIPYQEAQAFIQKYFQSYPKVKAWIEKTLEEGRTRGYVETLFGRRRYVPDLNARVKGKREAAERMAFNMPVQGTAADLMKLAMVRLFPQLREVGARMLLQVHDELLLEAPKERAEEVAALAKEVMEGVWPLAVPLEVEVGIGEDWLAAKG

SEQ ID NO: 3893 - DNA, 2523 bp, synthetic construct
  misc_feature 1..2523: note = Variant of DNA polymerase I from Thermus sp. strain 2.9
  source 1..2523: mol_type = other DNA
atgcaccatcatcatcatcatggcggtagcggcgtgttaccggtgttcgagcctaaaggtcgcgtgcttctggttgatggccatcatctcgcgtatcgtaacttctttgccctgaaaggattaaccaccagcagcggcgagccggtacagggtgtctacggctttgcaaagtcgctcctgaaagctctgaaagaagacggtgatgtggtgattgttgtctttgatgcgaaagcgccaagttttcgccacgaagcgtacgaagcttacaaagccgggcgtgctccaacgccggaagactttcctcgccaattggcgcttatgaaggaattagtggatttgcttggcctcgaacgcttggaagttcccggtttcgaggcagacgacgtattagcgactctcgcaaagaaagccgaacgtgagggctatgaagtccagatcttgacagcagatcgcgatcttttccagcttttatctccgcgcatctcggtgttacacccggaagggcatcgtatcaccccggaatggctctgggagaaatatggtttgcgtcccgaacaatgggtggattttcgcgccttagcaggcgatccgagcgacaatattccgggagttaaaggtatcggcgagaagacggcgctcaagctccttaaagaatgggggtcgttggagaacttgcttaagaatttagatcaggtcaaaccagagtcagtgcgtgagaagattcttgctcacctcgaagacctcaaattaagccgcgaattgtcccgtgtacgcaccgatttgccgctcgaagttgatttccaacgccgccgcgaacctgactgggagggtcttaaagcgtttttagagcgtcttgaatttggttcgctcttgcatgaattcggccttttagaaagcccgttaccagccgaagaagcaccttggccaccgcccgagggcgcgtttttaggttaccgtttgagtcgcccggaaccgatgtgggccgaattactggctcttgcagcgtctgcccagggacgtgtgtatcgcgcggaagaccctcatggtgcgctccgcggcctcttcagggtccgtggactccttgccaaagacttagctgttgttgcattgcgcgaaggtcttgatttacctccgactgatgatccaatgcttcttgcgtacctcttggacccgtcaaacacgacgcccgaaggcgtagcccgtcgttacggcggcgagtggaccgaagatgcagcgaaacgcgcgttattggccgaacgtttgcacgccaatttattaggacgtttgcaaggcgaggaacgtctcctctggctttacgaagaagtggagaaaccattgagtcgcgtgctcgcgcatatggaagctaccggtgtcaaattagacgtggcgtatttggagaatctcagccttgaagttgctgcccacatgcgccgcttggaggaagaagtattccgtttagcaggccgttcctttcgccttaattctcgcgatcagttagaacgtgtgttgttcgatgaacttggtctccctcctatcggcaagacagagaagaccggtaaacgtagcacttcagcggcggttttagaagctcttcgcgaagtccatcccattgtggacaagatcttgcaataccgcgaactcgcgaaattgaaaggcacctatattgaccgtcttccggcattagtccacccgaaaacgggacgcctccatacccgcttcaaccaaacagccacggcgaccggtcgtttgtcctcctctgatccaaaccttcagaatattccagtacgtaccccattgggccagaagatccgccgtgcgtttgtagctgaggagggttggcgtttagtggccctcgattatagccaaattgaattacgtgtccttgcccatctttctggcgatgagaacctcatccgcgtgtttcaggaaggcaaagacattcacactcaaacggcaagctggatgtttggattatcagctgaagcgatcgatcctttgatgcgtcgtgcagcgaagaccatcaatttcggtgttctctacggtatgagtgcctttcgtttgtcgcaggaattaggcattccctatgaagaagctcaggcgttcattcagaaatactttcaaagctatcccaaagttaaagcatggatcgagaagactctcgaagaaggccgcacacgtggttacgtagagaccttatttggacgtcgccgctatgttcccgatttaaacgctcgcgtgaaaggcaagcgtgaagccgccgaacgcatggcgttcaacatgcctgtacagggcacggcagctgacctcatgaaacttgcaatggtgcgcctttttccacaattgcgtgaagttggtgcccgcatgctcttgcaggtccacgatgaactcttgttagaagcgccaaaagagcgtgcggaagaggtggcagccctcgcgaaagaagttatggaaggcgtgtggcccttagcggtgcctcttgaagtcgaagttggtattggcgaggattggctggctgccaaagga

SEQ ID NO: 3894 - protein, 841 aa, synthetic construct
  REGION 1..841: note = Variant of DNA polymerase I from Thermus sp. strain 2.9
MHHHHHHGGSGVLPVFEPKGRVLLVDGHHLAYRNFFALKGLTTSSGEPVQGVYGFAKSLLKALKEDGDVVIVVFDAKAPSFRHEAYEAYKAGRAPTPEDFPRQLALMKELVDLLGLERLEVPGFEADDVLATLAKKAEREGYEVQILTADRDLFQLLSPRISVLHPEGHRITPEWLWEKYGLRPEQWVDFRALAGDPSDNIPGVKGIGEKTALKLLKEWGSLENLLKNLDQVKPESVREKILAHLEDLKLSRELSRVRTDLPLEVDFQRRREPDWEGLKAFLERLEFGSLLHEFGLLESPLPAEEAPWPPPEGAFLGYRLSRPEPMWAELLALAASAQGRVYRAEDPHGALRGLFRVRGLLAKDLAVVALREGLDLPPTDDPMLLAYLLDPSNTTPEGVARRYGGEWTEDAAKRALLAERLHANLLGRLQGEERLLWLYEEVEKPLSRVLAHMEATGVKLDVAYLENLSLEVAAHMRRLEEEVFRLAGRSFRLNSRDQLERVLFDELGLPPIGKTEKTGKRSTSAAVLEALREVHPIVDKILQYRELAKLKGTYIDRLPALVHPKTGRLHTRFNQTATATGRLSSSDPNLQNIPVRTPLGQKIRRAFVAEEGWRLVALDYSQIELRVLAHLSGDENLIRVFQEGKDIHTQTASWMFGLSAEAIDPLMRRAAKTINFGVLYGMSAFRLSQELGIPYEEAQAFIQKYFQSYPKVKAWIEKTLEEGRTRGYVETLFGRRRYVPDLNARVKGKREAAERMAFNMPVQGTAADLMKLAMVRLFPQLREVGARMLLQVHDELLLEAPKERAEEVAALAKEVMEGVWPLAVPLEVEVGIGEDWLAAKG

SEQ ID NO: 3895 - DNA, 2523 bp, synthetic construct
  misc_feature 1..2523: note = Variant of DNA polymerase I from Thermus sp. strain 2.9
  source 1..2523: mol_type = other DNA
atgcaccatcatcatcatcatggcggtagcggcgtgttaccggtgttcgagcctaaaggtcgcgtgcttctggttgatggccatcatctcgcgtatcgtaacttctttgccctgaaaggattaaccaccagcagcggcgagccggtacagggtgtccagggctttgcaaagtcgctcctgaaagctctgaaagaagacggtgatgtggtgattgttgtctttgatgcgaaagcgccaagttttcgccacgaagcgtacgaagcttacaaagccgggcgtgctccaacgccggaagactttcctcgccaattggcgcttatgaaggaattagtggatttgcttggcctcgaacgcttggaagttcccggtttcgaggcagacgacgtattagcgactctcgcaaagaaagccgaacgtgagggctatgaagtccagatcttgacagcagatcgcgatcttttccagcttttatctccgcgcatctcggtgttacacccggaagggcatcgtatcaccccggaatggctctgggagaaatatggtttgcgtcccgaacaatgggtggattttcgcgccttagcaggcgatccgagcgacaatattccgggagttaaaggtatcggcgagaagacggcgctcaagctccttaaagaatgggggtcgttggagaacttgcttaagaatttagatcaggtcaaaccagagtcagtgcgtgagaagattcttgctcacctcgaagacctcaaattaagccgcgaattgtcccgtgtacgcaccgatttgccgctcgaagttgatttccaacgccgccgcgaacctgactgggagggtcttaaagcgtttttagagcgtcttgaatttggttcgctcttgcatgaattcggccttttagaaagcccgttaccagccgaagaagcaccttggccaccgcccgagggcgcgtttttaggttaccgtttgagtcgcccggaaccgatgtgggccgaattactggctcttgcagcgtctgcccagggacgtgtgtatcgcgcggaagaccctcatggtgcgctccgcggcctcttcgaagtccgtggactccttgccaaagacttagctgttgttgcattgcgcgaaggtcttgatttacctccgactgatgatccaatgcttcttgcgtacctcttggacccgtcaaacacgacgcccgaaggcgtagcccgtcgttacggcggcgagtggaccgaagatgcagcgaaacgcgcgttattggccgaacgtttgcacgccaatttattaggacgtttgcaaggcgaggaacgtctcctctggctttacgaagaagtggagaaaccattgagtcgcgtgctcgcgcatatggaagctaccggtgtcaaattagacgtggcgtatttggagaatctcagccttgaagttgctgcccacatgcgccgcttggaggaagaagtattccgtttagcaggccgttcctttcgccttaattctcgcgatcagttagaacgtgtgttgttcgatgaacttggtctccctcctatcggcaagacagagaagaccggtaaacgtagcacttcagcggcggttttagaagctcttcgcgaagtccatcccattgtggacaagatcttgcaataccgcgaactcgcgaaattgaaaggcacctatattgaccgtcttccggcattagtccacccgaaaacgggacgcctccatacccgcttcaaccaaacagccacggcgaccggtcgtttgtcctcctctgatccaaaccttcagaatattccagtacgtaccccattgggccagaagatccgccgtgcgtttgtagctgaggagggttggcgtttagtggccctcgattatagccaaattgaattacgtgtccttgcccatctttctggcgatgagaacctcatccgcgtgtttcaggaaggcaaagacattcacactcaaacggcaagctggatgtttggattatcagctgaagcgatcgatcctttgatgcgtcgtgcagcgaagaccatcaatttcggtgttctctacggtatgagtgcctttcgtttgtcgcaggaattaggcattccctatgaagaagctcaggcgttcattcagaaatactttcaaagctatcccaaagttaaagcatggatcgagaagactctcgaagaaggccgcacacgtggttacgtagagaccttatttggacgtcgccgctatgttcccgatttaaacgctcgcgtgaaaggcaagcgtgaagccgccgaacgcatggcgttcaacatgcctgtacagggcacggcagctgacctcatgaaacttgcaatggtgcgcctttttccacaattgcgtgaagttggtgcccgcatgctcttgcaggtccacgatgaactcttgttagaagcgccaaaagagcgtgcggaagaggtggcagccctcgcgaaagaagttatggaaggcgtgtggcccttagcggtgcctcttgaagtcgaagttggtattggcgaggattggctggctgccaaagga

SEQ ID NO: 3896 - protein, 841 aa, synthetic construct
  REGION 1..841: note = Variant of DNA polymerase I from Thermus sp. strain 2.9
MHHHHHHGGSGVLPVFEPKGRVLLVDGHHLAYRNFFALKGLTTSSGEPVQGVQGFAKSLLKALKEDGDVVIVVFDAKAPSFRHEAYEAYKAGRAPTPEDFPRQLALMKELVDLLGLERLEVPGFEADDVLATLAKKAEREGYEVQILTADRDLFQLLSPRISVLHPEGHRITPEWLWEKYGLRPEQWVDFRALAGDPSDNIPGVKGIGEKTALKLLKEWGSLENLLKNLDQVKPESVREKILAHLEDLKLSRELSRVRTDLPLEVDFQRRREPDWEGLKAFLERLEFGSLLHEFGLLESPLPAEEAPWPPPEGAFLGYRLSRPEPMWAELLALAASAQGRVYRAEDPHGALRGLFEVRGLLAKDLAVVALREGLDLPPTDDPMLLAYLLDPSNTTPEGVARRYGGEWTEDAAKRALLAERLHANLLGRLQGEERLLWLYEEVEKPLSRVLAHMEATGVKLDVAYLENLSLEVAAHMRRLEEEVFRLAGRSFRLNSRDQLERVLFDELGLPPIGKTEKTGKRSTSAAVLEALREVHPIVDKILQYRELAKLKGTYIDRLPALVHPKTGRLHTRFNQTATATGRLSSSDPNLQNIPVRTPLGQKIRRAFVAEEGWRLVALDYSQIELRVLAHLSGDENLIRVFQEGKDIHTQTASWMFGLSAEAIDPLMRRAAKTINFGVLYGMSAFRLSQELGIPYEEAQAFIQKYFQSYPKVKAWIEKTLEEGRTRGYVETLFGRRRYVPDLNARVKGKREAAERMAFNMPVQGTAADLMKLAMVRLFPQLREVGARMLLQVHDELLLEAPKERAEEVAALAKEVMEGVWPLAVPLEVEVGIGEDWLAAKG

SEQ ID NO: 3897 - DNA, 2523 bp, synthetic construct
  misc_feature 1..2523: note = Variant of DNA polymerase I from Thermus sp. strain 2.9
  source 1..2523: mol_type = other DNA
atgcaccatcatcatcatcatggcggtagcggcgtgttaccggtgttcgagcctaaaggtcgcgtgcttctggttgatggccatcatctcgcgtatcgtaacttctttgccctgaaaggattaaccaccagcagcggcgagccggtacagggtgtctacggctttgcaaagtcgctcctgaaagctctgaaagaagacggtgatgtggtgattgttgtctttgatgcgaaagcgccaagttttcgccacgaagcgtacgaagcttacaaagccgggcgtgctccaacgccggaagactttcctcgccaattggcgcttatgaaggaattagtggatttgcttggcctcgaacgcttggaagttcccggtttcgaggcagacgacgtattagcgactctcgcaaagaaagccgaacgtgagggctatgaagtccagatcttgacagcagatcgcgatcttttccagcttttatctccgcgcatctcggtgttacacccggaagggcatcgtatcaccccggaatggctctgggagaaatatggtttgcgtcccgaacaatgggtggattttcgcgccttagcaggcgatccgagcgacaatattccgggagttaaaggtatcggcgagaagacggcgctcaagctccttaaagaatgggggtcgttggagaacttgcttaagaatttagatcaggtcaaaccagagtcagtgcgtgagaagattcttgctcacctcgaagacctcaaattaagccgcgaattgtcccgtgtacgcaccgatttgccgctcgaagttgatttccaacgccgccgcgaacctgactgggagggtcttaaagcgtttttagagcgtcttgaatttggttcgctcttgcatgaattcggccttttagaaagcccgttaccagccgaagaagcaccttggccaccgcccgagggcgcgtttttaggttaccgtttgagtcgcccggaaccgatgtgggccgaattactggctcttgcagcgtctgcccagggacgtgtgtatcgcgcggaagaccctcatggtgcgctccgcggcctcttcgaagtccgtggactccttgccaaagacttagctgttgttgcattgcgcgaaggtcttgatttacctccgaccgatgatccaatgcttcttgcgtacctcttggacccgtcaaacacgacgcccgaaggcgtagcccgtcgttacggcggcgagtggaccgaagatgcagcgaaacgcgcgttattggccgaacgtttgcacgccaatttattaggacgtttgcaaggcgaggaacgtctcctctggctttactgggaagtggagaaaccattgagtcgcgtgctcgcgcatatggaagctaccggtgtcaaattagacgtggcgtatttggagaatctcagccttgaagttgctgcccacatgcgccgcttggaggaagaagtattccgtttagcaggccgttcctttcgccttaattctcgcgatcagttagaacgtgtgttgttcgatgaacttggtctccctcctatcggcaagacagagaagaccggtaaacgtagcacttcagcggcggttttagaagctcttcgcgaagtccatcccattgtggacaagatcttgcaataccgcgaactcgcgaaattgaaaggcacctatattgaccgtcttccggcattagtccacccgaaaacgggacgcctccatacccgcttcaaccaaacagccacggcgaccggtcgtttgtcctcctctgatccaaaccttcagaatattccagtacgtaccccattgggccagaagatccgccgtgcgtttgtagctgaggagggttggcgtttagtggccctcgattatagccaaattgaattacgtgtccttgcccatctttctggcgatgagaacctcatccgcgtgtttcaggaaggcaaagacattcacactcaaacggcaagctggatgtttggattatcagctgaagcgatcgatcctttgatgcgtcgtgcagcgaagaccatcaatttcggtgttctctacggtatgagtgcctttcgtttgtcgcaggaattaggcattccctatgaagaagctcaggcgttcattcagaaatactttcaaagctatcccaaagttaaagcatggatcgagaagactctcgaagaaggccgcacacgtggttacgtagagaccttatttggacgtcgccgctatgttcccgatttaaacgctcgcgtgaaaggcaagcgtgaagccgccgaacgcatggcgttcaacatgcctgtacagggcacggcagctgacctcatgaaacttgcaatggtgcgcctttttccacaattgcgtgaagttggtgcccgcatgctcttgcaggtccacgatgaactcttgttagaagcgccaaaagagcgtgcggaagaggtggcagccctcgcgaaagaagttatggaaggcgtgtggcccttagcggtgcctcttgaagtcgaagttggtattggcgaggattggctggctgccaaagga

SEQ ID NO: 3898 - protein, 841 aa, synthetic construct
  REGION 1..841: note = Variant of DNA polymerase I from Thermus sp. strain 2.9
MHHHHHHGGSGVLPVFEPKGRVLLVDGHHLAYRNFFALKGLTTSSGEPVQGVYGFAKSLLKALKEDGDVVIVVFDAKAPSFRHEAYEAYKAGRAPTPEDFPRQLALMKELVDLLGLERLEVPGFEADDVLATLAKKAEREGYEVQILTADRDLFQLLSPRISVLHPEGHRITPEWLWEKYGLRPEQWVDFRALAGDPSDNIPGVKGIGEKTALKLLKEWGSLENLLKNLDQVKPESVREKILAHLEDLKLSRELSRVRTDLPLEVDFQRRREPDWEGLKAFLERLEFGSLLHEFGLLESPLPAEEAPWPPPEGAFLGYRLSRPEPMWAELLALAASAQGRVYRAEDPHGALRGLFEVRGLLAKDLAVVALREGLDLPPTDDPMLLAYLLDPSNTTPEGVARRYGGEWTEDAAKRALLAERLHANLLGRLQGEERLLWLYWEVEKPLSRVLAHMEATGVKLDVAYLENLSLEVAAHMRRLEEEVFRLAGRSFRLNSRDQLERVLFDELGLPPIGKTEKTGKRSTSAAVLEALREVHPIVDKILQYRELAKLKGTYIDRLPALVHPKTGRLHTRFNQTATATGRLSSSDPNLQNIPVRTPLGQKIRRAFVAEEGWRLVALDYSQIELRVLAHLSGDENLIRVFQEGKDIHTQTASWMFGLSAEAIDPLMRRAAKTINFGVLYGMSAFRLSQELGIPYEEAQAFIQKYFQSYPKVKAWIEKTLEEGRTRGYVETLFGRRRYVPDLNARVKGKREAAERMAFNMPVQGTAADLMKLAMVRLFPQLREVGARMLLQVHDELLLEAPKERAEEVAALAKEVMEGVWPLAVPLEVEVGIGEDWLAAKG

SEQ ID NO: 3899 - DNA, 2523 bp, synthetic construct; identical to SEQ ID NO: 3275
  misc_feature 1..2523: note = Variant of DNA polymerase I from Thermus sp. strain 2.9
  source 1..2523: mol_type = other DNA

SEQ ID NO: 3900 - protein, 841 aa, synthetic construct; identical to SEQ ID NO: 3276
  REGION 1..841: note = Variant of DNA polymerase I from Thermus sp. strain 2.9

SEQ ID NO: 3901 - DNA, 2523 bp, synthetic construct
  misc_feature 1..2523: note = Variant of DNA polymerase I from Thermus sp. strain 2.9
  source 1..2523: mol_type = other DNA
atgcaccatcatcatcatcatggcggtagcggcgtgttaccggtgttcgagcataaaggtcgcgtgcttctggttgatggccatcatctcgcgtatcgtaacttctttgccctgaaaggattaaccaccagcagcggcgagccggtacagggtgtctacggctttgcaaagtcgctcctgaaagctctgaaagaagacggtgatgtggtgattgttgtctttgatgcgaaagcgccaagttttcgccacgaagcgtacgaagcttacaaagccgggcgtgctccaacgccggaagactttcctcgccaattggcgcttatgaaggaattagtggatttgcttggcctcgaacgcttggaagttcccggtttcgaggcagacgacgtattagcgactctcgcaaagaaagccgaacgtgagggctatgaagtccagatcttgacagcagatcgcgatcttttccagcttttatctccgcgcatctcggtgttacacccggaagggcatcgtatcaccccggaatggctctgggagaaatatggtttgcgtcccgaacaatgggtggattttcgcgccttagcaggcgatccgagcgacaatattccgggagttaaaggtatcggcgagaagacggcgctcaagctccttaaagaatgggggtcgttggagaacttgcttaagaatttagatcaggtcaaaccagagtcagtgcgtgagaagattcttgctcacctcgaagacctcaaattaagccgcgaattgtcccgtgtacgcaccgatttgccgctcgaagttgatttccaacgccgccgcgaacctgactgggagggtcttaaagcgtttttagagcgtcttgaatttggttcgctcctgcatgaattcggccttttagaaagcccgttagtggccgaagaagcaccttggccaccgcccgagggcgcgtttttaggttaccgtttgagtcgcccggaaccgatgtgggccgaattactggctcttgcagcgtctgcccagggacgtgtgtatcgcgcggaagaccctcatggtgcgctccgcggcctcttcgaagtccgtggactccttgccaaagacttagctgttgttgcattgcgcgaaggtcttgatttacctccgactgatgatccaatgcttcttgcgtacctcttggacccgtcaaacacgacgcccgaaggcgtagcccgtcgttacggcggcgagtggaccgaagatgcagcgaaacgcgcgttattggccgaacgtttgcacgccaatttattaggacgtttgcaaggcgaggaacgtctcctctggctttacgaagaagtggagaaaccattgagtcgcgtgctcgcgcatatggaagctaccggtgtcaaattagacgtggcgtatttggagaatctcagccttgaagttgctgcccacatgcgccgcttggaggaagaagtattccgtttagcaggccgttcctttcgccttaattctcgcgatcagttagaacgtgtgctgttcgatgaacttggtctccctcctatcggcaagacagagaagaccggtaaacgtagcacttcagcggcggttttagaagctctgcgcgaagtccatcccattgtggacaagatcttgcaataccgcgaactcgcgaaattgaaaggcacctatattgaccgtcttccggcattagtccacccgaaaacgggacgcctccatacccgcttcaaccaaacagccacggcgaccggtcgtttgtcctcctctgatccaaaccttcagaatattccagtacgtaccccattgggccagaagatccgccgtgcgtttgtagctgaggagggttggcgtttagtggccctcgattatagccaaattgaattacgtgtccttgcccatctttctggcgatgagaacctcatccgcgtgtttcaggaaggcaaagacattcacactcaaacggcaagctggatgtttggattatcagctgaagcgatcgatcctttgatgcgtcgtgcagcgaagacgatcaatttcggtgttctctacggtatgagtgcctttcgtttgtcgcaggaattaggcattccctatgaagaagctcaggcgttcattcagaaatactttcaaagctatcccaaagttaaagcatggatcgagaagactctcgaagaaggccgcacacgtggttacgtagagaccttatttggacgtcgccgctatgttcccgatttaaacgctcgcgtgaaaggcaagcgtgaagccgccgaacgcatggcgttcaacatgcctgtacagggcacggcagctgacctcatgaaacttgcaatggtgcgcctttttccacaattgcgtgaagttggtgcccgcatgctcttgcaggtccacgatgaactcttgttagaagcgccaaaagagcgtgcggaagaggtggcagccctcgcgaaagaagttatggaaggcgtgtggcccttagcggtgcctcttgaagtcgaagttggtattggcgaggattggctggctgccaaagga

SEQ ID NO: 3902 - protein, 841 aa, synthetic construct
  REGION 1..841: note = Variant of DNA polymerase I from Thermus sp. strain 2.9
MHHHHHHGGSGVLPVFEHKGRVLLVDGHHLAYRNFFALKGLTTSSGEPVQGVYGFAKSLLKALKEDGDVVIVVFDAKAPSFRHEAYEAYKAGRAPTPEDFPRQLALMKELVDLLGLERLEVPGFEADDVLATLAKKAEREGYEVQILTADRDLFQLLSPRISVLHPEGHRITPEWLWEKYGLRPEQWVDFRALAGDPSDNIPGVKGIGEKTALKLLKEWGSLENLLKNLDQVKPESVREKILAHLEDLKLSRELSRVRTDLPLEVDFQRRREPDWEGLKAFLERLEFGSLLHEFGLLESPLVAEEAPWPPPEGAFLGYRLSRPEPMWAELLALAASAQGRVYRAEDPHGALRGLFEVRGLLAKDLAVVALREGLDLPPTDDPMLLAYLLDPSNTTPEGVARRYGGEWTEDAAKRALLAERLHANLLGRLQGEERLLWLYEEVEKPLSRVLAHMEATGVKLDVAYLENLSLEVAAHMRRLEEEVFRLAGRSFRLNSRDQLERVLFDELGLPPIGKTEKTGKRSTSAAVLEALREVHPIVDKILQYRELAKLKGTYIDRLPALVHPKTGRLHTRFNQTATATGRLSSSDPNLQNIPVRTPLGQKIRRAFVAEEGWRLVALDYSQIELRVLAHLSGDENLIRVFQEGKDIHTQTASWMFGLSAEAIDPLMRRAAKTINFGVLYGMSAFRLSQELGIPYEEAQAFIQKYFQSYPKVKAWIEKTLEEGRTRGYVETLFGRRRYVPDLNARVKGKREAAERMAFNMPVQGTAADLMKLAMVRLFPQLREVGARMLLQVHDELLLEAPKERAEEVAALAKEVMEGVWPLAVPLEVEVGIGEDWLAAKG

SEQ ID NO: 3903 - DNA, 2523 bp, synthetic construct
  misc_feature 1..2523: note = Variant of DNA polymerase I from Thermus sp. strain 2.9
  source 1..2523: mol_type = other DNA
atgcaccatcatcatcatcatggcggtagcggcgtgttaccggtgttcgagcctaaaggtcgcgtgcttctggttgatggccatcatctcgcgtatcgtaacttctttgccctgaaaggattaaccaccagcagcggcgagccggtacagggtgtctacggctttgcaaagtcgctcctgaaagctctgaaagaagacggtgatgtggtgattgttgtctttgatgcgaaagcgccaagttttcgccacgaagcgtacgaagcttacaaagccgggcgtgctccaacgccggaagactttcctcgccaattggcgcttatgaaggaattagtggatttgcttggcctcgaacgcttggaagttcccggtttcgaggcagacgacgtattagcgactctcgcaaagaaagccgaacgtgagggctatgaagtccagatcttgacagcagatcgcgatcttttccagcttttatctccgcgcatctcggtgttacacccggaagggcatcgtatcaccccggaatggctctgggagaaatatggtttgcgtcccgaacaatgggtggattttcgcgccttagcaggcgatccgagcgacaatattccgggagttaaaggtatcggcgagaagacggcgctcaagctccttaaagaatgggggtcgttggagaacttgcttaagaatttagatcaggtcaaaccagagtcagtgcgttataagattcttgctcacctcgaagacctcaaattaagccgcgaattgtcccgtgtacgcaccgatttgccgctcgaagttgatttccaacgccgccgcgaacctgactgggagggtcttaaagcgtttttagagcgtcttgaatttggttcgctcttgcatgaattcggccttttagaaagcccgttaccagccgaagaagcaccttggccaccgcccgagggcgcgtttttaggttaccgtttgagtcgcccggaaccgatgtgggccgaattactggctcttgcagcgtctgcccagggacgtgtgtatcgcgcggaagaccctcatggtgcgctccgcggcctcttcgaagtccgtggactccttgccaaagacttagctgttgttgcattgcgcgaaggtcttgatttacctccgactgatgatccaatgcttcttgcgtacctcttggacccgtcaaacacgacgcccgaaggcgtagcccgtcgttacggcggcgagtggaccgaagatgcagcgaaacgcgcgttattggccgaacgtttgcacgccaatttattaggacgtttgcaaggcgaggaacgtctcctctggctttacgaagaagtggagaaaccattgagtcgcgtgctcgcgcatatggaagctaccggtgtcaaattagacgtggcgtatttggagaatctcagccttgaagttgctgcccacatgcgccgcttggaggaagaagtattccgtttagcaggccgttcctttcgccttaattctcgcgatcagttagaacgtgtgttgttcgatgaacttggtctccctcctatcggcaagacagagaagaccggtaaacgtagcacttcagcggcggttttagaagctcttcgcgaagtccatcccattgtggacaagatcttgcaataccgcgaactcgcgaaattgaaaggcacctatattgaccgtcttccggcattagtccacccgaaaacgggacgcctccatacccgcttcaaccaaacagccacggcgaccggtcgtttgtcctcctctgatccaaaccttcagaatattccagtacgtaccccattgggccagaagatccgccgtgcgtttgtagctgaggagggttggcgtttagtggccctcgattatagccaaattgaattacgtgtccttgcccatctttctggcgatgagaacctcatccgcgtgtttcaggaaggcaaagacattcacactcaaacggcaagctggatgtttggattatcagctgaagcgatcgatcctttgatgcgtcgtgcagcgaagaccatcaatttcggtgttctctacggtatgagtgcctttcgtttgtcgcaggaattaggcattccctatgaagaagctcaggcgttcattcagaaatactttcaaagctatcccaaagttaaagcatggatcgagaagactctcgaagaaggccgcacacgtggttacgtagagaccttatttggacgtcgccgctatgttcccgatttaaacgctcgcgtgaaaggcaagcgtgaagccgccgaacgcatggcgttcaacatgcctgtacagggcacggcagctgacctcatgaaacttgcaatggtgcgcctttttccacaattgcgtgaagttggtgcccgcatgctcttgcaggtccacgatgaactcttgttagaagcgccaaaagagcgtgcggaagaggtggcagccctcgcgaaagaagttatggaaggcgtgtggcccttagcggtgcctcttgaagtcgaagttggtattggcgaggattggctggctgccaaagga

SEQ ID NO: 3904 - protein, 841 aa, synthetic construct
  REGION 1..841: note = Variant of DNA polymerase I from Thermus sp. strain 2.9
MHHHHHHGGSGVLPVFEPKGRVLLVDGHHLAYRNFFALKGLTTSSGEPVQGVYGFAKSLLKALKEDGDVVIVVFDAKAPSFRHEAYEAYKAGRAPTPEDFPRQLALMKELVDLLGLERLEVPGFEADDVLATLAKKAEREGYEVQILTADRDLFQLLSPRISVLHPEGHRITPEWLWEKYGLRPEQWVDFRALAGDPSDNIPGVKGIGEKTALKLLKEWGSLENLLKNLDQVKPESVRYKILAHLEDLKLSRELSRVRTDLPLEVDFQRRREPDWEGLKAFLERLEFGSLLHEFGLLESPLPAEEAPWPPPEGAFLGYRLSRPEPMWAELLALAASAQGRVYRAEDPHGALRGLFEVRGLLAKDLAVVALREGLDLPPTDDPMLLAYLLDPSNTTPEGVARRYGGEWTEDAAKRALLAERLHANLLGRLQGEERLLWLYEEVEKPLSRVLAHMEATGVKLDVAYLENLSLEVAAHMRRLEEEVFRLAGRSFRLNSRDQLERVLFDELGLPPIGKTEKTGKRSTSAAVLEALREVHPIVDKILQYRELAKLKGTYIDRLPALVHPKTGRLHTRFNQTATATGRLSSSDPNLQNIPVRTPLGQKIRRAFVAEEGWRLVALDYSQIELRVLAHLSGDENLIRVFQEGKDIHTQTASWMFGLSAEAIDPLMRRAAKTINFGVLYGMSAFRLSQELGIPYEEAQAFIQKYFQSYPKVKAWIEKTLEEGRTRGYVETLFGRRRYVPDLNARVKGKREAAERMAFNMPVQGTAADLMKLAMVRLFPQLREVGARMLLQVHDELLLEAPKERAEEVAALAKEVMEGVWPLAVPLEVEVGIGEDWLAAKG

SEQ ID NO: 3905 - DNA, 2523 bp, synthetic construct
  misc_feature 1..2523: note = Variant of DNA polymerase I from Thermus sp. strain 2.9
  source 1..2523: mol_type = other DNA
atgcaccatcatcatcatcatggcggtagcggcgtgttaccggtgttcgagcctaaaggtcgcgtgcttctggttgatggccatcatctcgcgtatcgtaacttctttgccctgaaaggattaaccaccagcagcggcgagccggtacagggtgtctacggctttgcaaagtcgctcctgaaagctctgaaagaagacggtgatgtggtgattgttgtctttgatgcgaaagcgccaagttttcgccacgaagcgtacgaagcttacaaagccgggcgtgctccaacgccggaagactttcctcgccaattggcgcttatgaaggaattagtggatttgcttggcctcgaacgcttggaagttcccggtttcgaggcagacgacgtattagcgactctcgcaaagaaagccgaacgtgagggctatgaagtccagatcttgacagcagatcgcgatcttttccagcttttatctccgcgcatctcggtgttacacccggaagggcatcgtatcaccccggaatggctctgggagaaatatggtttgcgtcccgaacaatgggtggattttcgcgccttagcaggcgatccgagcgacaatattccgggagttaaaggtatcggcgagaagacggcgctcaagctccttaaagaatgggggtcgttggagaacttgcttaagaatttagatcaggtcaaaccagagtcagtgcgtgagaagattcttgctcacctcgaagacctcaaattaagccgcgaattgtcccgtgtacgcaccgatttgccgctcgaagttgatttccaacgccgccgcgaacctgactgggagggtcttaaagcgtttttagagcgtcttgaatttggttcgctcttgcatgaattcggccttttagaaagcccgttaccagccgaagaagcaccttggccaccgcccgagggcgcgtttttaggttaccgtttgagtcgcccggaaccgatgtgggccgaattactggctcttgcagcgtctgcccagggacgtgtgtatcgcgcggaagaccctcatggtgcgctccgcggcctcttcgaagtccgtggactccttgccaaagacttagctgttgttgcattgcgcgaaggtcttgatttactgccgactgatgatccaatgcttcttgcgtacctcttggacccgtcaaacacgacgcccgaaggcgtagcccgtcgttacggcggcgagtggaccgaagatgcagcgaaacgcgcgttattggccgaacgtttgcacgccaatttattaggacgtttgcaaggcgaggaacgtctcctctggctttacgaagaagtggagaaaccattgagtcgcgtgctcgcgcatatggaagctaccggtgtcaaattagacgtggcgtatttggagaatctcagccttgaagttgctgcccacatgcgccgcttggaggaagaagtattccgtttagcaggccgttcctttcgccttaattctcgcgatcagttagaacgtgtgttgttcgatgaacttggtctccctcctatcggcaagacagagaagaccggtaaacgtagcacttcagcggcggttttagaagctcttcgcgaagtccatcccattgtggacaagatcttgcaataccgcgaactcgcgaaattgaaaggcacctatattgaccgtcttccggcattagtccacccgaaaacgggacgcctccatacccgcttcaaccaaacagccacggcgaccggtcgtttgtcctcctctgatccaaaccttcagaatattccagtacgtaccccattgggccagaagatccgccgtgcgtttgtagctgaggagggttggcgtttagtggccctcgattatagccaaattgaattacgtgtccttgcccatctttctggcgatgagaacctcatccgcgtgtttcaggaaggcaaagacattcacactcaaacggcaagctggatgtttggattatcagctgaagcgatcgatcctttgatgcgtcgtgcagcgaagaccatcaatttcggtgttctctacggtatgagtgcctttcgtttgtcgcaggaattaggcattccctatgaagaagctcaggcgttcattcagaaatactttcaaagctatcccaaagttaaagcatggatcgagaagactctcgaagaaggccgcacacgtggttacgtagagaccttatttggacgtcgccgctatgttcccgatttaaacgctcgcgtgaaaggcaagcgtgaagccgccgaacgcatggcgttcaacatgcctgtacagggcacggcagctgacctcatgaaacttgcaatggtgcgcctttttccacaattgcgtgaagttggtgcccgcatgctcttgcaggtccacgatgaactcttgttagaagcgccaaaagagcgtgcggaagaggtggcagccctcgcgaaagaagttatggaaggcgtgtggcccttagcggtgcctcttgaagtcgaagttggtattggcgaggattggctggctgccaaagga

SEQ ID NO: 3906 - protein, 841 aa, synthetic construct
  REGION 1..841: note = Variant of DNA polymerase I from Thermus sp. strain 2.9
MHHHHHHGGSGVLPVFEPKGRVLLVDGHHLAYRNFFALKGLTTSSGEPVQGVYGFAKSLLKALKEDGDVVIVVFDAKAPSFRHEAYEAYKAGRAPTPEDFPRQLALMKELVDLLGLERLEVPGFEADDVLATLAKKAEREGYEVQILTADRDLFQLLSPRISVLHPEGHRITPEWLWEKYGLRPEQWVDFRALAGDPSDNIPGVKGIGEKTALKLLKEWGSLENLLKNLDQVKPESVREKILAHLEDLKLSRELSRVRTDLPLEVDFQRRREPDWEGLKAFLERLEFGSLLHEFGLLESPLPAEEAPWPPPEGAFLGYRLSRPEPMWAELLALAASAQGRVYRAEDPHGALRGLFEVRGLLAKDLAVVALREGLDLLPTDDPMLLAYLLDPSNTTPEGVARRYGGEWTEDAAKRALLAERLHANLLGRLQGEERLLWLYEEVEKPLSRVLAHMEATGVKLDVAYLENLSLEVAAHMRRLEEEVFRLAGRSFRLNSRDQLERVLFDELGLPPIGKTEKTGKRSTSAAVLEALREVHPIVDKILQYRELAKLKGTYIDRLPALVHPKTGRLHTRFNQTATATGRLSSSDPNLQNIPVRTPLGQKIRRAFVAEEGWRLVALDYSQIELRVLAHLSGDENLIRVFQEGKDIHTQTASWMFGLSAEAIDPLMRRAAKTINFGVLYGMSAFRLSQELGIPYEEAQAFIQKYFQSYPKVKAWIEKTLEEGRTRGYVETLFGRRRYVPDLNARVKGKREAAERMAFNMPVQGTAADLMKLAMVRLFPQLREVGARMLLQVHDELLLEAPKERAEEVAALAKEVMEGVWPLAVPLEVEVGIGEDWLAAKG

SEQ ID NO: 3907 - DNA, 2523 bp, synthetic construct
  misc_feature 1..2523: note = Variant of DNA polymerase I from Thermus sp. strain 2.9
  source 1..2523: mol_type = other DNA
atgcaccatcatcatcatcatggcggtagcggcgtgttacctgtgttcgagcctaaaggtcgcgtgcttctggttgatggccatcatctcgcgtatcgtaacttctttgccctgaaaggattaaccaccagcagcggcgagccggtacatggtgtctacggctttgcaaagtcgctcctgaaagctctgaaagaagacggtgatgtggtgattgttgtctttgatgcgaaagcgccaagttttcgccacgaagcgtacgaagcttacaaagccgggcgtgctcctacgccggaagactttcctcgccaattggcgcttatgaaggaattagtggatttgcttggcctcgaacgcttggaagttcccggtttcgaggcagacgacgtattagcgactctcgcaaagaaagccgaacgtgagggctatgaagtccagatcttgacagcagatcgcgatcttttccagcttttatctccgcgcatctcggtgttacacccggaagggcatcgtatcaccccggaatggctctgggagaaatatggtttgcgtcccgaacaatgggtggattttcgcgccttagcaggcgatccgagcgacaatattccgggagttaaaggtatcggcgagaagacggcgctcaagctccttaaagaatgggggtcgttggagaacttgcttaagaatttagatcaggtcaaaccagagtcagtgcgtgagaagattcttgctcacctcgaagacctcaaattaagccgcgaattgtcccgtgtacgcaccgatttgccgctcgaagttgatttccaacgccgccgcgaacctgactgggagggtcttaaagcgtttttagagcgtcttgaatttggttcgctcttgcatgaattcggccttttagaaagcccgttaccagccgaagaagcaccttggccaccgcccgagggcgcgtttttaggttaccgtttgagtcgcccggaaccgatgtgggccgaattactggctcttgcagcgtctgcccagggacgtgtgtatcgcgcggaagaccctcatggtgcgctccgcggcctcttcgaagtccgtggactccttgccaaagacttagctgttgttgcattgcgcgaaggtcttgatttacctccgactgatgatccaatgcttcttgcgtacctcttggacccgtcaaacacgacgcccgaaggcgtagcccgtcgttacggcggcgagtggaccgaagatgcagcgaaacgcgcgttattggccgaacgtttgcacgccaatttattaggacgtttgcaaggcgaggaacgtctcctctggctttacgaagaagtggagaaaccattgagtcgcgtgctcgcgcatatggaagctaccggtgtcaaattagacgtggcgtatttggagaatctcagccttgaagttgctgcccacatgcgccgcttggaggaagaagtattccgtttagcaggccgttcctttcgccttaattctcgcgatcagttagaacgtgtgttgttcgatgaacttggtctccctcctatcggcaagacagagaagaccggtaaacgtagcacttcagcggcggttttagaagctcttcgcgaagtccatcccattgtggacaagatcttgcaataccgcgaactcgcgaaattgaaaggcacctatattgaccgtcttccggcattagtccacccgaaaacgggacgcctccatacccgcttcaaccaaacagccacggcgaccggtcgtttgtcctcctctgatccaaaccttcagaatattccagtacgtaccccattgggccagaagatccgccgtgcgtttgtagctgaggagggttggcgtttagtggccctcgattatagccaaattgaattacgtgtccttgcccatctttctggcgatgagaacctcatccgcgtgtttgaggaaggcaaagacattcacactcaaacggcaagctggatgtttggattatcagctgaagcgatcgatcctttgatgcgtcgtgcagcgaagaccatcaatttcggtgttctctacggtatgagtgcctttcgtttgtcgcaggaattaggcattccctatgaagaagctcaggcgttcattcagaaatactttcaaagctatcccaaagttaaagcatggatcgagaagactctcgaagaaggccgcacacgtggttacgtagagaccttatttggacgtcgccgctatgttcccgatttaaacgctcgcgtgaaaggcaagcgtgaagccgccgaacgcatggcgttcaacatgcctgtacagggcacggcagctgacctcatgaaacttgcaatggtgcgcctttttccacaattgcgtgaagttggtgcccgcatgctcttgcaggtccacgatgaactcttgttagaagcgccaaaagagcgtgcggaagaggtggcagccctcgcgaaagaagttatggaaggcgtgtggcccttagcggtgcctcttgaagtcgaagttggtattggcgaggattggctggctgccaaagga

SEQ ID NO: 3908 - protein, 841 aa, synthetic construct
  REGION 1..841: note = Variant of DNA polymerase I from Thermus sp. strain 2.9
MHHHHHHGGSGVLPVFEPKGRVLLVDGHHLAYRNFFALKGLTTSSGEPVHGVYGFAKSLLKALKEDGDVVIVVFDAKAPSFRHEAYEAYKAGRAPTPEDFPRQLALMKELVDLLGLERLEVPGFEADDVLATLAKKAEREGYEVQILTADRDLFQLLSPRISVLHPEGHRITPEWLWEKYGLRPEQWVDFRALAGDPSDNIPGVKGIGEKTALKLLKEWGSLENLLKNLDQVKPESVREKILAHLEDLKLSRELSRVRTDLPLEVDFQRRREPDWEGLKAFLERLEFGSLLHEFGLLESPLPAEEAPWPPPEGAFLGYRLSRPEPMWAELLALAASAQGRVYRAEDPHGALRGLFEVRGLLAKDLAVVALREGLDLPPTDDPMLLAYLLDPSNTTPEGVARRYGGEWTEDAAKRALLAERLHANLLGRLQGEERLLWLYEEVEKPLSRVLAHMEATGVKLDVAYLENLSLEVAAHMRRLEEEVFRLAGRSFRLNSRDQLERVLFDELGLPPIGKTEKTGKRSTSAAVLEALREVHPIVDKILQYRELAKLKGTYIDRLPALVHPKTGRLHTRFNQTATATGRLSSSDPNLQNIPVRTPLGQKIRRAFVAEEGWRLVALDYSQIELRVLAHLSGDENLIRVFEEGKDIHTQTASWMFGLSAEAIDPLMRRAAKTINFGVLYGMSAFRLSQELGIPYEEAQAFIQKYFQSYPKVKAWIEKTLEEGRTRGYVETLFGRRRYVPDLNARVKGKREAAERMAFNMPVQGTAADLMKLAMVRLFPQLREVGARMLLQVHDELLLEAPKERAEEVAALAKEVMEGVWPLAVPLEVEVGIGEDWLAAKG

SEQ ID NO: 3909 - DNA, 2523 bp, synthetic construct; identical to SEQ ID NO: 3465
  misc_feature 1..2523: note = Variant of DNA polymerase I from Thermus sp. strain 2.9
  source 1..2523: mol_type = other DNA

SEQ ID NO: 3910 - protein, 841 aa, synthetic construct; identical to SEQ ID NO: 3466
  REGION 1..841: note = Variant of DNA polymerase I from Thermus sp. strain 2.9

SEQ ID NO: 3911 - DNA, 2523 bp, synthetic construct
  misc_feature 1..2523: note = Variant of DNA polymerase I from Thermus sp. strain 2.9
  source 1..2523: mol_type = other DNA
atgcaccatcatcatcatcatggcggtagcggcgtgttacctgtgttcgagcctaaaggtcgcgtgcttctggttgatggccatcatctcgcgtatcgtaacttctttgccctgaaaggattaaccaccagcagcggcgagccggtacagggtgtctacggctttgcaaagtcgctcctgaaagctctgaaagaagacggtgatgtggtgattgttgtctttgatgcgaaagcgccaagttttcgccacgaagcgtacgaagcttacaaagccgggcgtgctccaacgccggaagactttcctcgccaattggcgcttatgaaggaattagtggatttgcttggcctcgaacgcttggaagttcccggtttcgaggcagacgacgtattagcgactctcgcaaagaaagccgaacgcgagggctatgaagtccagatcttgacagcagatcgcgatcttttccagcttttatctccgcgcatctcggtgttacacccggaagggcatcgtatcaccccggaatggctctgggagaaatatggtttgcgtcccgaacaatgggtggattttcgcgccttagcaggcgatccgagcgacaatattccgggagttaaaggtatcggcgagaagacggcgctcaagctccttaaagaatgggggtcgttggagaacttgcttaagaatttagatcaggtcaaaccagagtcagtgcgtgagaagattcttgctcacctcgaagacctcaagttaagccgcgaattgtcccgtgtacgcaccgatttgccgctcgaagttgatttccaacgccgccgcgaacctgactgggagggtcttaaagcgtttttagagcgtcttgaatttggttcgctcttgcatgaattcggccttttagaaagcccgttaccagccgaagaagcaccttggccaccgcccgagggcgcgtttttaggttaccgtttgagtcgcccggaaccgatgtgggccgaattactggctcttgcagcgtctgcccagggacgtgtgtatcgcgcggaagaccctcatggtgcgctccgcggcctcttcgaagtccgtggactccttgccaaagacttagctgttgttgcattgcgcgaaggtcttgatttacctccgactgatgatccaatgcttcttgcgtacctcttggacccgtcaaacacgacgcctgaaggcgtagcccgtcgttacggcggcgagtggaccgaagatgcagcgaaacgcgcgttattggccgaacgtttgcacgccaatttattaggacgtttgcaaggcgaggaacgtctcctctggctttacgaagaagtggagaaaccattgagtcgcgtgctcgcgcatatggaagctaccggtgtcaaattagacgtggcgtatttggagaatctcagccttgaagttgctgcccacatgcgccgcttggaggaagaagtattccgtttagcaggccgttcctttcgccttaattctcgcgatcagttagaacgtgtgttgttcgatgaacttggtctccctcctatcggcaagacagagaagaccggtaaacgtagcacttcagcggcggttttagaagctcttcgcgaagtccatcccattgtggacaagatcttgcaataccgcgaactcgcgaaattgaaaggcacctatattgaccgtcttccggcattagtccacccgaaaacgggacgcctccatacccgcttcaaccaaacagccacggcgaccggtcgtttgtcctcctctgatccaaaccttcagaatattccagtacgtaccaaattgggccagaagatccgccgtgcgtttgtagctgaggagggttggcgtttagtggccctcgattatagccaaattgaattacgtgtccttgcccatctttctggcgatgagaacctcatccgcgtgtttcaggaaggcaaagacattcacactcaaacggcaagctggatgtttggattatcagctgaagcgatcgatcctttgatgcgtcgtgcagcgaagaccatcaatttcggtgttctctacggtatgagtgcctttcgtttgtcgcaggaattaggcattccctatgaagaagctcaggcgttcattcagaaatactttcaaagctatcccaaagttaaagcatggatcgagaagactctcgaagaaggccgcacacgtggttacgtagagaccttatttggacgtcgccgctatgttcccgatttaaacgctcgcgtgaaaggcaagcgtgaagccgccgaacgcatggcgttcaacatgcctgtacagggcacggcagctgacctcatgaaacttgcaatggtgcgcctttttccacaattgcgtgaagttggtgcccgcatgctcttgcaggtccacgatgaactcttgttagaagcgccaaaagagcgtgcggaagaggtggcagccctcgcgaaagaagttatggaaggcgtgtggcccttagcggtgcctcttgaagtcgaagttggtattggcgaggattggctggctgccaaagga

SEQ ID NO: 3912 - protein, 841 aa, synthetic construct
  REGION 1..841: note = Variant of DNA polymerase I from Thermus sp. strain 2.9
MHHHHHHGGSGVLPVFEPKGRVLLVDGHHLAYRNFFALKGLTTSSGEPVQGVYGFAKSLLKALKEDGDVVIVVFDAKAPSFRHEAYEAYKAGRAPTPEDFPRQLALMKELVDLLGLERLEVPGFEADDVLATLAKKAEREGYEVQILTADRDLFQLLSPRISVLHPEGHRITPEWLWEKYGLRPEQWVDFRALAGDPSDNIPGVKGIGEKTALKLLKEWGSLENLLKNLDQVKPESVREKILAHLEDLKLSRELSRVRTDLPLEVDFQRRREPDWEGLKAFLERLEFGSLLHEFGLLESPLPAEEAPWPPPEGAFLGYRLSRPEPMWAELLALAASAQGRVYRAEDPHGALRGLFEVRGLLAKDLAVVALREGLDLPPTDDPMLLAYLLDPSNTTPEGVARRYGGEWTEDAAKRALLAERLHANLLGRLQGEERLLWLYEEVEKPLSRVLAHMEATGVKLDVAYLENLSLEVAAHMRRLEEEVFRLAGRSFRLNSRDQLERVLFDELGLPPIGKTEKTGKRSTSAAVLEALREVHPIVDKILQYRELAKLKGTYIDRLPALVHPKTGRLHTRFNQTATATGRLSSSDPNLQNIPVRTKLGQKIRRAFVAEEGWRLVALDYSQIELRVLAHLSGDENLIRVFQEGKDIHTQTASWMFGLSAEAIDPLMRRAAKTINFGVLYGMSAFRLSQELGIPYEEAQAFIQKYFQSYPKVKAWIEKTLEEGRTRGYVETLFGRRRYVPDLNARVKGKREAAERMAFNMPVQGTAADLMKLAMVRLFPQLREVGARMLLQVHDELLLEAPKERAEEVAALAKEVMEGVWPLAVPLEVEVGIGEDWLAAKG

SEQ ID NO: 3913 - DNA, 2523 bp, synthetic construct
  misc_feature 1..2523: note = Variant of DNA polymerase I from Thermus sp. strain 2.9
  source 1..2523: mol_type = other DNA
atgcaccatcatcatcatcatggcggtagcggcgtgttaccggtgttcgagcctaaaggtcgcgtgcttctggttgatggccatcatctcgcgtatcgtaacttctttgccctgaaaggattaaccaccagcagcggcgagccggtacagggtgtctacggctttgcaaagtcgctcctgaaagctctgaaagaagacggtgatgtggtgattgttgtctttgatgcgaaagcgccaagttttcgccacgaagcgtacgaagcttacaaagccgggcgtgctccaacgccggaagactttcctcgccaattggcgcttatgaaggaattagtggatttgcttggcctcgaacgcttggaagttcccggtttcgaggcagacgacgtattagcgactctcgcaaagaaagccgaacgtgagggctatgaagtccagatcttgacagcagatcgcgatcttttccagcttttatctccgcgcatctcggtgttacacccggaagggcatcgtatcaccccggaatggctctgggagaaatatggtttgcgtcccgaacaatgggtggattttcgcgccttagcaggcgatccgagcgacaatattccgggagttaaaggtatcggcgagaagacggcgctcaagctccttaaagaatgggggtcgttggagaacttgcttaagaatttagatcaggtcaaaccagagtcagtgcgtgagaagattcttgctcacctcgaagacctcaaattaagccgcgaattgtcccgtgtacgcaccgatttgccgctcgaagttgatttccaacgccgccgcgaacctgactgggagggtcttaaagcgtttttagagcgtcttgaatttggttcgctcttgcatgaattcggccttttagaaagcccgttaccagccgaagaagcaccttggccaccgcccgagggcgcgtttttaggttaccgtttgagtcgcccggaaccgatgtgggccgaattactggctcttgcagcgtctgcccagggacgtgtgtatcgcgcggaagaccctcatggtgcgctccgcggcctcttcgaagtccgtggactccttgccaaagacttagctgttgttgcattgcgcgaaggtcttgatttacctccgactgatgatccaatgcttcttgcgtacctcttggacccgtcaaacacgacgcccgaaggcgtagcccgtcgttacggcggcgagtggaccgaagatgcagcgaaacgcgcgttattggccgaacgtttgcacgccaatttattaggacgtttgcaaggcgaggaacgtctcctctggctttacgaagaagtggagaaaccattgagtcgcgtgctcgcgcatatggaagctaccggtgtcaaattagacgtggcgtatttggagaatctcagccttgaagttgctgcccacatgcgccgcttggaggaagaagtattcatgttagcaggccgttcctttcgccttaattctcgcgatcagttagaacgtgtgttgttcgatgaacttggtctccctcctatcggcaagacagagaagaccggtaaacgtagcacttcagcggcggttttagaagctcttcgcgaagtccatcccattgtggacaagatcttgcaataccgcgaactcgcgaaattgaaaggcacctatattgaccgtcttccggcattagtccacccgaaaacgggacgcctccatacccgcttcaaccaaacagccacggcgaccggtcgtttgtcctcctctgatccaaaccttcagaatattccagtacgtaccccattgggccagaagatccgccgtgcgtttgtagctgaggagggttggcgtttagtggccctcgattatagccaaattgaattacgtgtccttgcccatctttctggcgatgagaacctcatccgcgtgtttcaggaaggcaaagacattcacactcaaacggcaagctggatgtttggattatcagctgaagcgatcgatcctttgatgcgtcgtgcagcgaagaccatcaatttcggtgttctctacggtatgagtgcctttcgtttgtcgcaggaattaggcattccctatgaagaagctcaggcgttcattcagaaatactttcaaagctatcccaaagttaaagcatggatcgagaagactctcgaagaaggccgcacacgtggttacgtagagaccttatttggacgtcgccgctatgttcccgatttaaacgctcgcgtgaaaggcaagcgtgaagccgccgaacgcatggcgttcaacatgcctgtacagggcacggcagctgacctcatgaaacttgcaatggtgcgcctttttccacaattgcgtgaagttggtgcccgcatgctcttgcaggtccacgatgaactcttgttagaagcgccaaaagagcgtgcggaagaggtggcagccctcgcgaaagaagttatggaaggcgtgtggcccttagcggtgcctcttgaagtcgaagttggtattggcgaggattggctggctgccaaagga

SEQ ID NO: 3914 - protein, 841 aa, synthetic construct
  REGION 1..841: note = Variant of DNA polymerase I from Thermus sp. strain 2.9
MHHHHHHGGSGVLPVFEPKGRVLLVDGHHLAYRNFFALKGLTTSSGEPVQGVYGFAKSLLKALKEDGDVVIVVFDAKAPSFRHEAYEAYKAGRAPTPEDFPRQLALMKELVDLLGLERLEVPGFEADDVLATLAKKAEREGYEVQILTADRDLFQLLSPRISVLHPEGHRITPEWLWEKYGLRPEQWVDFRALAGDPSDNIPGVKGIGEKTALKLLKEWGSLENLLKNLDQVKPESVREKILAHLEDLKLSRELSRVRTDLPLEVDFQRRREPDWEGLKAFLERLEFGSLLHEFGLLESPLPAEEAPWPPPEGAFLGYRLSRPEPMWAELLALAASAQGRVYRAEDPHGALRGLFEVRGLLAKDLAVVALREGLDLPPTDDPMLLAYLLDPSNTTPEGVARRYGGEWTEDAAKRALLAERLHANLLGRLQGEERLLWLYEEVEKPLSRVLAHMEATGVKLDVAYLENLSLEVAAHMRRLEEEVFMLAGRSFRLNSRDQLERVLFDELGLPPIGKTEKTGKRSTSAAVLEALREVHPIVDKILQYRELAKLKGTYIDRLPALVHPKTGRLHTRFNQTATATGRLSSSDPNLQNIPVRTPLGQKIRRAFVAEEGWRLVALDYSQIELRVLAHLSGDENLIRVFQEGKDIHTQTASWMFGLSAEAIDPLMRRAAKTINFGVLYGMSAFRLSQELGIPYEEAQAFIQKYFQSYPKVKAWIEKTLEEGRTRGYVETLFGRRRYVPDLNARVKGKREAAERMAFNMPVQGTAADLMKLAMVRLFPQLREVGARMLLQVHDELLLEAPKERAEEVAALAKEVMEGVWPLAVPLEVEVGIGEDWLAAKG

SEQ ID NO: 3915 - DNA, 2523 bp, synthetic construct
  misc_feature 1..2523: note = Variant of DNA polymerase I from Thermus sp. strain 2.9
  source 1..2523: mol_type = other DNA
atgcaccatcatcatcatcatggcggtagcggcgtgttaccggtgttcgagcctaaaggtcgcgtgcttctggttgatggccatcatctcgcgtatcgtaacttctttgccctgaaaggattaaccaccagcagcggcgagccggtacagggtgtctacggctttgcaaagtcgctcctgaaagctctgaaagaagacggtgatgtggtgattgttgtctttgatgcgaaagcgccaagttttcgccacgaagcgtacgaagcttacaaagccgggcgtgctccaacgccggaagactttcctcgccaattggcgcttatgaaggaattagtggatttgcttggcctcgaacgcttggaagttcccggtttcgaggcagacgacgtattagcgactctcgcaaagaaagccgaacgtgagggctatgaagtccagatcttgacagcagatcgcgatcttttccagcttttatctccgcgcatctcggtgttacacccggaagggcatcgtatcaccccggaatggctctgggagaaatatggtttgcgtcccgaacaatgggtggattttcgcgccttagcaggcgatccgagcgacaatattccgggagttaaaggtatcggcgagaagacggcgctcaagctccttaaagaatgggggtcgttggagaacttgcttaagaatttagatcaggtcaaaccagagtcagtgcgtgagaagattcttgctcacctcgaagacctcaaattaagccgcgaattgtcccgtgtacgcaccgatttgccgctcgaagttgatttccaacgccgccgcgaacctgactgggagggtcttaaagcgtttttagagcgtcttgaatttggttcgctcttgcatgaattcggccttttagaaagcccgttaccagccgaagaagcaccttggccaccgcccgagggcgcgtttttaggttaccgtttgagtcgcccggaaccgatgtgggccgaattactggctcttgcagcgtctgcccagggacgtgtgtatcgcgcggaagaccctcatggtgcgctccgcggcctcttcgaagtccgtggactccttgccaaagacttagctgttgttgcattgcgcgaaggtcttgatttacctccgactgatgatccaatgcttcttgcgtacctcttggacccgtcaaacacgacgcccgaaggcgtagcccgtcgttacggcggcgagtggaccgaagatgcagcgaaacgcgcgttattggccgaacgtttgcacgccaatttattaggacgtttgcaaggcgaggaacgtctcctctggctttacgaagaagtggagaaaccattgagtcgcgtgctcgcgcatatggaagctaccggtgtcaaattagacgtggcgtatttggagaatctcagccttgaagttgctgcccacatgcgccgcttggaggaagaagtattccgtttagcaggccgttcctttcgccttaattctcgcgatcagttagaacgtgtgttgttcgatgaacttggtctccctcctatcggcaagacagagaagaccggtaaacgtagcacttcagcggcggttttagaagctcttcgcgaagtccatcccattgtggacaagatcttgcaataccgcgaactcgcgaaattgaaaggcacctatattgaccgtcttccggcattagtccacccgagtacgggacgcctccatacccgcttcaaccaaacagccacggcgaccggtcgtttgtcctcctctgatccaaaccttcagaatattccagtacgtaccccattgggccagaagatccgccgtgcgtttgtagctgaggagggttggcgtttagtggccctcgattatagccaaattgaattacgtgtccttgcccatctttctggcgatgagaacctcatccgcgtgtttcaggaaggcaaagacattcacactcaaacggcaagctggatgtttggattatcagctgaagcgatcgatcctttgatgcgtcgtgcagcgaagaccatcaatttcggtgttctctacggtatgagtgcctttcgtttgtcgcaggaattaggcattccctatgaagaagctcaggcgttcattcagaaatactttcaaagctatcccaaagttaaagcatggatcgagaagactctcgaagaaggccgcacacgtggttacgtagagaccttatttggacgtcgccgctatgttcccgatttaaacgctcgcgtgaaaggcaagcgtgaagccgccgaacgcatggcgttcaacatgcctgtacagggcacggcagctgacctcatgaaacttgcaatggtgcgcctttttccacaattgcgtgaagttggtgcccgcatgctcttgcaggtccacgatgaactcttgttagaagcgccaaaagagcgtgcggaagaggtggcagccctcgcgaaagaagttatggaaggcgtgtggcccttagcggtgcctcttgaagtcgaagttggtattggcgaggattggctggctgccaaagga

SEQ ID NO: 3916 - protein, 841 aa, synthetic construct
  REGION 1..841: note = Variant of DNA polymerase I from Thermus sp. strain 2.9
MHHHHHHGGSGVLPVFEPKGRVLLVDGHHLAYRNFFALKGLTTSSGEPVQGVYGFAKSLLKALKEDGDVVIVVFDAKAPSFRHEAYEAYKAGRAPTPEDFPRQLALMKELVDLLGLERLEVPGFEADDVLATLAKKAEREGYEVQILTADRDLFQLLSPRISVLHPEGHRITPEWLWEKYGLRPEQWVDFRALAGDPSDNIPGVKGIGEKTALKLLKEWGSLENLLKNLDQVKPESVREKILAHLEDLKLSRELSRVRTDLPLEVDFQRRREPDWEGLKAFLERLEFGSLLHEFGLLESPLPAEEAPWPPPEGAFLGYRLSRPEPMWAELLALAASAQGRVYRAEDPHGALRGLFEVRGLLAKDLAVVALREGLDLPPTDDPMLLAYLLDPSNTTPEGVARRYGGEWTEDAAKRALLAERLHANLLGRLQGEERLLWLYEEVEKPLSRVLAHMEATGVKLDVAYLENLSLEVAAHMRRLEEEVFRLAGRSFRLNSRDQLERVLFDELGLPPIGKTEKTGKRSTSAAVLEALREVHPIVDKILQYRELAKLKGTYIDRLPALVHPSTGRLHTRFNQTATATGRLSSSDPNLQNIPVRTPLGQKIRRAFVAEEGWRLVALDYSQIELRVLAHLSGDENLIRVFQEGKDIHTQTASWMFGLSAEAIDPLMRRAAKTINFGVLYGMSAFRLSQELGIPYEEAQAFIQKYFQSYPKVKAWIEKTLEEGRTRGYVETLFGRRRYVPDLNARVKGKREAAERMAFNMPVQGTAADLMKLAMVRLFPQLREVGARMLLQVHDELLLEAPKERAEEVAALAKEVMEGVWPLAVPLEVEVGIGEDWLAAKG

SEQ ID NO: 3917 - DNA, 2523 bp, synthetic construct
  misc_feature 1..2523: note = Variant of DNA polymerase I from Thermus sp. strain 2.9
  source 1..2523: mol_type = other DNA
atgcaccatcatcatcatcatggcggtagcggcgtgttaccggtgttcgagcctaaaggtcgcgtgcttctggttgatggccatcatctcgcgtatcgtaacttctttgccctgaaaggattaaccaccagcagcggcgagccggtacagggtgtctacggctttgcaaagtcgctcctgaaagctctgaaagaagacggtgatgtggtgattgttgtctttgatgcgaaagcgccaagttttcgccacgaagcgtacgaagcttacaaagccgggcgtgctccaacgccggaagactttcctcgccaattggcgcttatgaaggaattagtggatttgcttggcctcgaacgcttggaagttcccggtttcgaggcagacgacgtattagcgactctcgcaaagaaagccgaacgtgagggctatgaagtccagatcttgacagcagatcgcgatcttttccagcttttatctccgcgcatctcggtgttacacccggaagggcatcgtatcaccccggaatggctctgggagaaatatggtttgcgtcccgaacaatgggtggattttcgcgccttagcaggcgatccgagcgacaatattccgggagttaaaggtatcggcgagaagacggcgctcaagctccttaaagaatgggggtcgttggagaacttgcttaagaatttagatcaggtcaaaccagagtcagtgcgtgagaagattcttgctcacctcgaagacctcaaattaagccgcgaattgtcccgtgtacgcaccgatttgccgctcgaagttgatttccaacgccgccgcgaacctgactgggagggtcttaaagcgtttttagagcgtcttgaatttggttcgctcttgcatgaattcggccttttagaaagcccgttaccagccgaagaagcaccttggccaccgcccgagggcgcgtttttaggttaccgtttgagtcgcccggaaccgatgtgggccgaattactggctcttgcagcgtctgcccagggacgtgtgtatcgcgcggaagaccctcatggtgcgctccgcggcctcttcgaagtccgtggactccttgccaaagacttagctgttgttgcattgcgcgaaggtcttgatttacctccgactgatgatccaatgcttcttgcgtacctcttggacccgtcaaacacgacgcccgaaggcgtagcccgtcgttacggcggcgagtggaccgaagatgcagcgaaacgcgcgttattggccgaacgtttgcacgccaatttattaggacgtttgcaaggcgaggaacgtctcctctggctttacgaagaagtggagaaaccattgagtcgcgtgctcgcgcatatggaagctaccggtgtcaaattagacgtggcgtatttggagaatctcagccttgaagttgctgcccacatgcgccgcttggaggaagaagtattccgtttagcaggccgttcctttcgccttaattctcgcgatcagttagaacgtgtgttgttcgatgaacttggtctccctcctatcggcaagacagagaagaccggtaaacgtagcacttcagcggcggttttagaagctcttcgcgaagtccatcccattgtggacaagatcttgcaataccgcgaactcgcgaaattgaaaggcacctatattgaccgtcttccggcattagtccacccgaaaacgggacgcctccatacccgcttcaaccaaacagccacggcgaccggtcgtttgtcctcctctgatccaaaccttcagaatattccagtacgtaccccattgggccagaagatccgccgtgcgtttgtagctgaggagggttggcgtttagtggccctcgattatagccaaattgaattacgtgtccttgcccatctttctggcgatgagaacctcatccgcgtgtttcaggaaggcaaagacattcacactcaaacggcaagctggatgtttggattatcagctgaagcgatcgatcctttgatgcgtcgtgcagcgaagaccatcaatttcggtgttctctacggtatgagtgcctttcgtttgtcgcagaggttaggcattccctatgaagaagctcaggcgttcattcagaaatactttcaaagctatcccaaagttaaagcatggatcgagaagactctcgaagaaggccgcacacgtggttacgtagagaccttatttggacgtcgccgctatgttcccgatttaaacgctcgcgtgaaaggcaagcgtgaagccgccgaacgcatggcgttcaacatgcctgtacagggcacggcagctgacctcatgaaacttgcaatggtgcgcctttttccacaattgcgtgaagttggtgcccgcatgctcttgcaggtccacgatgaactcttgttagaagcgccaaaagagcgtgcggaagaggtggcagccctcgcgaaagaagttatggaaggcgtgtggcccttagcggtgcctcttgaagtcgaagttggtattggcgaggattggctggctgccaaagga

SEQ ID NO: 3918 - protein, 841 aa, synthetic construct
  REGION 1..841: note = Variant of DNA polymerase I from Thermus sp. strain 2.9
MHHHHHHGGSGVLPVFEPKGRVLLVDGHHLAYRNFFALKGLTTSSGEPVQGVYGFAKSLLKALKEDGDVVIVVFDAKAPSFRHEAYEAYKAGRAPTPEDFPRQLALMKELVDLLGLERLEVPGFEADDVLATLAKKAEREGYEVQILTADRDLFQLLSPRISVLHPEGHRITPEWLWEKYGLRPEQWVDFRALAGDPSDNIPGVKGIGEKTALKLLKEWGSLENLLKNLDQVKPESVREKILAHLEDLKLSRELSRVRTDLPLEVDFQRRREPDWEGLKAFLERLEFGSLLHEFGLLESPLPAEEAPWPPPEGAFLGYRLSRPEPMWAELLALAASAQGRVYRAEDPHGALRGLFEVRGLLAKDLAVVALREGLDLPPTDDPMLLAYLLDPSNTTPEGVARRYGGEWTEDAAKRALLAERLHANLLGRLQGEERLLWLYEEVEKPLSRVLAHMEATGVKLDVAYLENLSLEVAAHMRRLEEEVFRLAGRSFRLNSRDQLERVLFDELGLPPIGKTEKTGKRSTSAAVLEALREVHPIVDKILQYRELAKLKGTYIDRLPALVHPKTGRLHTRFNQTATATGRLSSSDPNLQNIPVRTPLGQKIRRAFVAEEGWRLVALDYSQIELRVLAHLSGDENLIRVFQEGKDIHTQTASWMFGLSAEAIDPLMRRAAKTINFGVLYGMSAFRLSQRLGIPYEEAQAFIQKYFQSYPKVKAWIEKTLEEGRTRGYVETLFGRRRYVPDLNARVKGKREAAERMAFNMPVQGTAADLMKLAMVRLFPQLREVGARMLLQVHDELLLEAPKERAEEVAALAKEVMEGVWPLAVPLEVEVGIGEDWLAAKG

SEQ ID NO: 3919 - DNA, 2523 bp, synthetic construct; identical to SEQ ID NO: 3433
  misc_feature 1..2523: note = Variant of DNA polymerase I from Thermus sp. strain 2.9
  source 1..2523: mol_type = other DNA

SEQ ID NO: 3920 - protein, 841 aa, synthetic construct; identical to SEQ ID NO: 3434
  REGION 1..841: note = Variant of DNA polymerase I from Thermus sp. strain 2.9

SEQ ID NO: 3921 - DNA, 2523 bp, synthetic construct
  misc_feature 1..2523: note = Variant of DNA polymerase I from Thermus sp. strain 2.9
  source 1..2523: mol_type = other DNA
atgcaccatcatcatcatcatggcggtagcggcgtgttaccggtgttcgagcctaaaggtcgcgtgcttctggttgatggccatcatctcgcgtatcgtaacttctttgccctgaaaggattaaccaccagcagcggcgagccggtacagggtgtctacggctttgcaaagtcgctcctgaaagctctgaaagaagacggtgatgtggtgattgttgtctttgatgcgaaagcgccaagttttcgccacgaagcgtacgaagcttacaaagccgggcgtgctccaacgccggaagactttcctcgccaattggcgcttatgaaggaattagtggatttgcttggcctcgaacgcttggaagttcccggtttcgaggcagacgacgtattagcgactctcgcaaagaaagccgaacgtgagggctatgaagtccagatcttgacagcagatcgcgatcttttccagcttttatctccgcgcatctcggtgttacacccggaagggcatcgtatcaccccggaatggctctgggagaaatatggtttgcgtcccgaacaatgggtggattttcgcgccttagcaggcgatccgagcgacaatattccgggagttaaaggtatcggcgagaagacggcgctcaagctccttaaagaatgggggtcgttggagaacttgcttaagaatttagatcaggtcaaaccagagtcagtgcgtgagaagattcttgctcacctcgaagacctcaaattaagccgcgaattgtcccgtgtacgcaccgatttgccgctcgaagttgatttccaacgccgccgcgaacctgactgggagggtcttaaagcgtttttagagcgtcttgaatttggttcgctcttgcatgaattcggccttttagaaagcccgttaccagccgaagaagcaccttggccaccgcccgagggcgcgtttttaggttaccgtttgagtcgcccggaaccgatgtgggccgaattactggctcttgcagcgtctgcccagggacgtgtgtatcgcgcggaagaccctcatggtgcgctccgcggcctcttcgctgtccgtggactccttgccaaagacttagctgttgttgcattgcgcgaaggtcttgatttacctccgactgatgatccaatgcttcttgcgtacctcttggacccgtcaaacacgacgcccgaaggcgtagcccgtcgttacggcggcgagtggaccgaagatgcagcgaaacgcgcgttattggccgaacgtttgcacgccaatttattaggacgtttgcaaggcgaggaacgtctcctctggctttacgaagaagtggagaaaccattgagtcgcgtgctcgcgcatatggaagctaccggtgtcaaattagacgtggcgtatttggagaatctcagccttgaagttgctgcccacatgcgccgcttggaggaagaagtattccgtttagcaggccgttcctttcgccttaattctcgcgatcagttagaacgtgtgttgttcgatgaacttggtctccctcctatcggcaagacagagaagaccggtaaacgtagcacttcagcggcggttttagaagctcttcgcgaagtccatcccattgtggacaagatcttgcaataccgcgaactcgcgaaattgaaaggcacctatattgaccgtcttccggcattagtccacccgaaaacgggacgcctccatacccgcttcaaccaaacagccacggcgaccggtcgtttgtcctcctctgatccaaaccttcagaatattccagtacgtaccccattgggccagaagatccgccgtgcgtttgtagctgaggagggttggcgtttagtggccctcgattatagccaaattgaattacgtgtccttgcccatctttctggcgatgagaacctcatccgcgtgtttcaggaaggcaaagacattcacactcaaacggcaagctggatgtttggattatcagctgaagcgatcgatcctttgatgcgtcgtgcagcgaagaccatcaatttcggtgttctctacggtatgagtgcctttcgtttgtcgcaggaattaggcattccctatgaagaagctcaggcgttcattcagaaatactttcaaagctatcccaaagttaaagcatggatcgagaagactctcgaagaaggccgcacacgtggttacgtagagaccttatttggacgtcgccgctatgttcccgatttaaacgctcgcgtgaaaggcaagcgtgaagccgccgaacgcatggcgttcaacatgcctgtacagggcacggcagctgacctcatgaaacttgcaatggtgcgcctttttccacaattgcgtgaagttggtgcccgcatgctcttgcaggtccacgatgaactcttgttagaagcgccaaaagagcgtgcggaagaggtggcagccctcgcgaaagaagttatggaaggcgtgtggcccttagcggtgcctcttgaagtcgaagttggtattggcgaggattggctggctgccaaagga

SEQ ID NO: 3922 - protein, 841 aa, synthetic construct
  REGION 1..841: note = Variant of DNA polymerase I from Thermus sp. strain 2.9
MHHHHHHGGSGVLPVFEPKGRVLLVDGHHLAYRNFFALKGLTTSSGEPVQGVYGFAKSLLKALKEDGDVVIVVFDAKAPSFRHEAYEAYKAGRAPTPEDFPRQLALMKELVDLLGLERLEVPGFEADDVLATLAKKAEREGYEVQILTADRDLFQLLSPRISVLHPEGHRITPEWLWEKYGLRPEQWVDFRALAGDPSDNIPGVKGIGEKTALKLLKEWGSLENLLKNLDQVKPESVREKILAHLEDLKLSRELSRVRTDLPLEVDFQRRREPDWEGLKAFLERLEFGSLLHEFGLLESPLPAEEAPWPPPEGAFLGYRLSRPEPMWAELLALAASAQGRVYRAEDPHGALRGLFAVRGLLAKDLAVVALREGLDLPPTDDPMLLAYLLDPSNTTPEGVARRYGGEWTEDAAKRALLAERLHANLLGRLQGEERLLWLYEEVEKPLSRVLAHMEATGVKLDVAYLENLSLEVAAHMRRLEEEVFRLAGRSFRLNSRDQLERVLFDELGLPPIGKTEKTGKRSTSAAVLEALREVHPIVDKILQYRELAKLKGTYIDRLPALVHPKTGRLHTRFNQTATATGRLSSSDPNLQNIPVRTPLGQKIRRAFVAEEGWRLVALDYSQIELRVLAHLSGDENLIRVFQEGKDIHTQTASWMFGLSAEAIDPLMRRAAKTINFGVLYGMSAFRLSQELGIPYEEAQAFIQKYFQSYPKVKAWIEKTLEEGRTRGYVETLFGRRRYVPDLNARVKGKREAAERMAFNMPVQGTAADLMKLAMVRLFPQLREVGARMLLQVHDELLLEAPKERAEEVAALAKEVMEGVWPLAVPLEVEVGIGEDWLAAKG

SEQ ID NO: 3923 - DNA, 2523 bp, synthetic construct
  misc_feature 1..2523: note = Variant of DNA polymerase I from Thermus sp. strain 2.9
  source 1..2523: mol_type = other DNA
atgcaccatcatcatcatcatggcggtagcggcgtgttaccggtgttcgagcctaaaggtcgcgtgcttctggttgatggccatcatctcgcgtatcgtaacttctttgccctgaaaggattaaccaccagcagcggcgagccggtacagggtgtctacggctttgcaaagtcgctcctgaaagctctgaaagaagacggtgatgtggtgattgttgtctttgatgcgaaagcgccaagttttcgccacgaagcgtacgaagcttacaaagccgggcgtgctccaacgccggaagactttcctcgccaattggcgcttatgaaggaattagtggatttgcttggcctcgaacgcttggaagttctgggtttcgaggcagacgacgtattagcgactctcgcaaagaaagccgaacgtgagggctatgaagtccagatcttgacagcagatcgcgatcttttccagcttttatctccgcgcatctcggtgttacacccggaagggcatcgtatcaccccggaatggctctgggagaaatatggtttgcgtcccgaacaatgggtggattttcgcgccttagcaggcgatccgagcgacaatattccgggagttaaaggtatcggcgagaagacggcgctcaagctccttaaagaatgggggtcgttggagaacttgcttaagaatttagatcaggtcaaaccagagtcagtgcgtgagaagattcttgctcacctcgaagacctcaaattaagccgcgaattgtcccgtgtacgcaccgatttgccgctcgaagttgatttccaacgccgccgcgaacctgactgggagggtcttaaagcgtttttagagcgtcttgaatttggttcgctcttgcatgaattcggccttttagaaagcccgttaccagccgaagaagcaccttggccaccgcccgagggcgcgtttttaggttaccgtttgagtcgcccggaaccgatgtgggccgaattactggctcttgcagcgtctgcccagggacgtgtgtatcgcgcggaagaccctcatggtgcgctccgcggcctcttcgaagtccgtggactccttgccaaagacttagctgttgttgcattgcgcgaaggtcttgatttacctccgactgatgatccaatgcttcttgcgtacctcttggacccgtcaaacacgacgcccgaaggcgtagcccgtcgttacggcggcgagtggaccgaagatgcagcgaaacgcgcgttattggccgaacgtttgcacgccaatttattaggacgtttgcaaggcgaggaacgtctcctctggctttacgaagaagtggagaaaccattgagtcgcgtgctcgcgcatatggaagctaccggtgtcaaattagacgtggcgtatttggagaatctcagccttgaagttgctgcccacatgcgccgcttggaggaagaagtattccgtttagcaggccgttcctttcgccttaattctcgcgatcagttagaacgtgtgttgttcgatgaacttggtctccctcctatcggcaagacagagaagaccggtaaacgtagcacttcagcggcggttttagaagctcttcgcgaagtccatcccattgtggacaagatcttgcaataccgcgaactcgcgaaattgaaaggcacctatattgaccgtcttccggcattagtccacccgaaaacgggacgcctccatacccgcttcaaccaaacagccacggcgaccggtcgtttgtcctcctctgatccaaaccttcagaatattccagtacgtaccccattgggccagaagatccgccgtgcgtttgtagctgaggagggttggcgtttagtggccctcgattatagccaaattgaattacgtgtccttgcccatctttctggcgatgagaacctcatccgcgtgtttcaggaaggcaaagacattcacactcaaacggcaagctggatgtttggattatcagctgaagcgatcgatcctttgatgcgtcgtgcagcgaagaccatcaatttcggtgttctctacggtatgagtgcctttcgtttgtcgcaggaattaggcattccctatgaagaagctcaggcgttcattcagaaatactttcaaagctatcccaaagttaaagcatggatcgagaagactctcgaagaaggccgcacacgtggttacgtagagaccttatttggacgtcgccgctatgttcccgatttaaacgctcgcgtgaaaggcaagcgtgaagccgccgaacgcatggcgttcaacatgcctgtacagggcacggcagctgacctcatgaaacttgcaatggtgcgcctttttccacaattgcgtgaagttggtgcccgcatgctcttgcaggtccacgatgaactcttgttagaagcgccaaaagagcgtgcggaagaggtggcagccctcgcgaaagaagttatggaaggcgtgtggcccttagcggtgcctcttgaagtcgaagttggtattggcgaggattggctggctgccaaagga

SEQ ID NO: 3924 - protein, 841 aa, synthetic construct
  REGION 1..841: note = Variant of DNA polymerase I from Thermus sp. strain 2.9
MHHHHHHGGSGVLPVFEPKGRVLLVDGHHLAYRNFFALKGLTTSSGEPVQGVYGFAKSLLKALKEDGDVVIVVFDAKAPSFRHEAYEAYKAGRAPTPEDFPRQLALMKELVDLLGLERLEVLGFEADDVLATLAKKAEREGYEVQILTADRDLFQLLSPRISVLHPEGHRITPEWLWEKYGLRPEQWVDFRALAGDPSDNIPGVKGIGEKTALKLLKEWGSLENLLKNLDQVKPESVREKILAHLEDLKLSRELSRVRTDLPLEVDFQRRREPDWEGLKAFLERLEFGSLLHEFGLLESPLPAEEAPWPPPEGAFLGYRLSRPEPMWAELLALAASAQGRVYRAEDPHGALRGLFEVRGLLAKDLAVVALREGLDLPPTDDPMLLAYLLDPSNTTPEGVARRYGGEWTEDAAKRALLAERLHANLLGRLQGEERLLWLYEEVEKPLSRVLAHMEATGVKLDVAYLENLSLEVAAHMRRLEEEVFRLAGRSFRLNSRDQLERVLFDELGLPPIGKTEKTGKRSTSAAVLEALREVHPIVDKILQYRELAKLKGTYIDRLPALVHPKTGRLHTRFNQTATATGRLSSSDPNLQNIPVRTPLGQKIRRAFVAEEGWRLVALDYSQIELRVLAHLSGDENLIRVFQEGKDIHTQTASWMFGLSAEAIDPLMRRAAKTINFGVLYGMSAFRLSQELGIPYEEAQAFIQKYFQSYPKVKAWIEKTLEEGRTRGYVETLFGRRRYVPDLNARVKGKREAAERMAFNMPVQGTAADLMKLAMVRLFPQLREVGARMLLQVHDELLLEAPKERAEEVAALAKEVMEGVWPLAVPLEVEVGIGEDWLAAKG

SEQ ID NO: 3925 - DNA, 2523 bp, synthetic construct
  misc_feature 1..2523: note = Variant of DNA polymerase I from Thermus sp. strain 2.9
  source 1..2523: mol_type = other DNA
atgcaccatcatcatcatcatggcggtagcggcgtgttaccggtgttcgagcataaaggtcgcgtgcttctggttgatggccatcatctcgcgtatcgtaacttctttgccctgaaaggattaaccaccagcagcggcgagccggtacagggtgtctacggctttgcaaagtcgctcctgaaagctctgaaagaagacggtgatgtggtgattgttgtctttgatgcgaaagcgccaagttttcgccacgaagcgtacgaagcttacaaagccgggcgtgctccaacgccggaagactttcctcgccaattggcgcttatgaaggaattagtggatttgcttggcctcgaacgcttggaagttcccggtttcgaggcagacgacgtattagcgactctcgcaaagaaagccgaacgtgagggctatgaagtccagatcttgacagcagatcgcgatcttttccagcttttatctccgcgcatctcggtgttacacccggaagggcatcgtatcaccccggaatggctctgggagaaatatggtttgcgtcccgaacaatgggtggattttcgcgccttagcaggcgatccgagcgacaatattccgggagttaaaggtatcggcgagaagacggcgctcaagctccttaaagaatgggggtcgttggagaacttgcttaagaatttagatcaggtcaaaccagagtcagtgcgtgagaagattcttgctcacctcgaagacctcaaattaagccgcgaattgtcccgtgtacgcaccgatttgccgctcgaagttgatttccaacgccgccgcgaacctgactgggagggtcttaaagcgtttttagagcgtcttgaatttggttcgctcctgcatgaattcggccttttagaaagcccgttaccagccgaagaagcaccttggccaccgcccgagggcgcgtttttaggttaccgtttgagtcgcccggaaccgatgtgggccgaattactggctcttgcagcgtctgcccagggacgtgtgtatcgcgcggaagaccctcatggtgcgctccgcggcctcttcgaagtccgtggactccttgccaaagacttagctgttgttgcattgcgcgaaggtcttgatttacctccgactgatgatccaatgcttcttgcgtacctcttggacccgtcaaacacgacgcccgaaggcgtagcccgtcgttacggcggcgagtggaccgaagatgcagcgaaacgcgcgttattggccgaacgtttgcacgccaatttattaggacgtttgcaaggcgaggaacgtctcctctggctttacgaagaagtggagaaaccattgagtcgcgtgctcgcgcatatggaagctaccggtgtcaaattagacgtggcgtatttggagaatctcagccttgaagttgctgcccacatgcgccgcttggaggaagaagtattccgtttagcaggccgttcctttcgccttaattctcgcgatcagttagaacgtgtgctgttcgatgaacttggtctccctcctatcggcaagacagagaagaccggtaaacgtagcacttcagcggcggttttagaagctcttcgcgaagtccatcccattgtggacaagatcttgcaataccgcgaactcgcgaaattgaaaggcacctatattgaccgtcttccggcattagtccacccgaaaacgggacgcctccatacccgcttcaaccaaacagccacggcgaccggtcgtttgtcctcctctgatccaaaccttcagaatattccagtacgtaccccattgggccagaagatccgccgtgcgtttgtagctgaggagggttggcgtttagtggccctcgattatagccaaattgaattacgtgtccttgcccatctttctggcgatgagaacctcatccgcgtgtttcaggaaggcaaagacattcacactcaaacggcaagctggatgtttggattatcagctgaagcgatcgatcctttgatgcgtcgtgcagcgaagaccatcaatttcggtgttctctacggtatgagtgcgtttcgtttgtcgcaggaattaggcattccctatgaagaagctcaggcgttcattcagaaatactttcaaagctatcccaaagttaaagcatggatcgagaagactctcgaagaaggccgcacacgtggttacgtagagaccttatttggacgtcgccgctatgttcccgatttaaacgctcgcgtgaaaggcaagcgtgaagccgccgaacgcatggcgttcaacatgcctgtacagggcacggcagctgacctcatgaaacttgcaatggtgcgcctttttccacaattgcgtgaagttggtgcccgcatgctcttgcaggtccacgatgaactcttgttagaagcgccaaaagagcgtgcggaagaggtggcagccctcgcgaaagaagttatggaaggcgtgtggcccttagcggtgcctcttgaagtcgaagttggtattggcgaggattggctggctgccaaagga

SEQ ID NO: 3926 - protein, 841 aa, synthetic construct; identical to SEQ ID NO: 3822
  REGION 1..841: note = Variant of DNA polymerase I from Thermus sp. strain 2.9

SEQ ID NO: 3927 - DNA, 2523 bp, synthetic construct
  misc_feature 1..2523: note = Variant of DNA polymerase I from Thermus sp. strain 2.9
  source 1..2523: mol_type = other DNA
atgcaccatcatcatcatcatggcggtagcggcgtgttaccggtgttcgagcctaaaggtcgcgtgcttctggttgatggccatcatctcgcgtatcgtaacttctttgccctgaaaggattaaccaccagcagcggcgagccggtacagggtgtctacggctttgcaaagtcgctcctgaaagctctgaaagaagacggtgatgtggtgattgttgtctttgatgcgaaagcgccaagttttcgccacgaagcgtacgaagcttacaaagccgggcgtgctccaacgccggaagactttcctcgccaattggcgcttatgaaggaattagtggatttgcttggcctcgaacgcttggaagttcccggtttcgaggcagacgacgtattagcgactctcgcaaagaaagccgaacgtgagggctatgaagtccagatcttgacagcagatcgcgatcttttccagcttttatctccgcgcatctcggtgttacacccggaagggcatcgtatcaccccggaatggctctgggagaaatatggtttgcgtcccgaacaatgggtggattttcgcgccttagcaggcgatccgagcgacaatattccgggagttaaaggtatcggcgagaagacggcgctcaagctccttaaagaatgggggtcgttggagaacttgcttaagaatttagatcaggtcaaaccagagtcagtgcgtgagaagattcttgctcacctcgaagacctcaaattaagccgcgaattgtcccgtgtacgcaccgatttgccgctcgaagttgatttccaacgccgccgcgaacctgactgggagggtcttaaagcgtttttagagcgtcttgaatttggttcgctcttgcatgaattcggccttttagaaagcccgttaccagccgaagaagcaccttggccaccgcccgagggcgcgtttttaggttaccgtttgagtcgcccggaaccgatgtgggccgaattactggctcttgcagcgtctgcccagggacgtgtgtatcgcgcggaagaccctcatggtgcgctccgcggcctcttcgaagtccgtggactccttgccaaagacttagctgttgttgcattgcgcgaaggtcttgatttacctccgactgatgatccaatgcttcttgcgtacctcttggacccgtcaaacacgacgcccgaaggcgtagcccgtcgttacggcggcgagtggaccgaagatgcagcgaaacgcgcgttattggccgaacgtttgcacgccaatttattaggacgtttgcaaggcgaggaacgtctcctctggctttacgaagaagtggagacgccattgagtcgcgtgctcgcgcatatggaagctaccggtgtcaaattagacgtggcgtatttggagaatctcagccttgaagttgctgcccacatgcgccgcttggaggaagaagtattccgtttagcaggccgttcctttcgccttaattctcgcgatcagttagaacgtgtgttgttcgatgaacttggtctccctcctatcggcaagacagagaagaccggtaaacgtagcacttcagcggcggttttagaagctcttcgcgaagtccatcccattgtggacaagatcttgcaataccgcgaactcgcgaaattgaaaggcacctatattgaccgtcttccggcattagtccacccgaaaacgggacgcctccatacccgcttcaaccaaacagccacggcgaccggtcgtttgtcctcctctgatccaaaccttcagaatattccagtacgtaccccattgggccagaagatccgccgtgcgtttgtagctgaggagggttggcgtttagtggccctcgattatagccaaattgaattacgtgtccttgcccatctttctggcgatgagaacctcatccgcgtgtttcaggaaggcaaagacattcacactcaaacggcaagctggatgtttggattatcagctgaagcgatcgatcctttgatgcgtcgtgcagcgaagaccatcaatttcggtgttctctacggtatgagtgcctttcgtttgtcgcaggaattaggcattccctatgaagaagctcaggcgttcattcagaaatactttcaaagctatcccaaagttaaagcatggatcgagaagactctcgaagaaggccgcacacgtggttacgtagagaccttatttggacgtcgccgctatgttcccgatttaaacgctcgcgtgaaaggcaagcgtgaagccgccgaacgcatggcgttcaacatgcctgtacagggcacggcagctgacctcatgaaacttgcaatggtgcgcctttttccacaattgcgtgaagttggtgcccgcatgctcttgcaggtccacgatgaactcttgttagaagcgccaaaagagcgtgcggaagaggtggcagccctcgcgaaagaagttatggaaggcgtgtggcccttagcggtgcctcttgaagtcgaagttggtattggcgaggattggctggctgccaaagga

SEQ ID NO: 3928 - protein, 841 aa, synthetic construct
  REGION 1..841: note = Variant of DNA polymerase I from Thermus sp. strain 2.9
MHHHHHHGGSGVLPVFEPKGRVLLVDGHHLAYRNFFALKGLTTSSGEPVQGVYGFAKSLLKALKEDGDVVIVVFDAKAPSFRHEAYEAYKAGRAPTPEDFPRQLALMKELVDLLGLERLEVPGFEADDVLATLAKKAEREGYEVQILTADRDLFQLLSPRISVLHPEGHRITPEWLWEKYGLRPEQWVDFRALAGDPSDNIPGVKGIGEKTALKLLKEWGSLENLLKNLDQVKPESVREKILAHLEDLKLSRELSRVRTDLPLEVDFQRRREPDWEGLKAFLERLEFGSLLHEFGLLESPLPAEEAPWPPPEGAFLGYRLSRPEPMWAELLALAASAQGRVYRAEDPHGALRGLFEVRGLLAKDLAVVALREGLDLPPTDDPMLLAYLLDPSNTTPEGVARRYGGEWTEDAAKRALLAERLHANLLGRLQGEERLLWLYEEVETPLSRVLAHMEATGVKLDVAYLENLSLEVAAHMRRLEEEVFRLAGRSFRLNSRDQLERVLFDELGLPPIGKTEKTGKRSTSAAVLEALREVHPIVDKILQYRELAKLKGTYIDRLPALVHPKTGRLHTRFNQTATATGRLSSSDPNLQNIPVRTPLGQKIRRAFVAEEGWRLVALDYSQIELRVLAHLSGDENLIRVFQEGKDIHTQTASWMFGLSAEAIDPLMRRAAKTINFGVLYGMSAFRLSQELGIPYEEAQAFIQKYFQSYPKVKAWIEKTLEEGRTRGYVETLFGRRRYVPDLNARVKGKREAAERMAFNMPVQGTAADLMKLAMVRLFPQLREVGARMLLQVHDELLLEAPKERAEEVAALAKEVMEGVWPLAVPLEVEVGIGEDWLAAKG

SEQ ID NO: 3929 - DNA, 2523 bp, synthetic construct
  misc_feature 1..2523: note = Variant of DNA polymerase I from Thermus sp. strain 2.9
  source 1..2523: mol_type = other DNA
atgcaccatgtgcatcatcatggcggtagcggcgtgttaccggtgttcgagcctaaaggtcgcgtgcttctggttgatggccatcatctcgcgtatcgtaacttctttgccctgaaaggattaaccaccagcagcggcgagccggtacagggtgtctacggctttgcaaagtcgctcctgaaagctctgaaagaagacggtgatgtggtgattgttgtctttgatgcgaaagcgccaagttttcgccacgaagcgtacgaagcttacaaagccgggcgtgctccaacgccggaagactttcctcgccaattggcgcttatgaaggaattagtggatttgcttggcctcgaacgcttggaagttcccggtttcgaggcagacgacgtattagcgactctcgcaaagaaagccgaacgtgagggctatgaagtccagatcttgacagcagatcgcgatcttttccagcttttatctccgcgcatctcggtgttacacccggaagggcatcgtatcaccccggaatggctctgggagaaatatggtttgcgtcccgaacaatgggtggattttcgcgccttagcaggcgatccgagcgacaatattccgggagttaaaggtatcggcgagaagacggcgctcaagctccttaaagaatgggggtcgttggagaacttgcttaagaatttagatcaggtcaaaccagagtcagtgcgtgagaagattcttgctcacctcgaagacctcaaattaagccgcgaattgtcccgtgtacgcaccgatttgccgctcgaagttgatttccaacgccgccgcgaacctgactgggagggtcttaaagcgtttttagagcgtcttgaatttggttcgctcttgcatgaattcggccttttagaaagcccgttaccagccgaagaagcaccttggccaccgcccgagggcgcgtttttaggttaccgtttgagtcgcccggaaccgatgtgggccgaattactggctcttgcagcgtctgcccagggacgtgtgtatcgcgcggaagaccctcatggtgcgctccgcggcctcttcgaagtccgtggactccttgccaaagacttagctgttgttgcattgcgcgaaggtcttgatttacctccgactgatgatccaatgcttcttgcgtacctcttggacccgtcaaacacgacgcccgaaggcgtagcccgtcgttacggcggcgagtggaccgaagatgcagcgaaacgcgcgttattggccgaacgtttgcacgccaatttattaggacgtttgcaaggcgaggaacgtctcctctggctttacgaagaagtggagaaaccattgagtcgcgtgctcgcgcatatggaagctaccggtgtcaaattagacgtggcgtatttggagaatctcagccttgaagttgctgcccacatgcgccgcttggaggaagaagtattccgtttagcaggccgttcctttcgccttaattctcgcgatcagttagaacgtgtgttgttcgatgaacttggtctccctcctatcggcaagacagagaagaccggtaaacgtagcacttcagcggcggttttagaagctcttcgcgaagtccatcccattgtggacaagatcttgcaataccgcgaactcgcgaaattgaaaggcacctatattgaccgtcttccggcattagtccacccgaaaacgggacgcctccatacccgcttcaaccaaacagccacggcgaccggtcgtttgtcctcctctgatccaaaccttcagaatattccagtacgtaccccattgggccagaagatccgccgtgcgtttgtagctgaggagggttggcgtttagtggccctcgattatagccaaattgaattacgtgtccttgcccatctttctggcgatgagaacctcatccgcgtgtttcaggaaggcaaagacattcacactcaaacggcaagctggatgtttggattatcagctgaagcgatcgatcctttgatgcgtcgtgcagcgaagaccatcaatttcggtgttctctacggtatgagtgcctttcgtttgtcgcaggaattaggcattccctatgaagaagctcaggcgttcattcagaaatactttcaaagctatcccaaagttaaagcatggatcgagaagactctcgaagaaggccgcacacgtggttacgtagagaccttatttggacgtcgccgctatgttcccgatttaaacgctcgcgtgaaaggcaagcgtgaagccgccgaacgcatggcgttcaacatgcctgtacagggcacggcagctgacctcatgaaacttgcaatggtgcgcctttttccacaattgcgtgaagttggtgcccgcatgctcttgcaggtccacgatgaactcttgttagaagcgccaaaagagcgtgcggaagaggtggcagccctcgcgaaagaagttatggaaggcgtgtggcccttagcggtgcctcttgaagtcgaagttggtattggcgaggattggctggctgccaaagga

SEQ ID NO: 3930 - protein, 841 aa, synthetic construct
  REGION 1..841: note = Variant of DNA polymerase I from Thermus sp. strain 2.9
MHHVHHHGGSGVLPVFEPKGRVLLVDGHHLAYRNFFALKGLTTSSGEPVQGVYGFAKSLLKALKEDGDVVIVVFDAKAPSFRHEAYEAYKAGRAPTPEDFPRQLALMKELVDLLGLERLEVPGFEADDVLATLAKKAEREGYEVQILTADRDLFQLLSPRISVLHPEGHRITPEWLWEKYGLRPEQWVDFRALAGDPSDNIPGVKGIGEKTALKLLKEWGSLENLLKNLDQVKPESVREKILAHLEDLKLSRELSRVRTDLPLEVDFQRRREPDWEGLKAFLERLEFGSLLHEFGLLESPLPAEEAPWPPPEGAFLGYRLSRPEPMWAELLALAASAQGRVYRAEDPHGALRGLFEVRGLLAKDLAVVALREGLDLPPTDDPMLLAYLLDPSNTTPEGVARRYGGEWTEDAAKRALLAERLHANLLGRLQGEERLLWLYEEVEKPLSRVLAHMEATGVKLDVAYLENLSLEVAAHMRRLEEEVFRLAGRSFRLNSRDQLERVLFDELGLPPIGKTEKTGKRSTSAAVLEALREVHPIVDKILQYRELAKLKGTYIDRLPALVHPKTGRLHTRFNQTATATGRLSSSDPNLQNIPVRTPLGQKIRRAFVAEEGWRLVALDYSQIELRVLAHLSGDENLIRVFQEGKDIHTQTASWMFGLSAEAIDPLMRRAAKTINFGVLYGMSAFRLSQELGIPYEEAQAFIQKYFQSYPKVKAWIEKTLEEGRTRGYVETLFGRRRYVPDLNARVKGKREAAERMAFNMPVQGTAADLMKLAMVRLFPQLREVGARMLLQVHDELLLEAPKERAEEVAALAKEVMEGVWPLAVPLEVEVGIGEDWLAAKG

SEQ ID NO: 3931 - DNA, 2523 bp, synthetic construct
  misc_feature 1..2523: note = Variant of DNA polymerase I from Thermus sp. strain 2.9
  source 1..2523: mol_type = other DNA
atgcaccatcatcatcatcatggcggtagcggcgtgttaccggtgttcgagcctaaaggtcgcgtgcttctggttgatggccatcatctcgcgtatcgtaacttctttgccctgaaaggattaaccaccagcagcggcgagccggtacagggtgtctacggctttgcaaagtcgctcctgaaagctctgaaagaagacggtgatgtggtgattgttgtctttgatgcgcatgcgccaagttttcgccacgaagcgtacgaagcttacaaagccgggcgtgctccaacgccggaagactttcctcgccaattggcgcttatgaaggaattagtggatttgcttggcctcgaacgcttggaagttcccggtttcgaggcagacgacgtattagcgactctcgcaaagaaagccgaacgtgagggctatgaagtccagatcttgacagcagatcgcgatcttttccagcttttatctccgcgcatctcggtgttacacccggaagggcatcgtatcaccccggaatggctctgggagaaatatggtttgcgtcccgaacaatgggtggattttcgcgccttagcaggcgatccgagcgacaatattccgggagttaaaggtatcggcgagaagacggcgctcaagctccttaaagaatgggggtcgttggagaacttgcttaagaatttagatcaggtcaaaccagagtcagtgcgtgagaagattcttgctcacctcgaagacctcaaattaagccgcgaattgtcccgtgtacgcaccgatttgccgctcgaagttgatttccaacgccgccgcgaacctgactgggagggtcttaaagcgtttttagagcgtcttgaatttggttcgctcttgcatgaattcggccttttagaaagcccgttaccagccgaagaagcaccttggccaccgcccgagggcgcgtttttaggttaccgtttgagtcgcccggaaccgatgtgggccgaattactggctcttgcagcgtctgcccagggacgtgtgtatcgcgcggaagaccctcatggtgcgctccgcggcctcttcgaagtccgtggactccttgccaaagacttagctgttgttgcattgcgcgaaggtcttgatttacctccgactgatgatccaatgcttcttgcgtacctcttggacccgtcaaacacgacgcccgaaggcgtagcccgtcgttacggcggcgagtggaccgaagatgcagcgaaacgcgcgttattggccgaacgtttgcacgccaatttattaggacgtttgcaaggcgaggaacgtctcctctggctttacgaagaagtggagaaaccattgagtcgcgtgctcgcgcatatggaagctaccggtgtcaaattagacgtggcgtatttggagaatctcagccttgaagttgctgcccacatgcgccgcttggaggaagaagtattccgtttagcaggccgttcctttcgccttaattctcgcgatcagttagaacgtgtgttgttcgatgaacttggtctccctcctatcggcaagacagagaagaccggtaaacgtagcacttcagcggcggttttagaagctcttcgcgaagtccatcccattgtggacaagatcttgcaataccgcgaactcgcgaaattgaaaggcacctatattgaccgtcttccggcattagtccacccgaaaacgggacgcctccatacccgcttcaaccaaacagccacggcgaccggtcgtttgtcctcctctgatccaaaccttcagaatattccagtacgtaccccattgggccagaagatccgccgtgcgtttgtagctgaggagggttggcgtttagtggccctcgattatagccaaattgaattacgtgtccttgcccatctttctggcgatgagaacctcatccgcgtgtttcaggaaggcaaagacattcacactcaaacggcaagctggatgtttggattatcagctgaagcgatcgatcctttgatgcgtcgtgcagcgaagaccatcaatttcggtgttctctacggtatgagtgcctttcgtttgtcgcaggaattaggcattccctatgaagaagctcaggcgttcattcagaaatactttcaaagctatcccaaagttaaagcatggatcgagaagactctcgaagaaggccgcacacgtggttacgtagagaccttatttggacgtcgccgctatgttcccgatttaaacgctcgcgtgaaaggcaagcgtgaagccgccgaacgcatggcgttcaacatgcctgtacagggcacggcagctgacctcatgaaacttgcaatggtgcgcctttttccacaattgcgtgaagttggtgcccgcatgctcttgcaggtccacgatgaactcttgttagaagcgccaaaagagcgtgcggaagaggtggcagccctcgcgaaagaagttatggaaggcgtgtggcccttagcggtgcctcttgaagtcgaagttggtattggcgaggattggctggctgccaaagga

SEQ ID NO: 3932 - protein, 841 aa, synthetic construct
  REGION 1..841: note = Variant of DNA polymerase I from Thermus sp. strain 2.9
MHHHHHHGGSGVLPVFEPKGRVLLVDGHHLAYRNFFALKGLTTSSGEPVQGVYGFAKSLLKALKEDGDVVIVVFDAHAPSFRHEAYEAYKAGRAPTPEDFPRQLALMKELVDLLGLERLEVPGFEADDVLATLAKKAEREGYEVQILTADRDLFQLLSPRISVLHPEGHRITPEWLWEKYGLRPEQWVDFRALAGDPSDNIPGVKGIGEKTALKLLKEWGSLENLLKNLDQVKPESVREKILAHLEDLKLSRELSRVRTDLPLEVDFQRRREPDWEGLKAFLERLEFGSLLHEFGLLESPLPAEEAPWPPPEGAFLGYRLSRPEPMWAELLALAASAQGRVYRAEDPHGALRGLFEVRGLLAKDLAVVALREGLDLPPTDDPMLLAYLLDPSNTTPEGVARRYGGEWTEDAAKRALLAERLHANLLGRLQGEERLLWLYEEVEKPLSRVLAHMEATGVKLDVAYLENLSLEVAAHMRRLEEEVFRLAGRSFRLNSRDQLERVLFDELGLPPIGKTEKTGKRSTSAAVLEALREVHPIVDKILQYRELAKLKGTYIDRLPALVHPKTGRLHTRFNQTATATGRLSSSDPNLQNIPVRTPLGQKIRRAFVAEEGWRLVALDYSQIELRVLAHLSGDENLIRVFQEGKDIHTQTASWMFGLSAEAIDPLMRRAAKTINFGVLYGMSAFRLSQELGIPYEEAQAFIQKYFQSYPKVKAWIEKTLEEGRTRGYVETLFGRRRYVPDLNARVKGKREAAERMAFNMPVQGTAADLMKLAMVRLFPQLREVGARMLLQVHDELLLEAPKERAEEVAALAKEVMEGVWPLAVPLEVEVGIGEDWLAAKG

SEQ ID NO: 3933 - DNA, 2523 bp, synthetic construct
  misc_feature 1..2523: note = Variant of DNA polymerase I from Thermus sp. strain 2.9
  source 1..2523: mol_type = other DNA
atgcaccatcatcatcatcatggcggtagcggcgtgttaccggtgttcgagcctaaaggtcgcgtgcttctggttgatggccatcatctcgcgtatcgtaacttctttgccctgaaaggattaaccaccagcagcggcgagccggtacagggtgtctacggctttgcaaagtcgctcctgaaagctctgaaagaagacggtgatgtggtgattgttgtctttgatgcgaaagcgccaagttttcgccacgaagcgtacgaagcttacaaagccgggcgtgctccaacgccggaagactttcctcgccaattggcgcttatgaaggaattagtggatttgcttggcctcgaacgcttggaagttcccggtttcgaggcagacgacgtattagcgactctcgcaaagaaagccgaacgtgagggctatgaagtccagatcttgacagcagatcgcgatcttttccagcttttatctccgcgcatctcggtgttacacccggaagggcatcgtatcaccccggaatggctctgggagaaatatggtttgcgtcccgaacaatgggtggattttcgcgccttagcaggcgatccgagcgacaatattccgggagttaaaggtatcggcgagaagacggcgctcaagctccttaaagaatgggggtcgttggagaacttgcttaagaatttagatcaggtcaaaccagagtcagtgcgtgagaagattcttgctcacctcgaagacctcaaattaagccgcgaattgtcccgtgtacgcaccgatttgccgctcgaagttgatttccaacgccgccgcgaacctgactgggagggtcttaaagcgtttttagagcgtcttgaatttggttcgctcttgcatgaattcggccttttagaaagcccgttaccagccgaagaagcaccttggccaccgcccgagggcgcgtttttaggttaccgtttgagtcgcccggaaccgatgtgggccgaattactggctcttgcagcgtctgcccagggacgtgtgtatcgcgcggaagaccctcatggtgcgctccgcggcctcttcgaagtccgtggactccttgccaaagacttagctgttgttgcattgcgcgaaggtcttgatttacctccgactgatgatccaatgcttcttgcgtacctcttggacccgtcaaacatgacgcccgaaggcgtagcccgtcgttacggcggcgagtggaccgaagatgcagcgaaacgcgcgttattggccgaacgtttgcacgccaatttattaggacgtttgcaaggcgaggaacgtctcctctggctttacgaagaagtggagaaaccattgagtcgcgtgctcgcgcatatggaagctaccggtgtcaaattagacgtggcgtatttggagaatctcagccttgaagttgctgcccacatgcgccgcttggaggaagaagtattccgtttagcaggccgttcctttcgccttaattctcgcgatcagttagaacgtgtgttgttcgatgaacttggtctccctcctatcggcaagacagagaagaccggtaaacgtagcacttcagcggcggttttagaagctcttcgcgaagtccatcccattgtggacaagatcttgcaataccgcgaactcgcgaaattgaaaggcacctatattgaccgtcttccggcattagtccacccgaaaacgggacgcctccatacccgcttcaaccaaacagccacggcgaccggtcgtttgtcctcctctgatccaaaccttcagaatattccagtacgtaccccattgggccagaagatccgccgtgcgtttgtagctgaggagggttggcgtttagtggccctcgattatagccaaattgaattacgtgtccttgcccatctttctggcgatgagaacctcatccgcgtgtttcaggaaggcaaagacattcacactcaaacggcaagctggatgtttggattatcagctgaagcgatcgatcctttgatgcgtcgtgcagcgaagaccatcaatttcggtgttctctacggtatgagtgcctttcgtttgtcgcaggaattaggcattccctatgaagaagctcaggcgttcattcagaaatactttcaaagctatcccaaagttaaagcatggatcgagaagactctcgaagaaggccgcacacgtggttacgtagagaccttatttggacgtcgccgctatgttcccgatttaaacgctcgcgtgaaaggcaagcgtgaagccgccgaacgcatggcgttcaacatgcctgtacagggcacggcagctgacctcatgaaacttgcaatggtgcgcctttttccacaattgcgtgaagttggtgcccgcatgctcttgcaggtccacgatgaactcttgttagaagcgccaaaagagcgtgcggaagaggtggcagccctcgcgaaagaagttatggaaggcgtgtggcccttagcggtgcctcttgaagtcgaagttggtattggcgaggattggctggctgccaaagga

SEQ ID NO: 3934 - protein, 841 aa, synthetic construct
  REGION 1..841: note = Variant of DNA polymerase I from Thermus sp. strain 2.9
MHHHHHHGGSGVLPVFEPKGRVLLVDGHHLAYRNFFALKGLTTSSGEPVQGVYGFAKSLLKALKEDGDVVIVVFDAKAPSFRHEAYEAYKAGRAPTPEDFPRQLALMKELVDLLGLERLEVPGFEADDVLATLAKKAEREGYEVQILTADRDLFQLLSPRISVLHPEGHRITPEWLWEKYGLRPEQWVDFRALAGDPSDNIPGVKGIGEKTALKLLKEWGSLENLLKNLDQVKPESVREKILAHLEDLKLSRELSRVRTDLPLEVDFQRRREPDWEGLKAFLERLEFGSLLHEFGLLESPLPAEEAPWPPPEGAFLGYRLSRPEPMWAELLALAASAQGRVYRAEDPHGALRGLFEVRGLLAKDLAVVALREGLDLPPTDDPMLLAYLLDPSNMTPEGVARRYGGEWTEDAAKRALLAERLHANLLGRLQGEERLLWLYEEVEKPLSRVLAHMEATGVKLDVAYLENLSLEVAAHMRRLEEEVFRLAGRSFRLNSRDQLERVLFDELGLPPIGKTEKTGKRSTSAAVLEALREVHPIVDKILQYRELAKLKGTYIDRLPALVHPKTGRLHTRFNQTATATGRLSSSDPNLQNIPVRTPLGQKIRRAFVAEEGWRLVALDYSQIELRVLAHLSGDENLIRVFQEGKDIHTQTASWMFGLSAEAIDPLMRRAAKTINFGVLYGMSAFRLSQELGIPYEEAQAFIQKYFQSYPKVKAWIEKTLEEGRTRGYVETLFGRRRYVPDLNARVKGKREAAERMAFNMPVQGTAADLMKLAMVRLFPQLREVGARMLLQVHDELLLEAPKERAEEVAALAKEVMEGVWPLAVPLEVEVGIGEDWLAAKG

SEQ ID NO: 3935 - DNA, 2523 bp, synthetic construct
  misc_feature 1..2523: note = Variant of DNA polymerase I from Thermus sp. strain 2.9
  source 1..2523: mol_type = other DNA
atgcaccatcatcatcatcatggcggtagcggcgtgttaccggtgttcgagcctaaaggtcgcgtgcttctggttgatggccatcatctcgcgtatcgtaacttctttgccctgaaaggattaaccaccagcagcggcgagccggtacagggtgtctacggctttgcaaagtcgctcctgaaagctctgaaagaagacggtgatgtggtgattgttgtctttgatgcgaaagcgccaagttttcgccacgaagcgtacgaagcttacaaagccgggcgtgctccaacgccggaagactttcctcgccaattggcgcttatgaaggaattagtggatttgcttggcctcgaacgcttggaagttcccggtttcgaggcagacgacgtattagcgactctcgcaaagaaagccgaacgtgagggctatgaagtccagatcttgacagcagatcgcgatcttttccagcttttatctccgcgcatctcggtgttacacccggaagggcatcgtatcaccccggaatggctctgggagaaatatggtttgcgtcccgaacaatgggtggattttcgcgccttagcaggcgatccgagcgacaatattccgggagttaaaggtatcggcgagaagacggcgctcaagctccttaaagaatgggggtcgttggagaacttgcttaagaatttagatcaggtcaaaccagagtcagtgcgtgagaagattcttgctcacctcgaagacctcaaattaagccgcgaattgtcccgtgtacgcaccgatttgccgctcgaagttgatttccaacgccgccgcgaacctgactgggagggtcttaaagcgtttttagagcgtcttgaatttggttcgctcttgcatgaattcggccttttagaaagcccgttaccagccgaagaagcaccttggccaccgcccgagggcgcgtttttaggttaccgtttgagtcgcccggaaccgatgtgggccgaattactggctcttgcagcgtctgcccagggacgtgtgtatcgcgcggaagaccctcatggtgcgctccgcggcctcttcgaagtccgtggactccttgccaaagacttagctgttgttgcattgcgcgaaggtcttgatttacctccgactgatgatccaatgcttcttgcgtacctcttggacccgtcaaacacgacgcccgaaggcgtagcccgtcgttacggcggcgagtggaccgaagatgcagcgaaacgcgcgttattggccgaacgtttgcacgccaatttattaggacgtttgcaaggcgaggaacgtctcctctggctttacgaagaagtggagaaaccattgagtcgcgtgctcgcgcatatggaagctaccggtgtcaaattagacgtggcgtatttggagaatctcagccttgaagttgctgcccacatgcgccgcttggaggaagaagtattccgtttagcaggccgttcctttcgccttaattctcgcgatcagttagaacgtgtgttgttcgatgaacttggtctccctcctatcggcaagacagagaagaccggtaaacgtagcacttcagcggcggttttagaagctcttcgcgaagtccatcccattgtggacaagatcttgcaataccgcgaactcgcgaaattgaaaggcacctatattgaccgtcttccggcattagtccacccgaaaacgggacgcctccatacccgcttcaaccaaacagccacggcgaccggtcgtttgtcctcctctgatccaaaccttcagaatattccagtacgtaccccattgggccagaagatccgccgtgcgtttgtagctgaggagggttggcgtttagtggccctcgattatagccaaattgaattacgtgtccttgcccatctttctggcgatgagaacctcatccgcgtgtttcaggaaggcaaagacattcacactcaaacggcaagctggatgtttggattatcagctgaagcgatcgatcctttgatgcgtcgtgcagcgaagaccatcaatttcggtgttctctacggtatgagtgcctttcgtttgtcgcaggaattaggcattccctatgaagaagctcaggcgttcattcagaaatactttcaaagctatcccaaagttaaagcatggatcgagaagactctcgaagaaggccgcacacgtggttacgtagagaccttatttggacgtcgccgctatgttcccggtttaaacgctcgcgtgaaaggcaagcgtgaagccgccgaacgcatggcgttcaacatgcctgtacagggcacggcagctgacctcatgaaacttgcaatggtgcgcctttttccacaattgcgtgaagttggtgcccgcatgctcttgcaggtccacgatgaactcttgttagaagcgccaaaagagcgtgcggaagaggtggcagccctcgcgaaagaagttatggaaggcgtgtggcccttagcggtgcctcttgaagtcgaagttggtattggcgaggattggctggctgccaaagga

SEQ ID NO: 3936 - protein, 841 aa, synthetic construct
  REGION 1..841: note = Variant of DNA polymerase I from Thermus sp. strain 2.9
MHHHHHHGGSGVLPVFEPKGRVLLVDGHHLAYRNFFALKGLTTSSGEPVQGVYGFAKSLLKALKEDGDVVIVVFDAKAPSFRHEAYEAYKAGRAPTPEDFPRQLALMKELVDLLGLERLEVPGFEADDVLATLAKKAEREGYEVQILTADRDLFQLLSPRISVLHPEGHRITPEWLWEKYGLRPEQWVDFRALAGDPSDNIPGVKGIGEKTALKLLKEWGSLENLLKNLDQVKPESVREKILAHLEDLKLSRELSRVRTDLPLEVDFQRRREPDWEGLKAFLERLEFGSLLHEFGLLESPLPAEEAPWPPPEGAFLGYRLSRPEPMWAELLALAASAQGRVYRAEDPHGALRGLFEVRGLLAKDLAVVALREGLDLPPTDDPMLLAYLLDPSNTTPEGVARRYGGEWTEDAAKRALLAERLHANLLGRLQGEERLLWLYEEVEKPLSRVLAHMEATGVKLDVAYLENLSLEVAAHMRRLEEEVFRLAGRSFRLNSRDQLERVLFDELGLPPIGKTEKTGKRSTSAAVLEALREVHPIVDKILQYRELAKLKGTYIDRLPALVHPKTGRLHTRFNQTATATGRLSSSDPNLQNIPVRTPLGQKIRRAFVAEEGWRLVALDYSQIELRVLAHLSGDENLIRVFQEGKDIHTQTASWMFGLSAEAIDPLMRRAAKTINFGVLYGMSAFRLSQELGIPYEEAQAFIQKYFQSYPKVKAWIEKTLEEGRTRGYVETLFGRRRYVPGLNARVKGKREAAERMAFNMPVQGTAADLMKLAMVRLFPQLREVGARMLLQVHDELLLEAPKERAEEVAALAKEVMEGVWPLAVPLEVEVGIGEDWLAAKG

SEQ ID NO: 3937 - DNA, 2523 bp, synthetic construct
  misc_feature 1..2523: note = Variant of DNA polymerase I from Thermus sp. strain 2.9
  source 1..2523: mol_type = other DNA
atgcaccatcatcatcatcatggcggtagcggcgtgttaccggtgttcgagcctaaaggtcgcgtgcttctggttgatggccatcatctcgcgtatcgtaacttctttgccctgaaaggattaaccaccagcagtggcgagccggtacagggtgtctacggctttgcaaagtcgctcctgaaagctctgaaagaagacggtgatgtggtgattgttgtctttgatgcgaaagcgccaagttttcgccacgaagcgtacgaagcttacaaagccgggcgtgctccaacgccggaagactttcctcgccaattggcgcttatgaaggaattagtggatttgcttggcctcgaacgcttggaagttcccggtttcgaggcagacgacgtattagcgactctcgcaaagaaagccgaacgtgagggctatgaagtccagatcttgacagcagatcgcgatcttttccagcttttatctccgcgcatctcggtgttacacccggaagggcatcgtatcaccccggaatggctctgggagaaatatggtttgcgtcccgaacaatgggtggattttcgcgccttagcaggcgatccgagcgacaatattccgggagttaaaggtatcggcgagaagacggcgctcaagctccttaaagaatgggggtcgttggagaacttgcttaagaatttagatcaggtcaaaccagagtcagtgcgtgagaagattcttgctcacctcgaagacctcaaattaagccgcgaattgtcccgtgtacgcaccgatttgccgctcgaagttgatttcggtcgccgccgcgaacctgactgggagggtcttaaagcgtttttagagcgtcttgaatttggttcgctcttgcatgaattcggccttttagaaagcccgttaccagccgaagaagcaccttggccaccgcccgagggcgcgtttttaggttaccgtttgagtcgcccggaaccgatgtgggccgaattactggctcttgcagcgtctgcccagggacgtgtgtatcgcgcggaagaccctcatggtgcgctccgcggcctcttcgaagtccgtggactccttgccaaagacttagctgttgttgcattgcgcgaaggtcttgatttacctccgactgatgatccaatgcttcttgcgtacctcttggacccgtcaaacacgacgcccgaaggcgtagcccgtcgttacggcggcgagtggaccgaagatgcagcgaaacgcgcgttattggccgaacgtttgcacgccaatttattaggacgtttgcaaggcgaggaacgtctcctctggctttacgaagaagtggagaaaccattgagtcgcgtgctcgcccatatggaagctaccggtgtcaaattagacgtggcgtatttggagaatctcagccttgaagttgctgcccacatgcgccgcttggaggaagaagtattccgtttagcaggccgttcctttcgccttaattctcgcgatcagttagaacgtgtgttgttcgatgaacttggtctccctcctatcggcaagacagagaagaccggtaaacgtagcacttcagcggcggttttagaagctcttcgcgaagtccatcccattgtggacaagatcttgcagtaccgcgaactcgcgaaattgaaaggcacctatattgaccgtcttccggcattagtccacccgaaaacgggacgcctccatacccgcttcaaccaaacagccacggcgaccggtcgtttgtcctcctctgatccaaaccttcagaatattccagtacgtaccccattgggccagaagatccgccgtgcgtttgtagctgaggagggttggcgtttagtggccctcgattatagccaaattgaattacgtgtccttgcccatctttctggcgatgagaacctcatccgcgtgtttcaggaaggcaaagacattcacactcaaacggcaagctggatgtttggattatcagctgaagcgatcgatcctttgatgcgtcgtgcagcgaagaccatcaatttcggtgttctctacggtatgagtgcctttcgtttgtcgcaggaattaggcattccctatgaagaagctcaggcgttcattcagaaatactttcaaagctatcccaaagttaaagcatggatcgagaagactctcgaggaaggccgcacacgtggttacgtagagaccttatttggacgtcgccgctatgttcccgatttaaacgctcgcgtgaaaggcaagcgtgaagccgccgaacgcatggcgttcaacatgcctgtacagggcacggcagctgacctcatgaaacttgcaatggtgcgcctttttccacaattgcgtgaagttggtgcccgcatgctcttgcaggtccacgatgaactcttgttagaagcgccaaaagagcgtgcggaagaggtggcagccctcgcgaaagaagttatggaaggcgtgtggcccttagcggtgcctcttgaagtcgaagttggtattggcgaggattggctggctgccaaagga

SEQ ID NO: 3938 - protein, 841 aa, synthetic construct
  REGION 1..841: note = Variant of DNA polymerase I from Thermus sp. strain 2.9
MHHHHHHGGSGVLPVFEPKGRVLLVDGHHLAYRNFFALKGLTTSSGEPVQGVYGFAKSLLKALKEDGDVVIVVFDAKAPSFRHEAYEAYKAGRAPTPEDFPRQLALMKELVDLLGLERLEVPGFEADDVLATLAKKAEREGYEVQILTADRDLFQLLSPRISVLHPEGHRITPEWLWEKYGLRPEQWVDFRALAGDPSDNIPGVKGIGEKTALKLLKEWGSLENLLKNLDQVKPESVREKILAHLEDLKLSRELSRVRTDLPLEVDFGRRREPDWEGLKAFLERLEFGSLLHEFGLLESPLPAEEAPWPPPEGAFLGYRLSRPEPMWAELLALAASAQGRVYRAEDPHGALRGLFEVRGLLAKDLAVVALREGLDLPPTDDPMLLAYLLDPSNTTPEGVARRYGGEWTEDAAKRALLAERLHANLLGRLQGEERLLWLYEEVEKPLSRVLAHMEATGVKLDVAYLENLSLEVAAHMRRLEEEVFRLAGRSFRLNSRDQLERVLFDELGLPPIGKTEKTGKRSTSAAVLEALREVHPIVDKILQYRELAKLKGTYIDRLPALVHPKTGRLHTRFNQTATATGRLSSSDPNLQNIPVRTPLGQKIRRAFVAEEGWRLVALDYSQIELRVLAHLSGDENLIRVFQEGKDIHTQTASWMFGLSAEAIDPLMRRAAKTINFGVLYGMSAFRLSQELGIPYEEAQAFIQKYFQSYPKVKAWIEKTLEEGRTRGYVETLFGRRRYVPDLNARVKGKREAAERMAFNMPVQGTAADLMKLAMVRLFPQLREVGARMLLQVHDELLLEAPKERAEEVAALAKEVMEGVWPLAVPLEVEVGIGEDWLAAKG

SEQ ID NO: 3939 - DNA, 2523 bp, synthetic construct
  misc_feature 1..2523: note = Variant of DNA polymerase I from Thermus sp. strain 2.9
  source 1..2523: mol_type = other DNA
atgcaccatcatcatcatcatggcggtagcggcgtgttaccggtgttcgagcctaaaggtcgcgtgcttctggttgatggccatcatctcgcgtatcgtaacttctttgccctgaaaggattaaccaccagcagcggcgagccggtacagggtgtctacggctttgcaaagtcgctcctgaaagctctgaaagaagacggtgatgtggtgattgttgtctttgatgcgaaagcgccaagttttcgccacgaagcgtacgaagcttacaaagccgggcgtgctccaacgccggaagactttcctcgccaattggcgcttatgaaggaattagtggatttgcttggcctcgaacgcttggaagttcccggtttcgaggcagacgacgtattagcgactctcgcaaagaaagccgaacgtgagggctatgaagtccagatcttgacagcagatcgcgatcttttccagcttttatctccgcgcatctcggtgttacacccggaagggcatcgtatcaccccggaatggctctgggagaaatatggtttgcgtcccgaacaatgggtggattttcgcgccttagcaggcgatccgagcgacaatattccgggagttaaaggtatcggcgagaagacggcgctcaagctccttaaagaatgggggtcgttggagaacttgcttaagaatttagatcaggtcaaaccagagtcagtgcgtgagaagattcttgctcacctcgaagacctcaaattaagccgcgaattgtcccgtgtacgcaccgatttgccgctcgaagttgatttccaacgccgccgcgaacctgactgggagggtcttaaagcgtttttagagcgtcttgaatttggttcgctcttgcatgaattcggccttttagaaagcccgttaccagccgaagaagcaccttggccaccgcccgagggcgcgtttttaggttaccgtttgagtcgcccggaaccgatgtgggccgaattactggctcttgcagcgtctgcccagggacgtgtgtatcgcgcggaagaccctcatggtgcgctccgcggcctcttcgaagtccgtggactccttgccaaagacttagctgttgttgcattgcgcgaaggtcttgatttacctccgactgatgatccaatgcttcttgcgtacctcttggacccgtcaaacacgacgcccgaaggcgtagcccgtcgttacggcggcgagtggaccgaagatgcagcgaaacgcgcgttattggccgaacgtttgcacgccaatttattaggacgtttgcaaggcgaggaacgtctcctctggctttacgaagaagtggagaaaccattgagtcgcgtgctcgcgcatatggaagctaccggtgtcaaattagacgtggcgtatttggagaatctcagccttgaagttgctgcccacatgcgccgcttggaggaagaagtagtccgtttagcaggccgttcctttcgccttaattctcgcgatcagttagaacgtgtgctgttcgatgaacttggtctccctcctatcggcaagacagagaagaccggtaaacgtagcacttcagcggcggttttagaagctcttcgcgaagtccatcccattgtggacaagatcttgcaataccgcgaactcgcgaaattgaaaggcacctatattgaccgtcttccggcattagtccacccgaaaacgggacgcctccatacccgcttcaaccaaacagccacggcgaccggtcgtttgtcctcctctgatccaaaccttcagaatattccagtacgtaccccattgggccagaagatccgccgtgcgtttgtagctgaggagggttggcgtttagtggccctcgattatagccaaattgaattacgtgtccttgcccatctttctggcgatgagaacctcatccgcgtgtttcaggaaggcaaagacattcacactcaaacggcaagctggatgtttggattatcagctgaagcgatcgatcctttgatgcgtcgtgcagcgaagaccatcaatttcggtgttctctacggtatgagtgcgtttcgtttgtcgcaggaattaggcattccctatgaagaagctcaggcgttcattcagaaatactttcaaagctatcccaaagttaaagcatggatcgagaagactctcgaagaaggccgcacacgtggttacgtagagaccttatttggacgtcgccgctatgttcccgatttaaacgctcgcgtgaaaggcaagcgtgaagccgccgaacgcatggcgttcaacatgcctgtacagggcacggcagctgacctcatgaaacttgcaatggtgcgcctttttccacaattgcgtgaagttggtgcccgcatgctcttgcaggtccacgatgaactcttgttagaagcgccaaaagagcgtgcggaagaggtggcagccctcgcgaaagaagttatggaaggcgtgtggcccttagcggtgcctcttgaagtcgaagttggtattggcgaggattggctggctgccaaagga

SEQ ID NO: 3940 - protein, 841 aa, synthetic construct; identical to SEQ ID NO: 3736
  REGION 1..841: note = Variant of DNA polymerase I from Thermus sp. strain 2.9

SEQ ID NO: 3941 - DNA, 2523 bp, synthetic construct
  misc_feature 1..2523: note = Variant of DNA polymerase I from Thermus sp. strain 2.9
  source 1..2523: mol_type = other DNA
atgcaccatcatcatcatcatggcggtagcggcgtgttagaggtgttcgagcctaaaggtcgcgtgcttctggttgatggccatcatctcgcgtatcgtaacttctttgccctgaaaggattaaccaccagcagcggcgagccggtacagggtgtctacggctttgcaaagtcgctcctgaaagctctgaaagaagacggtgatgtggtgattgttgtctttgatgcgaaagcgccaagttttcgccacgaagcgtacgaagcttacaaagccgggcgtgctccaacgccggaagactttcctcgccaattggcgcttatgaaggaattagtggatttgcttggcctcgaacgcttggaagttcccggtttcgaggcagacgacgtattagcgactctcgcaaagaaagccgaacgtgagggctatgaagtccagatcttgacagcagatcgcgatcttttccagcttttatctccgcgcatctcggtgttacacccggatgggcatcgtatcaccccggaatggctctgggagaaatatggtttgcgtcccgaacaatgggtggattttcgcgccttagcaggcgatccgagcgacaatattccgggagttaaaggtatcggcgagaagacggcgctcaagctccttaaagaatgggggtcgttggagaacttgcttaagaatttagatcaggtcaaaccagagtcagtgcgtgagaagattcttgctcacctcgaagacctcaagttaagccgcgaattgtcccgtgtacgcaccgatttgccgctcgaagttgatttccaacgccgccgcgaacctgactgggagggtcttaaagcgtttttagagcgtcttgaatttggttcgctcttgcatgaattcggccttttagaaagcccgttaccagccgaagaagcaccttggccaccgcccgagggcgcgtttttaggttaccgtttgagtcgcccggaaccgatgtgggccgaattactggctcttgcagcgtctgcccagggacgtgtgtatcgcgcggaagaccctcatggtgcgctccgcggcctcttcgaagtccgtggactccttgccaaagacttagctgttgttgcattgcgcgaaggtcttgatttacctccgactgatgatccaatgcttcttgcgtacctcttggacccgtcaaacacgacgcctgaaggcgtagcccgtcgttacggcggcgagtggaccgaagatgcagcgaaacgcgcgttattggccgaacgtttgcacgccaatttattaggacgtttgcaaggcgaggagcgtctcctctggctttacgaagaagtggagaaaccattgagtcgcgtgctcgcgcatatggaagctaccggtgtcaaattagacgtggcgtatttggagaatctcagccttgaagttgctgcccacatgcgccgcttggaggaagaagtattccgtttagcaggccgttcctttcgccttaattctcgcgatcagttagaacgtgtgttgttcgatgaacttggtctccctcctatcggcaagacagagaagaccggtaaacgtagcacttcagcggcggttttagaagctcttcgcgaagtccatcccattgtggacaagatcttgcaataccgcgaactcgcgaaattgaaaggcacctatattgaccgtcttccggcattagtccacccgaaaacgggacgcctccatacccgcttcaaccaaacagccacggcgaccggtcgtttgtcctcctctgatccaaaccttcagaatattccagtacgtaccccgttgggccagaagatccgccgtgcgtttgtagctgaggagggttggcgtttagtggccctcgattatagccaaattgaattacgtgtccttgcccatctttctggcgatgagaacctcatccgcgtgtttcaggaaggcaaagacattcacactcaaacggcaagctggatgtttggattatcagctgaagcgatcgatcctttgatgcgtcgtgcagcgaagaccatcaatttcggtgttctctacggtatgagtgcctttcgtttgtcgcaggaattaggcattcccaaagaagaagctcaggcgttcattcagaaatactttcaaagctatcccaaagttaaagcatggatcgagaagactctcgaagaaggccgcacccgtggttacgtagagaccttatttggacgtcgccgctatgttcccgatttaaacgctcgcgtgaaaggcaagcgtgaagccgccgaacgcatggcgttcaacatgcctgtacagggcacggcagctgacctcatgaaacttgcaatggtgcgcctttttccacaattgcgtgaagttggtgcccgcatgctcttgcaggtccacgatgaactcttgttagaagcgccaaaagagcgtgcggaagaggtggcagccctcgcgaaagaagttatggaaggcgtgtggcccttagcggtgcctcttgaagtcgaagttggtattggcgaggattggctggctgccaaagga

SEQ ID NO: 3942 - protein, 841 aa, synthetic construct; identical to SEQ ID NO: 3676
  REGION 1..841: note = Variant of DNA polymerase I from Thermus sp. strain 2.9

SEQ ID NO: 3943 - DNA, 2523 bp, synthetic construct
  misc_feature 1..2523: note = Variant of DNA polymerase I from Thermus sp. strain 2.9
  source 1..2523: mol_type = other DNA
atgcaccatcatcatcatcatggcggtagcggcgtgttagaggtgttcgagcctaaaggtcgcgtgcttctggttgatggccatcatctcgcgtatcgtaacttctttgccctgaaaggattaaccaccagcagcggcgagccggtacagggtgtctacggctttgcaaagtcgctcctgaaagctctgaaagaagacggtgatgtggtgattgttgtctttgatgcgaaagcgccaagttttcgccacgaagcgtacgaagcttacaaagccgggcgtgctccaacgccggaagactttcctcgccaattggcgcttatgaaggaattagtggatttgcttggcctcgaacgcttggaagttcccggtttcgaggcagacgacgtattagcgactctcgcaaagaaagccgaacgtgagggctatgaagtccagatcttgacagcagatcgcgatcttttccagcttttatctccgcgcatctcggtgttacacccggaagggcatcgtatcaccccggaatggctctgggagaaatatggtttgcgtcccgaacaatgggtggattttcgcgccttagcaggcgatccgagcgacaatattccgggagttaaaggtatcggcgagaagacggcgctcaagctccttaaagaatgggggtcgttggagaacttgcttaagaatttagatcaggtcaaaccagagtcagtgcgtgagaagattcttgctcacctcgaagacctcaaattaagccgcgaattgtcccgtgtacgcaccgatttgccgctcgaagttgatttccaacgccgccgcgaacctgactgggagggtcttaaagcgtttttagagcgtcttgaatttggttcgctcttgcatgaattcggccttttagaaagcccgttaccagccgaagaagcaccttggccaccgcccgagggcgcgtttttaggttaccgtttgagtcgcccggaaccgatgtgggccgaattactggctcttgcagcgtctgcccagggacgtgtgtatcgcgcggaagaccctcatggtgcgctccgcggcctcttcgaagtccgtggactccttgccaaagacttagctgttgttgcattgcgcgaaggtcttgatttacctccgactgatgatccaatgcttcttgcgtacctcttggacccgtcaaacacgacgcccgaaggcgtagcccgtcgttacggcggcgagtggaccgaagatgcagcgaaacgcgcgttattggccgaacgtttgcacgccaatttattaggacgtttgcaaggcgaggaacgtctcctctggctttacgaagaagtggagaaaccattgagtcgcgtgctcgcgcatatggaagctaccggtgtcaaattagacgtggcgtatttggagaatctcagccttgaagttgctgcccacatgcgccgcttggaggaagaagtattccgtttagcaggccgttcctttcgccttaattctcgcgatcagttagaacgtgtgttgttcgatgaacttggtctccctcctatcggcaagacagagaagaccggtaaacgtagcacttcagcggcggttttagaagctcttcgcgaagtccatcccattgtggacaagatcttgcaataccgcgaactcgcgaaattgaaaggcacctatattgaccgtcttccggcattagtccacccgaaaacgggacgcctccatacccgcttcaaccaaacagccacggcgaccggtcgtttgtcctcctctgatccaaaccttcagaatattccagtacgtaccccgttgggccagaagatccgccgtgcgtttgtagctgaggagggttggcgtttagtggccctcgattatagccaaattgaattacgtgtccttgcccatctttctggcgatgagaacctcatccgcgtgtttgaggaaggcaaagacattcacactcaaacggcaagctggatgtttggattatcagctgaagcgatcgatcctttgatgcgtcgtgcagcgaagaccatcaatttcggtgttctctacggtatgagtgcctttcgtttgtcgcaggaattaggcattccctatgaagaagctcaggcgttcattcagaaatactttcaaagctatcccaaagttaaagcatggatcgagaagactctcgaagaaggccgccaccgtggttacgtagagaccttatttggacgtcgccgctatgttcccgatttaaacgctcgcgtgaaaggcaagcgtgaagccgccgaacgcatggcgttcaacatgcctgtacagggcacggcagctgacctcatgaaacttgcaatggtgcgcctttttccacaattgcgtgaagttggtgcccgcatgctcttgcaggtccacgatgaactcttgttagaagcgccaaaagagcgtgcggaagaggtggcagccctcgcgaaagaagttatggaaggcgtgtggcccttagcggtgcctcttgaagtcgaagttggtattggcgaggattggctggctgccaaagga

SEQ ID NO: 3944 - protein, 841 aa, synthetic construct
  REGION 1..841: note = Variant of DNA polymerase I from Thermus sp. strain 2.9
MHHHHHHGGSGVLEVFEPKGRVLLVDGHHLAYRNFFALKGLTTSSGEPVQGVYGFAKSLLKALKEDGDVVIVVFDAKAPSFRHEAYEAYKAGRAPTPEDFPRQLALMKELVDLLGLERLEVPGFEADDVLATLAKKAEREGYEVQILTADRDLFQLLSPRISVLHPEGHRITPEWLWEKYGLRPEQWVDFRALAGDPSDNIPGVKGIGEKTALKLLKEWGSLENLLKNLDQVKPESVREKILAHLEDLKLSRELSRVRTDLPLEVDFQRRREPDWEGLKAFLERLEFGSLLHEFGLLESPLPAEEAPWPPPEGAFLGYRLSRPEPMWAELLALAASAQGRVYRAEDPHGALRGLFEVRGLLAKDLAVVALREGLDLPPTDDPMLLAYLLDPSNTTPEGVARRYGGEWTEDAAKRALLAERLHANLLGRLQGEERLLWLYEEVEKPLSRVLAHMEATGVKLDVAYLENLSLEVAAHMRRLEEEVFRLAGRSFRLNSRDQLERVLFDELGLPPIGKTEKTGKRSTSAAVLEALREVHPIVDKILQYRELAKLKGTYIDRLPALVHPKTGRLHTRFNQTATATGRLSSSDPNLQNIPVRTPLGQKIRRAFVAEEGWRLVALDYSQIELRVLAHLSGDENLIRVFEEGKDIHTQTASWMFGLSAEAIDPLMRRAAKTINFGVLYGMSAFRLSQELGIPYEEAQAFIQKYFQSYPKVKAWIEKTLEEGRHRGYVETLFGRRRYVPDLNARVKGKREAAERMAFNMPVQGTAADLMKLAMVRLFPQLREVGARMLLQVHDELLLEAPKERAEEVAALAKEVMEGVWPLAVPLEVEVGIGEDWLAAKG

SEQ ID NO: 3945 - DNA, 2523 bp, synthetic construct
  misc_feature 1..2523: note = Variant of DNA polymerase I from Thermus sp. strain 2.9
  source 1..2523: mol_type = other DNA
atgcaccatcatcatcatcatggcggtagcggcgtgttaccggtgttcgagcctaaaggtcgcgtgcttctggttgatggccatcatctcgcgtatcgtaacttctttgccctgaaaggattaaccaccagcagcggcgagccggtacagggtgtctacggctttgcaaagtcgctcctgaaagctctgaaagaagacggtgatgtggtgattgttgtctttgatgcgaaagcgccaagttttcgccacgaagcgtacgaagcttacaaagccgggcgtgctccaacgccggaagactttcctcgccaattggcgcttatgaaggaattagtggatttgcttggcctcgaacgcttggaagttcccggtttcgaggcagacgacgtattagcgactctcgcaaagaaagccgaacgtgagggctatgaagtccagatcttgacagcagatcgcgatcttttccagcttttatctccgcgcatctcggtgttacacccggaagggcatcgtatcaccccggaatggctctgggagaaatatggtttgcgtcccgaacaatgggtggattttcgcgccttagcaggcgatccgagcgacaatattccgggagttaaaggtatcggcgagaagacggcgctcaagctccttaaagaatgggggtcgttggagaacttgcttaagaatttagatcaggtcaaaccagagtcagtgcgtgagaagattcttgctcacctcgaagacctcaaattaagccgcgaattgtcccgtgtacgcaccgatttgccgctcgaagttgatttccaacgccgccgcgaacctgactgggagggtcttaaagcgtttttagagcgtcttgaatttggttcgctcttgcatgaattcggccttttagaaagcccgttaccagccgaagaagcaccttggccaccgcccgagggcgcgtttttaggttaccgtttgagtcgcccggaaccgatgtgggccgaattactggctcttgcagcgtctgcccagggacgtgtgtatcgcgcggaagaccctcatggtgcgctccgcggcctcttcgaagtccgtggactccttgccaaagacttagctgttgttgcattgcgcgaaggtcttgatttacctccgactgatgatccaatgcttcttgcgtacctcttggacccgtcaaacacgacgcccgaaggcgtagcccgtcgttaccggggcgagtggaccgaagatgcagcgaaacgcgcgttattggccgaacgtttgcacgccaatttattaggacgtttgcaaggcgaggaacgtctcctctggctttacgaagaagtggagaaaccattgagtcgcgtgctcgcgcatatggaagctaccggtgtcaaattagacgtggcgtatttggagaatctcagccttgaagttgctgcccacatgcgccgcttggaggaagaagtattccgtttagcaggccgttcctttcgccttaattctcgcgatcagttagaacgtgtgttgttcgatgaacttggtctccctcctatcggcaagacagagaagaccggtaaacgtagcacttcagcggcggttttagaagctcttcgcgaagtccatcccattgtggacaagatcttgcaataccgcgaactcgcgaaattgaaaggcacctatattgaccgtcttccggcattagtccacccgaaaacgggacgcctccatacccgcttcaaccaaacagccacggcgaccggtcgtttgtcctcctctgatccaaaccttcagaatattccagtacgtaccccattgggccagaagatccgccgtgcgtttgtagctgaggagggttggcgtttagtggccctcgattatagccaaattgaattacgtgtccttgcccatctttctggcgatgagaacctcatccgcgtgtttcaggaaggcaaagacattcacactcaaacggcaagctggatgtttggattatcagctgaagcgatcgatcctttgatgcgtcgtgcagcgaagaccatcaatttcggtgttctctacggtatgagtgcctttcgtttgtcgcaggaattaggcattccctatgaagaagctcaggcgttcattcagaaatactttcaaagctatcccaaagttaaagcatggatcgagaagactctcgaagaaggccgcacacgtggttacgtagagaccttatttggacgtcgccgctatgttcccgatttaaacgctcgcgtgaaaggcaagcgtgaagccgccgaacgcatggcgttcaacatgcctgtacagggcacggcagctgacctcatgaaacttgcaatggtgcgcctttttccacaattgcgtgaagttggtgcccgcatgctcttgcaggtccacgatgaactcttgttagaagcgccaaaagagcgtgcggaagaggtggcagccctcgcgaaagaagttatggaaggcgtgtggcccttagcggtgcctcttgaagtcgaagttggtattggcgaggattggctggctgccaaagga

SEQ ID NO: 3946 - protein, 841 aa, synthetic construct
  REGION 1..841: note = Variant of DNA polymerase I from Thermus sp. strain 2.9
MHHHHHHGGSGVLPVFEPKGRVLLVDGHHLAYRNFFALKGLTTSSGEPVQGVYGFAKSLLKALKEDGDVVIVVFDAKAPSFRHEAYEAYKAGRAPTPEDFPRQLALMKELVDLLGLERLEVPGFEADDVLATLAKKAEREGYEVQILTADRDLFQLLSPRISVLHPEGHRITPEWLWEKYGLRPEQWVDFRALAGDPSDNIPGVKGIGEKTALKLLKEWGSLENLLKNLDQVKPESVREKILAHLEDLKLSRELSRVRTDLPLEVDFQRRREPDWEGLKAFLERLEFGSLLHEFGLLESPLPAEEAPWPPPEGAFLGYRLSRPEPMWAELLALAASAQGRVYRAEDPHGALRGLFEVRGLLAKDLAVVALREGLDLPPTDDPMLLAYLLDPSNTTPEGVARRYRGEWTEDAAKRALLAERLHANLLGRLQGEERLLWLYEEVEKPLSRVLAHMEATGVKLDVAYLENLSLEVAAHMRRLEEEVFRLAGRSFRLNSRDQLERVLFDELGLPPIGKTEKTGKRSTSAAVLEALREVHPIVDKILQYRELAKLKGTYIDRLPALVHPKTGRLHTRFNQTATATGRLSSSDPNLQNIPVRTPLGQKIRRAFVAEEGWRLVALDYSQIELRVLAHLSGDENLIRVFQEGKDIHTQTASWMFGLSAEAIDPLMRRAAKTINFGVLYGMSAFRLSQELGIPYEEAQAFIQKYFQSYPKVKAWIEKTLEEGRTRGYVETLFGRRRYVPDLNARVKGKREAAERMAFNMPVQGTAADLMKLAMVRLFPQLREVGARMLLQVHDELLLEAPKERAEEVAALAKEVMEGVWPLAVPLEVEVGIGEDWLAAKG

SEQ ID NO: 3947 - DNA, 2523 bp, synthetic construct
  misc_feature 1..2523: note = Variant of DNA polymerase I from Thermus sp. strain 2.9
  source 1..2523: mol_type = other DNA
atgcaccatcatcatcatcatggcggtagcggcgtgttaccggtgttcgagcataaaggtcgcgtgcttctggttgatggccatcatctcgcgtatcgtaacttctttgccctgaaaggattaaccaccagcagcggcgagccggtacagggtgtctacggctttgcaaagtcgctcctgaaagctctgaaagaagacggtgatgtggtgattgttgtctttgatgcgaaagcgccaagttttcgccacgaagcgtacgaagcttacaaagccgggcgtgctccaacgccggaagactttcctcgccaattggcgcttatgaaggaattagtggatttgcttggcctcgaacgcttggaagttcccggtttcgaggcagacgacgtattagcgactctcgcaaagaaagccgaacgtgagggctatgaagtccagatcttgacagcagatcgcgatcttttccagcttttatctccgcgcatctcggtgttacacccggaagggcatcgtatcaccccggaatggctctgggagaaatatggtttgcgtcccgaacaatgggtggattttcgcgccttagcaggcgatccgagcgacaatattccgggagttaaaggtatcggcgagaagacggcgctcaagctccttaaagaatgggggtcgttggagaacttgcttaagaatttagatcaggtcaaaccagagtcagtgcgtgagaagattcttgctcacctcgaagacctcaaattaagccgcgaattgtcccgtgtacgcaccgatttgccgctcgaagttgatttccaacgccgccgcgaacctgactgggagggtcttaaagcgtttttagagcgtcttgaatttggttcgctcttgcatgaattcggccttttagaaagcccgttaccagccgaagaagcaccttggccaccgcccgagggcgcgtttttaggttaccgtttgagtcgcccggaaccgatgtgggccgaattactggctcttgcagcgtctgcccagggacgtgtgtatcgcgcggaagaccctcatggtgcgctccgcggcctcttcgaagtccgtggactccttgccaaagacttagctgttgttgcattgcgcgaaggtcttgatttacctccgactgatgatccaatgcttcttgcgtacctcttggacccgtcaaacacgacgcccgaaggcgtagcccgtcgttacggcggcgagtggaccgaagatgcagcgaaacgcgcgttattggccgaacgtttgcacgccaatttattaggacgtttgcaaggcgaggaacgtctcctctggctttacgaagaagtggagaaaccattgagtcgcgtgctcgcgcatatggaagctaccggtgtcaaattagacgtggcgtatttggagaatctcagccttgaagttgctgcccacatgcgccgcttggaggaagaagtattccgtttagcaggccgttcctttcgccttaattctcgcgatcagttagaacgtgtgttgttcgatgaacttggtctccctcctatcggcaagacagagaagaccggtaaacgtagcacttcagcggcggttttagaagctcttcgcgaagtccatcccattgtggacaagatcttgcaataccgcgaactcgcgaaattgaaaggcacctatattgaccgtcttccggcattagtccacccgaaaacgggacgcctccatacccgcttcaaccaaacagccacggcgaccggtcgtttgtcctcctctgatccaaaccttcagaatattccagtacgtaccccattgggccagaagatccgccgtgcgtttgtagctgaggagggttggcgtttagtggccctcgattatagccaaattgaattacgtgtccttgcccatctttctggcgatgagaacctcatccgcgtgtttcaggaaggcaaagacattcacactcaaacggcaagctggatgtttggattatcagctgaagcgatcgatcctttgatgcgtcgtgcagcgaagaccatcaatttcggtgttctctacggtatgagtgcctttcgtttgtcgcaggaattaggcattccctatgaagaagctcaggcgttcattcagaaatactttcaaagctatcccaaagttaaagcatggatcgagaagactctcgaagaaggccgcacacgtggttacgtagagaccttatttggacgtcgccgctatgttcccgatttaaacgctcgcgtgaaaggcaagcgtgaagccgccgaacgcatggcgttcaacatgcctgtacagggcacggcagctgacctcatgaaacttgcaatggtgcgcctttttccacaattgcgtgaagttggtgcccgcatgctcttgcaggtccacgatgaactcttgttagaagcgccaaaagagcgtgcggaagaggtggcagccctcgcgaaagaagttatggaaggcgtgtggcccttagcggtgcctcttgaagtcgaagttggtattggcgaggattggctggctgccaaagga

SEQ ID NO: 3948 - protein, 841 aa, synthetic construct; identical to SEQ ID NO: 3822
  REGION 1..841: note = Variant of DNA polymerase I from Thermus sp. strain 2.9

SEQ ID NO: 3949 - DNA, 2523 bp, synthetic construct
  misc_feature 1..2523: note = Variant of DNA polymerase I from Thermus sp. strain 2.9
  source 1..2523: mol_type = other DNA
atgcaccatcatcatcatcatggcggtagcggcgtgttaccggtgttcgagcataaaggtcgcgtgcttctggttgatggccatcatctcgcgtatcgtaacttctttgccctgaaaggattaaccaccagcagcggcgagccggtacagggtgtctacggctttgcaaagtcgctcctgaaagctctgaaagaagacggtgatgtggtgattgttgtctttgatgcgaaagcgccaagttttcgccacgaagcgtacgaagcttacaaagccgggcgtgctccaacgccggaagactttcctcgccaattggcgcttatgaaggaattagtggatttgcttggcctcgaacgcttggaagttcccggtttcgaggcagacgacgtattagcgactctcgcaaagaaagccgaacgtgagggctatgaagtccagatcttgacagcagatcgcgatcttttccagcttttatctccgcgcatctcggtgttacacccggaagggcatcgtatcaccccggaatggctctgggagaaatatggtttgcgtcccgaacaatgggtggattttcgcgccttagcaggcgatccgagcgacaatattccgggagttaaaggtatcggcgagaagacggcgctcaagctccttaaagaatgggggtcgttggagaacttgcttaagaatttagatcaggtcaaaccagagtcagtgcgtgagaagattcttgctcacctcgaagacctcaaattaagccgcgaattgtcccgtgtacgcaccgatttgccgctcgaagttgatttccaacgccgccgcgaacctgactgggagggtcttaaagcgtttttagagcgtcttgaatttggttcgctcctgcatgaattcggccttttagaaagcccgttaccagccgaagaagcaccttggccaccgcccgagggcgcgtttttaggttaccgtttgagtcgcccggaaccgatgtgggccgaattactggctcttgcagcgtctgcccagggacgtgtgtatcgcgcggaagaccctcatggtgcgctccgcggcctcttcgaagtccgtggactccttgccaaagacttagctgttgttgcattgcgcgaaggtcttgatttacctccgactgatgatccaatgcttcttgcgtacctcttggacccgtcaaacacgacgcccgaaggcgtagcccgtcgttacggcggcgagtggaccgaagatgcagcgaaacgcgcgttattggccgaacgtttgcacgccaatttattaggacgtttgcaaggcgaggaacgtctcctctggctttacgaagaagtggagaaaccattgagtcgcgtgctcgcgcatatggaagctaccggtgtcaaattagacgtggcgtatttggagaatctcagccttgaagttgctgcccacatgcgccgcttggaggaagaagtattccgtttagcaggccgttcctttcgccttaattctcgcgatcagttagaacgtgtgttgttcgatgaacttggtctccctcctatcggcaagacagagaagaccggtaaacgtagcacttcagcggcggttttagaagctcttcgcgaagtccatcccattgtggacaagatcttgcaataccgcgaactcgcgaaattgaaaggcacctatattgaccgtcttccggcattagtccacccgaaaacgggacgcctccatacccgcttcaaccaaacagccacggcgaccggtcgtttgtcctcctctgatccaaaccttcagaatattccagtacgtaccccattgggccagaagatccgccgtgcgtttgtagctgaggagggttggcgtttagtggccctcgattatagccaaattgaattacgtgtccttgcccatctttctggcgatgagaacctcatccgcgtgtttcaggaaggcaaagacattcacactcaaacggcaagctggatgtttggattatcagctgaagcgatcgatcctttgatgcgtcgtgcagcgaagaccatcaatttcggtgttctctacggtatgagtccgtttcgtttgtcgcaggaattaggcattccctatgaagaagctcaggcgttcattcagaaatactttcaaagctatcccaaagttaaagcatggatcgagaagactctcgaagaaggccgcacacgtggttacgtagagaccttatttggacgtcgccgctatgttcccgatttaaacgctcgcgtgaaaggcaagcgtgaagccgccgaacgcatggcgttcaacatgcctgtacagggcacggcagctgacctcatgaaacttgcaatggtgcgcctttttccacaattgcgtgaagttggtgcccgcatgctcttgcaggtccacgatgaactcttgttagaagcgccaaaagagcgtgcggaagaggtggcagccctcgcgaaagaagttatggaaggcgtgtggcccttagcggtgcctcttgaagtcgaagttggtattggcgaggattggctggctgccaaagga

SEQ ID NO: 3950 - protein, 841 aa, synthetic construct; identical to SEQ ID NO: 3600
  REGION 1..841: note = Variant of DNA polymerase I from Thermus sp. strain 2.9

SEQ ID NO: 3951 - DNA, 2523 bp, synthetic construct
  misc_feature 1..2523: note = Variant of DNA polymerase I from Thermus sp. strain 2.9
  source 1..2523: mol_type = other DNA
atgcaccatcatcatcatcatggcggtagcggcgtgttaccggtgttcgagcctaaaggtcgcgtgcttctggttgatggccatcatctcgcgtatcgtaacttctttgccctgaaaggattaaccaccagcagcggcgagccggtacagggtgtctacggctttgcaaagtcgctcctgaaagctctgaaagaagacggtgatgtggtgattgttgtctttgatgcgaaagcgccaagttttcgccacgaagcgtacgaagcttacaaagccgggcgtgctccaacgccggaagactttcctcgccaattggcgcttatgaaggaattagtggatttgcttggcctcgaacgcttggaagttcccggtttcgaggcagacgacgtattagcgactctcgcaaagaaagccgaacgtgagggctatgaagtccagatcttgacagcagatcgcgatcttttccagcttttatctccgcgcatctcggtgttacacccggaagggcatcgtatcaccccggaatggctctgggagaaatatggtttgcgtcccgaacaatgggtggattttcgcgccttagcaggcgatccgagcgacaatattccgggagttaaaggtatcggcgagaagacggcgctcaagctccttaaagaatgggggtcgttggagaacttgcttaagaatttagatcaggtcaaaccagagtcagtgcgtgagaagattcttgctcacctcgaagacctcaaattaagccgcgaattgtcccgtgtacgcaccgatttgccgctcgaagttgatttccaacgccgccgcgaacctgactgggagggtcttaaagcgtttttagagcgtcttgaatttggttcgctcttgcatgaattcggccttttagaaagcccgttaccagccgaagaagcaccttggccaccgcccgagggcgcgtttttaggttaccgtttgagtcgcccggaaccgatgtgggccgaattactggctcttgcagcgtctgcccagggacgtgtgtatcgcgcggaagaccctcatggtgcgctccgcggcctcttcgaagtccgtggactccttgccaaagacttagctgttgttgcattgcgcgaaggtcttgatttacctccgactgatgatccaatgcttcttgcgtacctcttggacccgtcaaacacgacgcccgaaggcgtagcccgtcgttacggcggcgagtggaccgaagatgcagcgaaacgcgcgttattggccgaacgtttgcacgccaatttattaggacgtttgcaaggcgaggaacgtctcctctggctttacgaagaagtggagaaaccattgagtcgcgtgctcgcgcatatggaagctaccggtgtcaaattagacgtggcgtatttggagaatctcagccttgaagttgctgcccacatgcgccgcttggaggaagaagtattccgtttagcaggccgttcctttcgccttaattctcgcgatcagttagaacgtgtgttgttcgatgaacttggtctccctcctatcggcaagacagagaagaccggtaaacgtagcacttcagcggcggttttagaagctcttcgcgaagtccatcccattgtggacaagatcttgcaataccgcgaactcgcgaaattgaaaggcacctatattgaccgtcttccggcattagtccacccgaaaacgggacgcctccatacccgcttcaaccaaacagccacggcgaccggtcgtttgtcctcctctgatccaaaccttcagaatattccagtacgtaccccattgggccagaagatccgccgtgcgtttgtagctgaggagggttggcgtttagtggccctcgattatagccaaattgaattacgtgtccttgcccatctttctggcgatgagaacctcatccgcgtgtttcaggaaggcaaagacattcacactcaaacggcaagctggatgtttggattatcagctgaagcgatcgatcctttgatgcgtcgtgcagcgaagaccatcaatttcggtgttctctacggtatgagtgcctttcgtttgtcgcaggaattaggcattccctatgaagaagctcaggcgttcattcagaaatactttcaaagctatcccaaagttaaagcatggatcgagaagactctcgaagaaggccgcacacgtggttacgtagagaccttatttggacgtcgccgctatgttcccgatttaaacgctcgcgtgaaaggcaagcgtgaagccgccgaacgcatggcgttcaacatgcctgtacagggcacggcagctgacctcatgaaacttgcaatggtgcgcctttttccacaattgcgtgaagttggtgcccgcatgctcttgcaggtccacgatgaactcttgttagaagcgccaaaagagcgtgcggaagaggtggcagccctcgcgaaagaagttatggaaagtgtgtggcccttagcggtgcctcttgaagtcgaagttggtattggcgaggattggctggctgccaaagga

SEQ ID NO: 3952 - protein, 841 aa, synthetic construct; identical to SEQ ID NO: 3636
  REGION 1..841: note = Variant of DNA polymerase I from Thermus sp. strain 2.9

SEQ ID NO: 3953 - DNA, 2523 bp, synthetic construct
  misc_feature 1..2523: note = Variant of DNA polymerase I from Thermus sp. strain 2.9
  source 1..2523: mol_type = other DNA
atgcaccatcatcatcatcatggcggtagcggcgtgttaccggtgttcgagcctaaaggtcgcgtgcttctggttgatggccatcatctcgcgtatcgtaacttctttgccctgaaaggattaaccaccagcagcggcgagccggtacagggtgtctacggctttgcaaagtcgctcctgaaagctctgaaagaagacggtgatgtggtgattgttgtctttgatgcgaaagcgccaagttttcgccacgaagcgtacgaagcttacaaagccgggcgtgctccaacgccggaagactttcctcgccaattggcgcttatgaaggaattagtggatttgcttggcctcgaacgcttggaagttcccggtttcgaggcagacgacgtattagcgactctcgcaaagaaagccgaacgtgagggctatgaagtccagatcttgacagcagatcgcgatcttttccagcttttatctccgcgcatctcggtgttacacccggaagggcatcgtatcaccccggaatggctctgggagaaatatggtttgcgtcccgaacaatgggtggattttcgcgccttagcaggcgatccgagcgacaatattccgggagttaaaggtatcggcgagaagacggcgctcaagctccttaaagaatgggggtcgttggagaacttgcttaagaatttagatcaggtcaaaccagagtcagtgcgtgagaagattcttgctcacctcgaagacctcaaattaagccgcgaattgtcccgtgtacgcaccgatttgccgctcgaagttgatttccaacgccgccgcgaacctgactgggagggtcttaaagcgtttttagagcgtcttgaatttggttcgctcttgcatgaattcggccttttagaaagcccgttaccagccgaagaagcaccttggccaccgcccgagggcgcgtttttaggttaccgtttgagtcgcccggaaccgatgtgggccgaattactggctcttgcagcgtctgcccagggacgtgtgtatcgcgcggaagaccctcatggtgcgctccgcggcctcttcgaagtccgtggactccttgccaaagacttagctgttgttgcattgcgcgaaggtcttgatttacctccgactgatgatccaatgcttcttgcgtacctcttggacccgtcaaacacgacgcccgaaggcgtagcccgtcgttacggcggcgagtggaccgaagatgcagcgaaacgcgcgttattggccgaacgtttgcacgccaatttattaggacgtttgcaaggcgaggaacgtctcctctggctttacgaagaagtggagaaaccattgagtcgcgtgctcgcgcatatggaagctaccggtgtcaaattagacgtggcgtatttggagaatctcagccttgaagttgctgcccacatgcgccgcttggaggaagaagtattccgtttagcaggccgttcctttcgccttaattctcgcgatcagttagaacgtgtgttgttcgatgaacttggtctccctcctatcggcaagacagagaagaccggtaaacgtagcacttcagcggcggttttagaagctcttcgcgaagtccatcccattgtggacaagatcttgcaataccgcgaactcgcgaaattgaaaggcacctatattgaccgtcttccggcattagtccacccgaaaacgggacgcctccatacccgcttcaaccaaacagccacggcgaccggtcgtttgtcctcctctgatccaaaccttcagaatattccagtacgtaccccattgggccagaagatccgccgtgcgtttgtagctgaggagggttggcgtttagtggccctcgattatagccaaattgaattacgtgtccttgcccatctttctggcgatgagaacctcatccgcgtgtttcaggaaggcaaagacattcacactcaaacggcaagctggatgtttggattatcagctgaagcgatcgatcctttgatgcgtcgtgcagcgaagaccatcaatttcggtgttctctacggtatgagtgcctttcgtttgtcgcaggaattaggcattccctatgaagaagctcaggcgttcattcagaaatactttcaaagctatcccaaagttaaagcatggatcgagaagactctcgaagaaggccgcacacgtggttacgtagagaccttatttggacgtcgccgctatgttcccgatttaaactggcgcgtgaaaggcaagcgtgaagccgccgaacgcatggcgttcaacatgcctgtacagggcacggcagctgacctcatgaaacttgcaatggtgcgcctttttccacaattgcgtgaagttggtgcccgcatgctcttgcaggtccacgatgaactcttgttagaagcgccaaaagagcgtgcggaagaggtggcagccctcgcgaaagaagttatggaaggcgtgtggcccttagcggtgcctcttgaagtcgaagttggtattggcgaggattggctggctgccaaagga

SEQ ID NO: 3954 - protein, 841 aa, synthetic construct
  REGION 1..841: note = Variant of DNA polymerase I from Thermus sp. strain 2.9
MHHHHHHGGSGVLPVFEPKGRVLLVDGHHLAYRNFFALKGLTTSSGEPVQGVYGFAKSLLKALKEDGDVVIVVFDAKAPSFRHEAYEAYKAGRAPTPEDFPRQLALMKELVDLLGLERLEVPGFEADDVLATLAKKAEREGYEVQILTADRDLFQLLSPRISVLHPEGHRITPEWLWEKYGLRPEQWVDFRALAGDPSDNIPGVKGIGEKTALKLLKEWGSLENLLKNLDQVKPESVREKILAHLEDLKLSRELSRVRTDLPLEVDFQRRREPDWEGLKAFLERLEFGSLLHEFGLLESPLPAEEAPWPPPEGAFLGYRLSRPEPMWAELLALAASAQGRVYRAEDPHGALRGLFEVRGLLAKDLAVVALREGLDLPPTDDPMLLAYLLDPSNTTPEGVARRYGGEWTEDAAKRALLAERLHANLLGRLQGEERLLWLYEEVEKPLSRVLAHMEATGVKLDVAYLENLSLEVAAHMRRLEEEVFRLAGRSFRLNSRDQLERVLFDELGLPPIGKTEKTGKRSTSAAVLEALREVHPIVDKILQYRELAKLKGTYIDRLPALVHPKTGRLHTRFNQTATATGRLSSSDPNLQNIPVRTPLGQKIRRAFVAEEGWRLVALDYSQIELRVLAHLSGDENLIRVFQEGKDIHTQTASWMFGLSAEAIDPLMRRAAKTINFGVLYGMSAFRLSQELGIPYEEAQAFIQKYFQSYPKVKAWIEKTLEEGRTRGYVETLFGRRRYVPDLNWRVKGKREAAERMAFNMPVQGTAADLMKLAMVRLFPQLREVGARMLLQVHDELLLEAPKERAEEVAALAKEVMEGVWPLAVPLEVEVGIGEDWLAAKG

SEQ ID NO: 3955 - DNA, 2523 bp, synthetic construct
  misc_feature 1..2523: note = Variant of DNA polymerase I from Thermus sp. strain 2.9
  source 1..2523: mol_type = other DNA
atgcaccatcatcatcatcatggcggtagcggcgtgttaccggtgttcgagcctaaaggtcgcgtgcttctggttgatggccatcatctcgcgtatcgtaacttctttgccctgaaaggattaaccaccagcagcggcgagccggtacagggtgtctacggctttgcaaagtcgctcctgaaagctctgaaagaagacggtgatgtggtgattgttgtctttgatgcgaaagcgccaagttttcgccacgaagcgtacgaagcttacaaagccgggcgtgctccaacgccggaagactttcctcgccaattggcgcttatgaaggaattagtggatttgcttggcctcgaacgcttggaagttcccggtttcgaggcagacgacgtattagcgactctcgcaaagaaagccgaacgtgagggctatgaagtccagatcttgacagcagatcgcgatcttttccagcttttatctccgcgcatctcggtgttacacccggaagggcatcgtatcaccccggaatggctctgggagaaatatggtttgcgtcccgaacaatgggtggattttcgcgccttagcaggcgatccgagcgacaatattccgggagttaaaggtatcggcgagaagacggcgctcaagctccttaaagaatgggggtcgttggagaacttgcttaagaatttagatcaggtcaaaccagagtcagtgcgtgagaagattcttgctcacctcgaagacctcaaattaagccgcgaattgtcccgtgtacgcaccgatttgccgctcgaagttgatttccaacgccgccgcgaacctgactgggagggtcttaaagcgtttttagagcgtcttgaatttggttcgctcttgcatgaattcggccttttagaaagcccgttaccagccgaagaagcaccttggccaccgcccgagggcgcgtttttaggttaccgtttgagtcgcccggaaccgatgtgggccgaattactggctcttgcagcgtctgcccagggacgtgtgtatcgcgcggaagaccctcatggtgcgctccgcggcctcttcggggtccgtggactccttgccaaagacttagctgttgttgcattgcgcgaaggtcttgatttacctccgactgatgatccaatgcttcttgcgtacctcttggacccgtcaaacacgacgcccgaaggcgtagcccgtcgttacggcggcgagtggaccgaagatgcagcgaaacgcgcgttattggccgaacgtttgcacgccaatttattaggacgtttgcaaggcgaggaacgtctcctctggctttacgaagaagtggagaaaccattgagtcgcgtgctcgcgcatatggaagctaccggtgtcaaattagacgtggcgtatttggagaatctcagccttgaagttgctgcccacatgcgccgcttggaggaagaagtattccgtttagcaggccgttcctttcgccttaattctcgcgatcagttagaacgtgtgttgttcgatgaacttggtctccctcctatcggcaagacagagaagaccggtaaacgtagcacttcagcggcggttttagaagctcttcgcgaagtccatcccattgtggacaagatcttgcaataccgcgaactcgcgaaattgaaaggcacctatattgaccgtcttccggcattagtccacccgaaaacgggacgcctccatacccgcttcaaccaaacagccacggcgaccggtcgtttgtcctcctctgatccaaaccttcagaatattccagtacgtaccccattgggccagaagatccgccgtgcgtttgtagctgaggagggttggcgtttagtggccctcgattatagccaaattgaattacgtgtccttgcccatctttctggcgatgagaacctcatccgcgtgtttcaggaaggcaaagacattcacactcaaacggcaagctggatgtttggattatcagctgaagcgatcgatcctttgatgcgtcgtgcagcgaagaccatcaatttcggtgttctctacggtatgagtgcctttcgtttgtcgcaggaattaggcattccctatgaagaagctcaggcgttcattcagaaatactttcaaagctatcccaaagttaaagcatggatcgagaagactctcgaagaaggccgcacacgtggttacgtagagaccttatttggacgtcgccgctatgttcccgatttaaacgctcgcgtgaaaggcaagcgtgaagccgccgaacgcatggcgttcaacatgcctgtacagggcacggcagctgacctcatgaaacttgcaatggtgcgcctttttccacaattgcgtgaagttggtgcccgcatgctcttgcaggtccacgatgaactcttgttagaagcgccaaaagagcgtgcggaagaggtggcagccctcgcgaaagaagttatggaaggcgtgtggcccttagcggtgcctcttgaagtcgaagttggtattggcgaggattggctggctgccaaagga

SEQ ID NO: 3956 - protein, 841 aa, synthetic construct
  REGION 1..841: note = Variant of DNA polymerase I from Thermus sp. strain 2.9
MHHHHHHGGSGVLPVFEPKGRVLLVDGHHLAYRNFFALKGLTTSSGEPVQGVYGFAKSLLKALKEDGDVVIVVFDAKAPSFRHEAYEAYKAGRAPTPEDFPRQLALMKELVDLLGLERLEVPGFEADDVLATLAKKAEREGYEVQILTADRDLFQLLSPRISVLHPEGHRITPEWLWEKYGLRPEQWVDFRALAGDPSDNIPGVKGIGEKTALKLLKEWGSLENLLKNLDQVKPESVREKILAHLEDLKLSRELSRVRTDLPLEVDFQRRREPDWEGLKAFLERLEFGSLLHEFGLLESPLPAEEAPWPPPEGAFLGYRLSRPEPMWAELLALAASAQGRVYRAEDPHGALRGLFGVRGLLAKDLAVVALREGLDLPPTDDPMLLAYLLDPSNTTPEGVARRYGGEWTEDAAKRALLAERLHANLLGRLQGEERLLWLYEEVEKPLSRVLAHMEATGVKLDVAYLENLSLEVAAHMRRLEEEVFRLAGRSFRLNSRDQLERVLFDELGLPPIGKTEKTGKRSTSAAVLEALREVHPIVDKILQYRELAKLKGTYIDRLPALVHPKTGRLHTRFNQTATATGRLSSSDPNLQNIPVRTPLGQKIRRAFVAEEGWRLVALDYSQIELRVLAHLSGDENLIRVFQEGKDIHTQTASWMFGLSAEAIDPLMRRAAKTINFGVLYGMSAFRLSQELGIPYEEAQAFIQKYFQSYPKVKAWIEKTLEEGRTRGYVETLFGRRRYVPDLNARVKGKREAAERMAFNMPVQGTAADLMKLAMVRLFPQLREVGARMLLQVHDELLLEAPKERAEEVAALAKEVMEGVWPLAVPLEVEVGIGEDWLAAKG

SEQ ID NO: 3957 - DNA, 2523 bp, synthetic construct
  misc_feature 1..2523: note = Variant of DNA polymerase I from Thermus sp. strain 2.9
  source 1..2523: mol_type = other DNA
atgcaccatcatcatcatcatggcggtagcggcgtgttaccggtgttcgagcctaaaggtcgcgtgcttctggttgatggccatcatctcgcgtatcgtaacttctttgccctgaaaggattaaccaccagcagcggcgagccggtacagggtgtctacggctttgcaaagtcgctcctgaaagctctgaaagaagacggtgatgtggtgattgttgtctttgatgcgaaagcgccaagttttcgccacgaagcgtacgaagcttacaaagccgggcgtgctccaacgccggaagactttcctcgccaattggcgcttatgaaggaattagtggatttgcttggcctcgaacgcttggaagttcccggtttcgaggcagacgacgtattagcgactctcgcaaagaaagccgaacgtgagggctatgaagtccagatcttgacagcagatcgcgatcttttccagcttttatctccgcgcatctcggtgttacacccggaagggcatcgtatcaccccggaatggctctgggagaaatatggtttgcgtcccgaacaatgggtggattttcgcgccttagcaggcgatccgagcgacaatattccgggagttaaaggtatcggcgagaagacggcgctcaagctccttaaagaatgggggtcgttggagaacttgcttaagaatttagatcaggtcaaaccagagtcagtgcgtgagaagattcttgctcacctcgaagacctcaaattaagccgcgaattgtcccgtgtacgcaccgatttgccgctcgaagttgatttccaacgccgccgcgaacctgactgggagggtcttaaagcgtttttagagcgtcttgaatttggttcgctcttgcatgaattcggccttttagaaagcccgttaccagccgaagaagcaccttggccaccgcccgagggcgcgtttttaggttaccgtttgagtcgcccggaaccgatgtgggccgaattactggctcttgcagcgtctgcccagggacgtgtgtatcgcgcggaagaccctcatggtgcgctccgcggcctcttcgaagtccgtggactccttgccaaagacttagctgttgttgcattgcgcgaaggtcttgatttacctccgactgatgatccaatgcttcttgcgtacctcttggacccgtcaaacacgacgcccgaaggcgtagcccgtcgttacggcggcgagtggaccgaagatgcagcgaaacgcgcgttattggccgaacgtttgcacgccaatttattaggacgtttgcaaggcgaggaacgtctcctctggctttacgaagaagtggagaaaccattgagtcgcgtgctcgcgcatatggaagctaccggtgtcaaattagacgtggcgtatttggagaatctcagccttgaagttgctgcccacatgcgccgcttggaggaagaagtattccgtttagcaggccgttcctttcgccttaattctcgcgatcagttagaacgtgtgttgttcgatgaacttggtctccctcctatcggcaagacagagaagaccggtaaacgtagcacttcagcggcggttttagaagctcttcgcgaagtccatcccattgtggacaagatcttgcaataccgcgaactcgcgaaattgaaaggcacctatattgaccgtcttccggcattagtccacccgaaaacgggacgcctccatacccgcttcaaccaaacagccacggcgaccggtcgtttgtcctcctctgatccaaaccttcagaatattccagtacgtaccccattgggccagaagatccgccgtgcgtttgtagctgaggagggttggcgtttagtggccctcgattatagccaaattgaattacgtgtccttgcccatctttctggcgatgagaacctcatccgcgtgtttcaggaaggcaaagacattcacactcaaacggcaagctggatgtttggattagcggctgaagcgatcgatcctttgatgcgtcgtgcagcgaagaccatcaatttcggtgttctctacggtatgagtgcctttcgtttgtcgcaggaattaggcattccctatgaagaagctcaggcgttcattcagaaatactttcaaagctatcccaaagttaaagcatggatcgagaagactctcgaagaaggccgcacacgtggttacgtagagaccttatttggacgtcgccgctatgttcccgatttaaacgctcgcgtgaaaggcaagcgtgaagccgccgaacgcatggcgttcaacatgcctgtacagggcacggcagctgacctcatgaaacttgcaatggtgcgcctttttccacaattgcgtgaagttggtgcccgcatgctcttgcaggtccacgatgaactcttgttagaagcgccaaaagagcgtgcggaagaggtggcagccctcgcgaaagaagttatggaaggcgtgtggcccttagcggtgcctcttgaagtcgaagttggtattggcgaggattggctggctgccaaagga

SEQ ID NO: 3958 - protein, 841 aa, synthetic construct
  REGION 1..841: note = Variant of DNA polymerase I from Thermus sp. strain 2.9
MHHHHHHGGSGVLPVFEPKGRVLLVDGHHLAYRNFFALKGLTTSSGEPVQGVYGFAKSLLKALKEDGDVVIVVFDAKAPSFRHEAYEAYKAGRAPTPEDFPRQLALMKELVDLLGLERLEVPGFEADDVLATLAKKAEREGYEVQILTADRDLFQLLSPRISVLHPEGHRITPEWLWEKYGLRPEQWVDFRALAGDPSDNIPGVKGIGEKTALKLLKEWGSLENLLKNLDQVKPESVREKILAHLEDLKLSRELSRVRTDLPLEVDFQRRREPDWEGLKAFLERLEFGSLLHEFGLLESPLPAEEAPWPPPEGAFLGYRLSRPEPMWAELLALAASAQGRVYRAEDPHGALRGLFEVRGLLAKDLAVVALREGLDLPPTDDPMLLAYLLDPSNTTPEGVARRYGGEWTEDAAKRALLAERLHANLLGRLQGEERLLWLYEEVEKPLSRVLAHMEATGVKLDVAYLENLSLEVAAHMRRLEEEVFRLAGRSFRLNSRDQLERVLFDELGLPPIGKTEKTGKRSTSAAVLEALREVHPIVDKILQYRELAKLKGTYIDRLPALVHPKTGRLHTRFNQTATATGRLSSSDPNLQNIPVRTPLGQKIRRAFVAEEGWRLVALDYSQIELRVLAHLSGDENLIRVFQEGKDIHTQTASWMFGLAAEAIDPLMRRAAKTINFGVLYGMSAFRLSQELGIPYEEAQAFIQKYFQSYPKVKAWIEKTLEEGRTRGYVETLFGRRRYVPDLNARVKGKREAAERMAFNMPVQGTAADLMKLAMVRLFPQLREVGARMLLQVHDELLLEAPKERAEEVAALAKEVMEGVWPLAVPLEVEVGIGEDWLAAKG

SEQ ID NO: 3959 - DNA, 2523 bp, synthetic construct
  misc_feature 1..2523: note = Variant of DNA polymerase I from Thermus sp. strain 2.9
  source 1..2523: mol_type = other DNA
atgcaccatcatcatcatcatggcggtagcggcgtgttaccggtgttcgagcctaaaggtcgcgtgcttctggttgatggccatcatctcgcgtatcgtaacttctttgccctgaaaggattaaccaccagcagcggcgagccggtacagggtgtctacggctttgcaaagtcgctcctgaaagctctgaaagaagacggtgatgtggtgattgttgtctttgatgcgaaagcgccaagttttcgccacgaagcgtacgaagcttacaaagccgggcgtgctccaacgccggaagactttcctcgccaattggcgcttatgaaggaattagtggatttgcttggcctcgaacgcttggaagttcccggtttcgaggcagacgacgtattagcgactctcgcaaagaaagccgaacgtgagggctatgaagtccagatcttgacagcagatcgcgatcttttccagcttttatctccgcgcatctcggtgttacacccggaagggcatcgtatcaccccggaatggctccaggagaaatatggtttgcgtcccgaacaatgggtggattttcgcgccttagcaggcgatccgagcgacaatattccgggagttaaaggtatcggcgagaagacggcgctcaagctccttaaagaatgggggtcgttggagaacttgcttaagaatttagatcaggtcaaaccagagtcagtgcgtgagaagattcttgctcacctcgaagacctcaaattaagccgcgaattgtcccgtgtacgcaccgatttgccgctcgaagttgatttccaacgccgccgcgaacctgactgggagggtcttaaagcgtttttagagcgtcttgaatttggttcgctcttgcatgaattcggccttttagaaagcccgttaccagccgaagaagcaccttggccaccgcccgagggcgcgtttttaggttaccgtttgagtcgcccggaaccgatgtgggccgaattactggctcttgcagcgtctgcccagggacgtgtgtatcgcgcggaagaccctcatggtgcgctccgcggcctcttcgaagtccgtggactccttgccaaagacttagctgttgttgcattgcgcgaaggtcttgatttacctccgactgatgatccaatgcttcttgcgtacctcttggacccgtcaaacacgacgcccgaaggcgtagcccgtcgttacggcggcgagtggaccgaagatgcagcgaaacgcgcgttattggccgaacgtttgcacgccaatttattaggacgtttgcaaggcgaggaacgtctcctctggctttacgaagaagtggagaaaccattgagtcgcgtgctcgcgcatatggaagctaccggtgtcaaattagacgtggcgtatttggagaatctcagccttgaagttgctgcccacatgcgccgcttggaggaagaagtattccgtttagcaggccgttcctttcgccttaattctcgcgatcagttagaacgtgtgttgttcgatgaacttggtctccctcctatcggcaagacagagaagaccggtaaacgtagcacttcagcggcggttttagaagctcttcgcgaagtccatcccattgtggacaagatcttgcaataccgcgaactcgcgaaattgaaaggcacctatattgaccgtcttccggcattagtccacccgaaaacgggacgcctccatacccgcttcaaccaaacagccacggcgaccggtcgtttgtcctcctctgatccaaaccttcagaatattccagtacgtaccccattgggccagaagatccgccgtgcgtttgtagctgaggagggttggcgtttagtggccctcgattatagccaaattgaattacgtgtccttgcccatctttctggcgatgagaacctcatccgcgtgtttcaggaaggcaaagacattcacactcaaacggcaagctggatgtttggattatcagctgaagcgatcgatcctttgatgcgtcgtgcagcgaagaccatcaatttcggtgttctctacggtatgagtgcctttcgtttgtcgcaggaattaggcattccctatgaagaagctcaggcgttcattcagaaatactttcaaagctatcccaaagttaaagcatggatcgagaagactctcgaagaaggccgcacacgtggttacgtagagaccttatttggacgtcgccgctatgttcccgatttaaacgctcgcgtgaaaggcaagcgtgaagccgccgaacgcatggcgttcaacatgcctgtacagggcacggcagctgacctcatgaaacttgcaatggtgcgcctttttccacaattgcgtgaagttggtgcccgcatgctcttgcaggtccacgatgaactcttgttagaagcgccaaaagagcgtgcggaagaggtggcagccctcgcgaaagaagttatggaaggcgtgtggcccttagcggtgcctcttgaagtcgaagttggtattggcgaggattggctggctgccaaagga

SEQ ID NO: 3960 - protein, 841 aa, synthetic construct
  REGION 1..841: note = Variant of DNA polymerase I from Thermus sp. strain 2.9
MHHHHHHGGSGVLPVFEPKGRVLLVDGHHLAYRNFFALKGLTTSSGEPVQGVYGFAKSLLKALKEDGDVVIVVFDAKAPSFRHEAYEAYKAGRAPTPEDFPRQLALMKELVDLLGLERLEVPGFEADDVLATLAKKAEREGYEVQILTADRDLFQLLSPRISVLHPEGHRITPEWLQEKYGLRPEQWVDFRALAGDPSDNIPGVKGIGEKTALKLLKEWGSLENLLKNLDQVKPESVREKILAHLEDLKLSRELSRVRTDLPLEVDFQRRREPDWEGLKAFLERLEFGSLLHEFGLLESPLPAEEAPWPPPEGAFLGYRLSRPEPMWAELLALAASAQGRVYRAEDPHGALRGLFEVRGLLAKDLAVVALREGLDLPPTDDPMLLAYLLDPSNTTPEGVARRYGGEWTEDAAKRALLAERLHANLLGRLQGEERLLWLYEEVEKPLSRVLAHMEATGVKLDVAYLENLSLEVAAHMRRLEEEVFRLAGRSFRLNSRDQLERVLFDELGLPPIGKTEKTGKRSTSAAVLEALREVHPIVDKILQYRELAKLKGTYIDRLPALVHPKTGRLHTRFNQTATATGRLSSSDPNLQNIPVRTPLGQKIRRAFVAEEGWRLVALDYSQIELRVLAHLSGDENLIRVFQEGKDIHTQTASWMFGLSAEAIDPLMRRAAKTINFGVLYGMSAFRLSQELGIPYEEAQAFIQKYFQSYPKVKAWIEKTLEEGRTRGYVETLFGRRRYVPDLNARVKGKREAAERMAFNMPVQGTAADLMKLAMVRLFPQLREVGARMLLQVHDELLLEAPKERAEEVAALAKEVMEGVWPLAVPLEVEVGIGEDWLAAKG

SEQ ID NO: 3961 - DNA, 2523 bp, synthetic construct; identical to SEQ ID NO: 3955
  misc_feature 1..2523: note = Variant of DNA polymerase I from Thermus sp. strain 2.9
  source 1..2523: mol_type = other DNA

SEQ ID NO: 3962 - protein, 841 aa, synthetic construct; identical to SEQ ID NO: 3956
  REGION 1..841: note = Variant of DNA polymerase I from Thermus sp. strain 2.9

SEQ ID NO: 3963 - DNA, 2523 bp, synthetic construct
  misc_feature 1..2523: note = Variant of DNA polymerase I from Thermus sp. strain 2.9
  source 1..2523: mol_type = other DNA
atgcaccatcatcataatcatggcggtagcggcgtgttaccggtgttcgagcctaaaggtcgcgtgcttctggttgatggccatcatctcgcgtatcgtaacttctttgccctgaaaggattaaccaccagcagcggcgagccggtacagggtgtctacggctttgcaaagtcgctcctgaaagctctgaaagaagacggtgatgtggtgattgttgtctttgatgcgaaagcgccaagttttcgccacgaagcgtacgaagcttacaaagccgggcgtgctccaacgccggaagactttcctcgccaattggcgcttatgaaggaattagtggatttgcttggcctcgaacgcttggaagttcccggtttcgaggcagacgacgtattagcgactctcgcaaagaaagccgaacgtgagggctatgaagtccagatcttgacagcagatcgcgatcttttccagcttttatctccgcgcatctcggtgttacacccggaagggcatcgtatcaccccggaatggctctgggagaaatatggtttgcgtcccgaacaatgggtggattttcgcgccttagcaggcgatccgagcgacaatattccgggagttaaaggtatcggcgagaagacggcgctcaagctccttaaagaatgggggtcgttggagaacttgcttaagaatttagatcaggtcaaaccagagtcagtgcgtgagaagattcttgctcacctcgaagacctcaaattaagccgcgaattgtcccgtgtacgcaccgatttgccgctcgaagttgatttccaacgccgccgcgaacctgactgggagggtcttaaagcgtttttagagcgtcttgaatttggttcgctcttgcatgaattcggccttttagaaagcccgttaccagccgaagaagcaccttggccaccgcccgagggcgcgtttttaggttaccgtttgagtcgcccggaaccgatgtgggccgaattactggctcttgcagcgtctgcccagggacgtgtgtatcgcgcggaagaccctcatggtgcgctccgcggcctcttcgaagtccgtggactccttgccaaagacttagctgttgttgcattgcgcgaaggtcttgatttacctccgactgatgatccaatgcttcttgcgtacctcttggacccgtcaaacacgacgcccgaaggcgtagcccgtcgttacggcggcgagtggaccgaagatgcagcgaaacgcgcgttattggccgaacgtttgcacgccaatttattaggacgtttgcaaggcgaggaacgtctcctctggctttacgaagaagtggagaaaccattgagtcgcgtgctcgcgcatatggaagctaccggtgtcaaattagacgtggcgtatttggagaatctcagccttgaagttgctgcccacatgcgccgcttggaggaagaagtattccgtttagcaggccgttcctttcgccttaattctcgcgatcagttagaacgtgtgttgttcgatgaacttggtctccctcctatcggcaagacagagaagaccggtaaacgtagcacttcagcggcggttttagaagctcttcgcgaagtccatcccattgtggacaagatcttgcaataccgcgaactcgcgaaattgaaaggcacctatattgaccgtcttccggcattagtccacccgaaaacgggacgcctccatacccgcttcaaccaaacagccacggcgaccggtcgtttgtcctcctctgatccaaaccttcagaatattccagtacgtaccccattgggccagaagatccgccgtgcgtttgtagctgaggagggttggcgtttagtggccctcgattatagccaaattgaattacgtgtccttgcccatctttctggcgatgagaacctcatccgcgtgtttcaggaaggcaaagacattcacactcaaacggcaagctggatgtttggattatcagctgaagcgatcgatcctttgatgcgtcgtgcagcgaagaccatcaatttcggtgttctctacggtatgagtgcctttcgtttgtcgcaggaattaggcattccctatgaagaagctcaggcgttcattcagaaatactttcaaagctatcccaaagttaaagcatggatcgagaagactctcgaagaaggccgcacacgtggttacgtagagaccttatttggacgtcgccgctatgttcccgatttaaacgctcgcgtgaaaggcaagcgtgaagccgccgaacgcatggcgttcaacatgcctgtacagggcacggcagctgacctcatgaaacttgcaatggtgcgcctttttccacaattgcgtgaagttggtgcccgcatgctcttgcaggtccacgatgaactcttgttagaagcgccaaaagagcgtgcggaagaggtggcagccctcgcgaaagaagttatggaaggcgtgtggcccttagcggtgcctcttgaagtcgaagttggtattggcgaggattggctggctgccaaagga

SEQ ID NO: 3964 - protein, 841 aa, synthetic construct
  REGION 1..841: note = Variant of DNA polymerase I from Thermus sp. strain 2.9
MHHHHNHGGSGVLPVFEPKGRVLLVDGHHLAYRNFFALKGLTTSSGEPVQGVYGFAKSLLKALKEDGDVVIVVFDAKAPSFRHEAYEAYKAGRAPTPEDFPRQLALMKELVDLLGLERLEVPGFEADDVLATLAKKAEREGYEVQILTADRDLFQLLSPRISVLHPEGHRITPEWLWEKYGLRPEQWVDFRALAGDPSDNIPGVKGIGEKTALKLLKEWGSLENLLKNLDQVKPESVREKILAHLEDLKLSRELSRVRTDLPLEVDFQRRREPDWEGLKAFLERLEFGSLLHEFGLLESPLPAEEAPWPPPEGAFLGYRLSRPEPMWAELLALAASAQGRVYRAEDPHGALRGLFEVRGLLAKDLAVVALREGLDLPPTDDPMLLAYLLDPSNTTPEGVARRYGGEWTEDAAKRALLAERLHANLLGRLQGEERLLWLYEEVEKPLSRVLAHMEATGVKLDVAYLENLSLEVAAHMRRLEEEVFRLAGRSFRLNSRDQLERVLFDELGLPPIGKTEKTGKRSTSAAVLEALREVHPIVDKILQYRELAKLKGTYIDRLPALVHPKTGRLHTRFNQTATATGRLSSSDPNLQNIPVRTPLGQKIRRAFVAEEGWRLVALDYSQIELRVLAHLSGDENLIRVFQEGKDIHTQTASWMFGLSAEAIDPLMRRAAKTINFGVLYGMSAFRLSQELGIPYEEAQAFIQKYFQSYPKVKAWIEKTLEEGRTRGYVETLFGRRRYVPDLNARVKGKREAAERMAFNMPVQGTAADLMKLAMVRLFPQLREVGARMLLQVHDELLLEAPKERAEEVAALAKEVMEGVWPLAVPLEVEVGIGEDWLAAKG

SEQ ID NO: 3965 - DNA, 2523 bp, synthetic construct
  misc_feature 1..2523: note = Variant of DNA polymerase I from Thermus sp. strain 2.9
  source 1..2523: mol_type = other DNA
atgcaccatcatcatcatcatggcggtagcggcgtgttagaggtgttcgagcctaaaggtcgcgtgcttctggttgatggccatcatctcgcgtatcgtaacttctttgccctgaaaggattaaccaccagcagcggcgagccggtacagggtgtctacggctttgcaaagtcgctcctgaaagctctgaaagaagacggtgatgtggtgattgttgtctttgatgcgaaagcgccaagttttcgccacgaagcgtacgaagcttacaaagccgggcgtgctccaacgccggaagactttcctcgccaattggcgcttatgaaggaattagtggatttgcttggcctcgaacgcttggaagttcccggtttcgaggcagacgacgtattagcgactctcgcaaagaaagccgaacgtgagggctatgaagtccagatcttgacagcagatcgcgatcttttccagcttttatctccgcgcatctcggtgttacacccggaagggcatcgtatcaccccggaatggctctgggagaaatatggtttgcgtcccgaacaatgggtggattttcgcgccttagcaggcgatccgagcgacaatattccgggagttaaaggtatcggcgagaagacggcgctcaagctccttaaagaatgggggtcgttggagaacttgcttaagaatttagatcaggtcaaaccagagtcagtgcgtgagaagattcttgctcacctcgaagacctcgagttaagccgcgaattgtcccgtgtacgcaccgatttgccgctcgaagttgatttccaacgccgccgcgaacctgactgggagggtcttaaagcgtttttagagcgtcttgaatttggttcgctcttgcatgaattcggccttttagaaagcccgttaccagccgaagaagcaccttggccaccgcccgagggcgcgtttttaggttaccgtttgagtcgcccggaaccgatgtgggccgaattactggctcttgcagcgtctgcccagggacgtgtgtatcgcgcggaagaccctcatggtgcgctccgcggcctcttcgaagtccgtggactccttgccaaagacttagctgttgttgcattgcgcgaaggtcttgatttacctccgactgatgatccaatgcttcttgcgtacctcttggacccgtcaaacacgacgcccgaaggcgtagcccgtcgttacggcggcgagtggaccgaagatgcagcgaaacgcgcgttattggccgaacgtttgcacgccaatttattaggacgtttgcaaggcgaggaacgtctcctctggctttacgaagaagtggagaaaccattgagtcgcgtgctcgcgcatatggaagctaccggtgtcaaattagacgtggcgtatttggagaatctcagccttgaagttgctgcccacatgcgccgcttggaggaagaagtattccgtttagcaggccgttcctttcgccttaattctcgcgatcagttagaacgtgtgttgttcgatgaacttggtctccctcctatcggcaagacagagaagaccggtaaacgtagcacttcagcggcggttttagaagctcttcgcgaagtccatcccattgtggacaagatcttgcaataccgcgaactcgcgaaattgaaaggcacctatattgaccgtcttccggcattagtccacccgaaaacgggacgcctccatacccgcttcaaccaaacagccacggcgaccggtcgtttgtcctcctctgatccaaaccttcagaatattccagtacgtaccaaattgggccagaagatccgccgtgcgtttgtagctgaggagggttggcgtttagtggccctcgattatagccaaattgaattacgtgtccttgcccatctttctggcgatgagaacctcatccgcgtgtttcaggaaggcaaagacattcacactcaaacggcaagctggatgtttggattatcagctgaagcgatcgatcctttgatgcgtcgtgcagcgaagaccatcaatttcggtgttctctacggtatgagtgcctttcgtttgtcgcaggaattaggcattccctatgaagaagctcaggcgttcattcagaaatactttcaaagctatcccaaagttaaagcatggatcgagaagactctcgaagaaggccgcacccgtggttacgtagagaccttatttggacgtcgccgctatgttcccgatttaaacgctcgcgtgaaaggcaagcgtgaagccgccgaacgcatggcgttcaacatgcctgtacagggcacggcagctgacctcatgaaacttgcaatggtgcgcctttttccacaattgcgtgaagttggtgcccgcatgctcttgcaggtccacgatgaactcttgttagaagcgccaaaagagcgtgcggaagaggtggcagccctcgcgaaagaagttatggaaggcgtgtggcccttagcggtgcctcttgaagtcgaagttggtattggcgaggattggctggctgccaaagga

SEQ ID NO: 3966 - protein, 841 aa, synthetic construct
  REGION 1..841: note = Variant of DNA polymerase I from Thermus sp. strain 2.9
MHHHHHHGGSGVLEVFEPKGRVLLVDGHHLAYRNFFALKGLTTSSGEPVQGVYGFAKSLLKALKEDGDVVIVVFDAKAPSFRHEAYEAYKAGRAPTPEDFPRQLALMKELVDLLGLERLEVPGFEADDVLATLAKKAEREGYEVQILTADRDLFQLLSPRISVLHPEGHRITPEWLWEKYGLRPEQWVDFRALAGDPSDNIPGVKGIGEKTALKLLKEWGSLENLLKNLDQVKPESVREKILAHLEDLELSRELSRVRTDLPLEVDFQRRREPDWEGLKAFLERLEFGSLLHEFGLLESPLPAEEAPWPPPEGAFLGYRLSRPEPMWAELLALAASAQGRVYRAEDPHGALRGLFEVRGLLAKDLAVVALREGLDLPPTDDPMLLAYLLDPSNTTPEGVARRYGGEWTEDAAKRALLAERLHANLLGRLQGEERLLWLYEEVEKPLSRVLAHMEATGVKLDVAYLENLSLEVAAHMRRLEEEVFRLAGRSFRLNSRDQLERVLFDELGLPPIGKTEKTGKRSTSAAVLEALREVHPIVDKILQYRELAKLKGTYIDRLPALVHPKTGRLHTRFNQTATATGRLSSSDPNLQNIPVRTKLGQKIRRAFVAEEGWRLVALDYSQIELRVLAHLSGDENLIRVFQEGKDIHTQTASWMFGLSAEAIDPLMRRAAKTINFGVLYGMSAFRLSQELGIPYEEAQAFIQKYFQSYPKVKAWIEKTLEEGRTRGYVETLFGRRRYVPDLNARVKGKREAAERMAFNMPVQGTAADLMKLAMVRLFPQLREVGARMLLQVHDELLLEAPKERAEEVAALAKEVMEGVWPLAVPLEVEVGIGEDWLAAKG

SEQ ID NO: 3967 - DNA, 2523 bp, synthetic construct
  misc_feature 1..2523: note = Variant of DNA polymerase I from Thermus sp. strain 2.9
  source 1..2523: mol_type = other DNA
atgcaccatcatcatcatcatggcggtagcggcgtgttaccggtgttcgagcctaaaggtcgcgtgcttctggttgatggccatcatctcgcgtatcgtaacttctttgccctgaaaggattaaccaccagcagcggcgagccggtacagggtgtctacggctttgcaaagtcgctcctgaaagctctgaaagaagacggtgatgtggtgattgttgtctttgatgcgaaagcgccaagttttcgccacgaagcgtacgaagcttacaaagccgggcgtgctccaacgccggaagactttcctcgccaattggcgcttatgaaggaattagtggatttgcttggcctcgaacgcttggaagttcccggtttcgaggcagacgacgtattagcgactctcgcaaagaaagccgaacgtgagggctatgaagtccagatcttgacagcagatcgcgatcttttccagcttttatctccgcgcatctcggtgttacacccggaagggcatcgtatcaccccggaatggctctgggagaaatatggtttgcgtcccgaacaatgggtggattttcgcgccttagcaggcgatccgagcgacaatattccgggattgaaaggtatcggcgagaagacggcgctcaagctccttaaagaatgggggtcgttggagaacttgcttaagaatttagatcaggtcaaaccagagtcagtgcgtgagaagattcttgctcacctcgaagacctcaaattaagccgcgaattgtcccgtgtacgcaccgatttgccgctcgaagttgatttccaacgccgccgcgaacctgactgggagggtcttaaagcgtttttagagcgtcttgaatttggttcgctcttgcatgaattcggccttttagaaagcccgttaccagccgaagaagcaccttggccaccgcccgagggcgcgtttttaggttaccgtttgagtcgcccggaaccgatgtgggccgaattactggctcttgcagcgtctgcccagggacgtgtgtatcgcgcggaagaccctcatggtgcgctccgcggcctcttcgaagtccgtggactccttgccaaagacttagctgttgttgcattgcgcgaaggtcttgatttacctccgactgatgatccaatgcttcttgcgtacctcttggacccgtcaaacacgacgcccgaaggcgtagcccgtcgttacggcggcgagtggaccgaagatgcagcgaaacgcgcgttattggccgaacgtttgcacgccaatttattaggacgtttgcaaggcgaggaacgtctcctctggctttacgaagaagtggagaaaccattgagtcgcgtgctcgcgcatatggaagctaccggtgtcaaattagacgtggcgtatttggagaatctcagccttgaagttgctgcccacatgcgccgcttggaggaagaagtattccgtttagcaggccgttcctttcgccttaattctcgcgatcagttagaacgtgtgttgttcgatgaacttggtctccctcctatcggcaagacagagaagaccggtaaacgtagcacttcagcggcggttttagaagctcttcgcgaagtccatcccattgtggacaagatcttgcaataccgcgaactcgcgaaattgaaaggcacctatattgaccgtcttccggcattagtccacccgaaaacgggacgcctccatacccgcttcaaccaaacagccacggcgaccggtcgtttgtcctcctctgatccaaaccttcagaatattccagtacgtaccccattgggccagaagatccgccgtgcgtttgtagctgaggagggttggcgtttagtggccctcgattatagccaaattgaattacgtgtccttgcccatctttctggcgatgagaacctcatccgcgtgtttcaggaaggcaaagacattcacactcaaacggcaagctggatgtttggattatcagctgaagcgatcgatcctttgatgcgtcgtgcagcgaagaccatcaatttcggtgttctctacggtatgagtgcctttcgtttgtcgcaggaattaggcattccctatgaagaagctcaggcgttcattcagaaatactttcaaagctatcccaaagttaaagcatggatcgagaagactctcgaagaaggccgcacacgtggttacgtagagaccttatttggacgtcgccgctatgttcccgatttaaacgctcgcgtgaaaggcaagcgtgaagccgccgaacgcatggcgttcaacatgcctgtacagggcacggcagctgacctcatgaaacttgcaatggtgcgcctttttccacaattgcgtgaagttggtgcccgcatgctcttgcaggtccacgatgaactcttgttagaagcgccaaaagagcgtgcggaagaggtggcagccctcgcgaaagaagttatggaaggcgtgtggcccttagcggtgcctcttgaagtcgaagttggtattggcgaggattggctggctgccaaagga

SEQ ID NO: 3968 - protein, 841 aa, synthetic construct
  REGION 1..841: note = Variant of DNA polymerase I from Thermus sp. strain 2.9
MHHHHHHGGSGVLPVFEPKGRVLLVDGHHLAYRNFFALKGLTTSSGEPVQGVYGFAKSLLKALKEDGDVVIVVFDAKAPSFRHEAYEAYKAGRAPTPEDFPRQLALMKELVDLLGLERLEVPGFEADDVLATLAKKAEREGYEVQILTADRDLFQLLSPRISVLHPEGHRITPEWLWEKYGLRPEQWVDFRALAGDPSDNIPGLKGIGEKTALKLLKEWGSLENLLKNLDQVKPESVREKILAHLEDLKLSRELSRVRTDLPLEVDFQRRREPDWEGLKAFLERLEFGSLLHEFGLLESPLPAEEAPWPPPEGAFLGYRLSRPEPMWAELLALAASAQGRVYRAEDPHGALRGLFEVRGLLAKDLAVVALREGLDLPPTDDPMLLAYLLDPSNTTPEGVARRYGGEWTEDAAKRALLAERLHANLLGRLQGEERLLWLYEEVEKPLSRVLAHMEATGVKLDVAYLENLSLEVAAHMRRLEEEVFRLAGRSFRLNSRDQLERVLFDELGLPPIGKTEKTGKRSTSAAVLEALREVHPIVDKILQYRELAKLKGTYIDRLPALVHPKTGRLHTRFNQTATATGRLSSSDPNLQNIPVRTPLGQKIRRAFVAEEGWRLVALDYSQIELRVLAHLSGDENLIRVFQEGKDIHTQTASWMFGLSAEAIDPLMRRAAKTINFGVLYGMSAFRLSQELGIPYEEAQAFIQKYFQSYPKVKAWIEKTLEEGRTRGYVETLFGRRRYVPDLNARVKGKREAAERMAFNMPVQGTAADLMKLAMVRLFPQLREVGARMLLQVHDELLLEAPKERAEEVAALAKEVMEGVWPLAVPLEVEVGIGEDWLAAKG

SEQ ID NO: 3969 - DNA, 2523 bp, synthetic construct
  misc_feature 1..2523: note = Variant of DNA polymerase I from Thermus sp. strain 2.9
  source 1..2523: mol_type = other DNA
atgcaccatcatcatcatcatggcggtagcggcgtgttacctgtgttcgagcctaaaggtcgcgtgcttctggttgatggccatcatctcgcgtatcgtaacttctttgccctgaaaggattaaccaccagcagcggcgagccggtacatggtgtctacggctttgcaaagtcgctcctgaaagctctgaaagaagacggtgatgtggtgattgttgtctttgatgcgaaagcgccaagttttcgccacgaagcgtacgaagcttacaaagccgggcgtgctccaacgccggaagactttcctcgccaattggcgcttatgaaggaattagtggatttgcttggcctcgaacgcttggaagttcccggtttcgaggcagacgacgtattagcgactctcgcaaagaaagccgaacgtgagggctatgaagtccagatcttgacagcagatcgcgatcttttccagcttttatctccgcgcatctcggtgttacacccggaagggcatcgtatcaccccggaatggctctgggagaaatatggtttgcgtcccgaacaatgggtggattttcgcgccttagcaggcgatccgagcgacaatattccgggagttaaaggtatcggcgagaagacggcgctcaagctccttaaagaatgggggtcgttggagaacttgcttaagaatttagatcaggtcaaaccagagtcagtgcgtgagaagattcttgctcacctcgaagacctcaaattaagccgcgaattgtcccgtgtacgcaccgatttgccgctcgaagttgatttccaacgccgccgcgaacctgactgggagggtcttaaagcgtttttagagcgtcttgaatttggttcgctcttgcatgaattcggccttttagaaagcccgttaccagccgaagaagcaccttggccaccgcccgagggcgcgtttttaggttaccgtttgagtcgcccggaaccgatgtgggccgaattactggctcttgcagcgtctgcccagggacgtgtgtatcgcgcggaagaccctcatggtgcgctccgcggcctcttcgaagtccgtggactccttgccaaagacttagctgttgttgcattgcgcgaaggtcttgatttacctccgactgatgatccaatgcttcttgcgtacctcttggacccgtcaaacacgacgcccgaaggcgtagcccgtcgttacggcggcgagtggaccgaagatgcagcgaaacgcgcgttattggccgaacgtttgcacgccaatttattaggacgtttgcaaggcgagaagcgtctcctctggctttacgaagaagtggagaaaccattgagtcgcgtgctcgcgcatatggaagctaccggtgtcaaattagacgtggcgtatttggagaatctcagccttgaagttgctgcccacatgcgccgcttggaggaagaagtattccgtttagcaggccgttcctttcgccttaattctcgcgatcagttagaacgtgtgttgttcgatgaacttggtctccctcctatcggcaagacagagaagaccggtaaacgtagcacttcagcggcggttttagaagctcttcgcgaagtccatcccattgtggacaagatcttgcaataccgcgaactcgcgaaattgaaaggcacctatattgaccgtcttccggcattagtccacccgaaaacgggacgcctccatacccgcttcaaccaaacagccacggcgaccggtcgtttgtcctcctctgatccaaaccttcagaatattccagtacgtaccaaattgggccagaagatccgccgtgcgtttgtagctgaggagggttggcgtttagtggccctcgattatagccaaattgaattacgtgtccttgcccatctttctggcgatgagaacctcatccgcgtgtttcaggaaggcaaagacattcacactcaaacggcaagctggatgtttggattatcagctgaagcgatcgatcctttgatgcgtcgtgcagcgaagaccatcaatttcggtgttctctacggtatgagtgcctttcgtttgtcgcaggaattaggcattccctatgaagaagctcaggcgttcattcagaaatactttcaaagctatcccaaagttaaagcatggatcgagaagactctcgaagaaggccgcacccgtggttacgtagagaccttatttggacgtcgccgctatgttcccgatttaaacgctcgcgtgaaaggcaagcgtgaagccgccgaacgcatggcgttcaacatgcctgtacagggcacggcagctgacctcatgaaacttgcaatggtgcgcctttttccacaattgcgtgaagttggtgcccgcatgctcttgcaggtccacgatgaactcttgttagaagcgccaaaagagcgtgcggaagaggtggcagccctcgcgaaagaagttatggaaggcgtgtggcccttagcggtgcctcttgaagtcgaagttggtattggcgaggattggctggctgccaaagga

SEQ ID NO: 3970 - protein, 841 aa, synthetic construct
  REGION 1..841: note = Variant of DNA polymerase I from Thermus sp. strain 2.9
MHHHHHHGGSGVLPVFEPKGRVLLVDGHHLAYRNFFALKGLTTSSGEPVHGVYGFAKSLLKALKEDGDVVIVVFDAKAPSFRHEAYEAYKAGRAPTPEDFPRQLALMKELVDLLGLERLEVPGFEADDVLATLAKKAEREGYEVQILTADRDLFQLLSPRISVLHPEGHRITPEWLWEKYGLRPEQWVDFRALAGDPSDNIPGVKGIGEKTALKLLKEWGSLENLLKNLDQVKPESVREKILAHLEDLKLSRELSRVRTDLPLEVDFQRRREPDWEGLKAFLERLEFGSLLHEFGLLESPLPAEEAPWPPPEGAFLGYRLSRPEPMWAELLALAASAQGRVYRAEDPHGALRGLFEVRGLLAKDLAVVALREGLDLPPTDDPMLLAYLLDPSNTTPEGVARRYGGEWTEDAAKRALLAERLHANLLGRLQGEKRLLWLYEEVEKPLSRVLAHMEATGVKLDVAYLENLSLEVAAHMRRLEEEVFRLAGRSFRLNSRDQLERVLFDELGLPPIGKTEKTGKRSTSAAVLEALREVHPIVDKILQYRELAKLKGTYIDRLPALVHPKTGRLHTRFNQTATATGRLSSSDPNLQNIPVRTKLGQKIRRAFVAEEGWRLVALDYSQIELRVLAHLSGDENLIRVFQEGKDIHTQTASWMFGLSAEAIDPLMRRAAKTINFGVLYGMSAFRLSQELGIPYEEAQAFIQKYFQSYPKVKAWIEKTLEEGRTRGYVETLFGRRRYVPDLNARVKGKREAAERMAFNMPVQGTAADLMKLAMVRLFPQLREVGARMLLQVHDELLLEAPKERAEEVAALAKEVMEGVWPLAVPLEVEVGIGEDWLAAKG

SEQ ID NO: 3971 - DNA, 2523 bp, synthetic construct
  misc_feature 1..2523: note = Variant of DNA polymerase I from Thermus sp. strain 2.9
  source 1..2523: mol_type = other DNA
atgcaccatcatcatcatcatggcggtagcggcgtgttaccggtgttcgagcctaaaggtcgcgtgcttctggttgatggccatcatctcgcgtatcgtaacttctttgccctgaaaggattaaccaccagcagcggcgagccggtacagggtgtctacggctttgcaaagtcgctcctgaaagctctgaaagaagacggtgatgtggtgattgttgtctttgatgcgaaagcgccaagttttcgccacgaagcgtacgaagcttacaaagccgggcgtgctccaacgccggaagactttcctcgccaattgctgcttatgaaggaattagtggatttgcttggcctcgaacgcttggaagttcccggtttcgaggcagacgacgtattagcgactctcgcaaagaaagccgaacgtgagggctatgaagtccagatcttgacagcagatcgcgatcttttccagcttttatctccgcgcatctcggtgttacacccggaagggcatcgtatcaccccggaatggctctgggagaaatatggtttgcgtcccgaacaatgggtggattttcgcgccttagcaggcgatccgagcgacaatattccgggagttaaaggtatcggcgagaagacggcgctcaagctccttaaagaatgggggtcgttggagaacttgcttaagaatttagatcaggtcaaaccagagtcagtgcgtgagaagattcttgctcacctcgaagacctcaaattaagccgcgaattgtcccgtgtacgcaccgatttgccgctcgaagttgatttccaacgccgccgcgaacctgactgggagggtcttaaagcgtttttagagcgtcttgaatttggttcgctcttgcatgaattcggccttttagaaagcccgttaccagccgaagaagcaccttggccaccgcccgagggcgcgtttttaggttaccgtttgagtcgcccggaaccgatgtgggccgaattactggctcttgcagcgtctgcccagggacgtgtgtatcgcgcggaagaccctcatggtgcgctccgcggcctcttcgaagtccgtggactccttgccaaagacttagctgttgttgcattgcgcgaaggtcttgatttacctccgactgatgatccaatgcttcttgcgtacctcttggacccgtcaaacacgacgcccgaaggcgtagcccgtcgttacggcggcgagtggaccgaagatgcagcgaaacgcgcgttattggccgaacgtttgcacgccaatttattaggacgtttgcaaggcgaggaacgtctcctctggctttacgaagaagtggagaaaccattgagtcgcgtgctcgcgcatatggaagctaccggtgtcaaattagacgtggcgtatttggagaatctcagccttgaagttgctgcccacatgcgccgcttggaggaagaagtattccgtttagcaggccgttcctttcgccttaattctcgcgatcagttagaacgtgtgttgttcgatgaacttggtctccctcctatcggcaagacagagaagaccggtaaacgtagcacttcagcggcggttttagaagctcttcgcgaagtccatcccattgtggacaagatcttgcaataccgcgaactcgcgaaattgaaaggcacctatattgaccgtcttccggcattagtccacccgaaaacgggacgcctccatacccgcttcaaccaaacagccacggcgaccggtcgtttgtcctcctctgatccaaaccttcagaatattccagtacgtaccccattgggccagaagatccgccgtgcgtttgtagctgaggagggttggcgtttagtggccctcgattatagccaaattgaattacgtgtccttgcccatctttctggcgatgagaacctcatccgcgtgtttcaggaaggcaaagacattcacactcaaacggcaagctggatgtttggattatcagctgaagcgatcgatcctttgatgcgtcgtgcagcgaagaccatcaatttcggtgttctctacggtatgagtgcctttcgtttgtcgcaggaattaggcattccctatgaagaagctcaggcgttcattcagaaatactttcaaagctatcccaaagttaaagcatggatcgagaagactctcgaagaaggccgcacacgtggttacgtagagaccttatttggacgtcgccgctatgttcccgatttaaacgctcgcgtgaaaggcaagcgtgaagccgccgaacgcatggcgttcaacatgcctgtacagggcacggcagctgacctcatgaaacttgcaatggtgcgcctttttccacaattgcgtgaagttggtgcccgcatgctcttgcaggtccacgatgaactcttgttagaagcgccaaaagagcgtgcggaagaggtggcagccctcgcgaaagaagttatggaaggcgtgtggcccttagcggtgcctcttgaagtcgaagttggtattggcgaggattggctggctgccaaagga

SEQ ID NO: 3972 - protein, 841 aa, synthetic construct; identical to SEQ ID NO: 3714
  REGION 1..841: note = Variant of DNA polymerase I from Thermus sp. strain 2.9

SEQ ID NO: 3973 - DNA, 2523 bp, synthetic construct
  misc_feature 1..2523: note = Variant of DNA polymerase I from Thermus sp. strain 2.9
  source 1..2523: mol_type = other DNA
atgcaccatcatcatcatcatggcggtagcggcgtgttacctgtgttcgagcctaaaggtcgcgtgcttctggttgatggccatcatctcgcgtatcgtaacttctttgccctgaaaggattaaccaccagcagcggcgagccggtacatggtgtctacggctttgcaaagtcgctcctgaaagctctgaaagaagacggtgatgtggtgattgttgtctttgatgcgaaagcgccaagttttcgccacgaagcgtacgaagcttacaaagccgggcgtgctcctacgccggaagactttcctcgccaattggcgcttatgaaggaattagtggatttgcttggcctcgaacgcttggaagttcccggtttcgaggcagacgacgtattagcgactctcgcaaagaaagccgaacgtgagggctatgaagtccagatcttgacagcagatcgcgatcttttccagcttttatctccgcgcatctcggtgttacacccggaagggcatcgtatcaccccggaatggctctgggagaaatatggtttgcgtcccgaacaatgggtggattttcgcgccttagcaggcgatccgagcgacaatattccgggagttaaaggtatcggcgagaagacggcgctcaagctccttaaagaatgggggtcgttggagaacttgcttaagaatttagatcaggtcaaaccagagtcagtgcgtgagaagattcttgctcacctcgaagacctcaaattaagccgcgaattgtcccgtgtacgcaccgatttgccgctcgaagttgatttccaacgccgccgcgaacctgactgggagggtcttaaagcgtttttagagcgtcttgaatttggttcgctcttgcatgaattcggccttttagaaagcccgttaccagccgaagaagcaccttggccaccgcccgagggcgcgtttttaggttaccgtttgagtcgcccggaaccgatgtgggccgaattactggctcttgcagcgtctgcccagggacgtgtgtatcgcgcggaagaccctcatggtgcgctccgcggcctcttcgaagtccgtggactccttgccaaagacttagctgttgttgcattgcgcgaaggtcttgatttacctccgactgatgatccaatgcttcttgcgtacctcttggacccgtcaaacacgacgcctgaaggcgtagcccgtcgttacggcggcgagtggaccgaagatgcagcgaaacgcgcgttattggccgaacgtttgcacgccaatttattaggacgtttgcaaggcgaggagcgtctcctctggctttacgaagaagtggagaaaccattgagtcgcgtgctcgcgcatatggaagctaccggtgtcaaattagacgtggcgtatttggagaatctcagccttgaagttgctgcccacatgcgccgcttggaggaagaagtattccgtttagcaggccgttcctttcgccttaattctcgcgatcagttagaacgtgtgttgttcgatgaacttggtctccctcctatcggcaagacagagaagaccggtaaacgtagcacttcagcggcggttttagaagctcttcgcgaagtccatcccattgtggacaagatcttgcaataccgcgaactcgcgaaattgaaaggcacctatattgaccgtcttccggcattagtccacccgaaaacgggacgcctccatacccgcttcaaccaaacagccacggcgaccggtcgtttgtcctcctctgatccaaaccttcagaatattccagtacgtaccccattgggccagaagatccgccgtgcgtttgtagctgaggagggttggcgtttagtggccctcgattatagccaaattgaattacgtgtccttgcccatctttctggcgatgagaacctcatccgcgtgtttgaggaaggcaaagacattcacactcaaacggcaagctggatgtttggattatcagctgaagcgatcgatcctttgatgcgtcgtgcagcgaagaccatcaatttcggtgttctctacggtatgagtgcctttcgtttgtcgcaggaattaggcattccctacgaagaagctcaggcgttcattcagaaatactttcaaagctatcccaaagttaaagcatggatcgagaagactctcgaagaaggccgcacacgtggttacgtagagaccttatttggacgtcgccgctatgttcccgatttaaacgctcgcgtgaaaggcaagcgtgaagccgccgaacgcatggcgttcaacatgcctgtacagggcacggcagctgacctcatgaaacttgcaatggtgcgcctttttccacaattgcgtgaagttggtgcccgcatgctcttgcaggtccacgatgaactcttgttagaagcgccaaaagagcgtgcggaagaggtggcagccctcgcgaaagaagttatggaaggcgtgtggcccttagcggtgcctcttgaagtcgaagttggtattggcgaggattggctggctgccaaagga

SEQ ID NO: 3974 - protein, 841 aa, synthetic construct; identical to SEQ ID NO: 3908
  REGION 1..841: note = Variant of DNA polymerase I from Thermus sp. strain 2.9

SEQ ID NO: 3975 - DNA, 2523 bp, synthetic construct
  misc_feature 1..2523: note = Variant of DNA polymerase I from Thermus sp. strain 2.9
  source 1..2523: mol_type = other DNA
atgcaccatcatcatcatcatggcggtagcggcgtgttagaggtgttcgagcctaaaggtcgcgtgcttctggttgatggccatcatctcgcgtatcgtaacttctttgccctgaaaggattaaccaccagcagcggcgagccggtacagggtgtctacggctttgcaaagtcgctcctgaaagctctgaaagaagacggtgatgtggtgattgttgtctttgatgcgaaagcgccaagttttcgccacgaagcgtacgaagcttacaaagccgggcgtgctcctacgccggaagactttcctcgccaattggcgcttatgaaggaattagtggatttgcttggcctcgaacgcttggaagttcccggtttcgaggcagacgacgtattagcgactctcgcaaagaaagccgaacgtgagggctatgaagtccagatcttgacagcagatcgcgatcttttccagcttttatctccgcgcatctcggtgttacacccggaagggcatcgtatcaccccggaatggctctgggagaaatatggtttgcgtcccgaacaatgggtggattttcgcgccttagcaggcgatccgagcgacaatattccgggagttaaaggtatcggcgagaagacggcgctcaagctccttaaagaatgggggtcgttggagaacttgcttaagaatttagatcaggtcaaaccagagtcagtgcgtgagaagattcttgctcacctcgaagacctcgagttaagccgcgaattgtcccgtgtacgcaccgatttgccgctcgaagttgatttccaacgccgccgcgaacctgactgggagggtcttaaagcgtttttagagcgtcttgaatttggttcgctcttgcatgaattcggccttttagaaagcccgttaccagccgaagaagcaccttggccaccgcccgagggcgcgtttttaggttaccgtttgagtcgcccggaaccgatgtgggccgaattactggctcttgcagcgtctgcccagggacgtgtgtatcgcgcggaagaccctcatggtgcgctccgcggcctcttcgaagtccgtggactccttgccaaagacttagctgttgttgcattgcgcgaaggtcttgatttacctccgactgatgatccaatgcttcttgcgtacctcttggacccgtcaaacacgacgcccgaaggcgtagcccgtcgttacggcggcgagtggaccgaagatgcagcgaaacgcgcgttattggccgaacgtttgcacgccaatttattaggacgtttgcaaggcgaggaacgtctcctctggctttacgaagaagtggagaaaccattgagtcgcgtgctcgcgcatatggaagctaccggtgtcaaattagacgtggcgtatttggagaatctcagccttgaagttgctgcccacatgcgccgcttggaggaagaagtattccgtttagcaggccgttcctttcgccttaattctcgcgatcagttagaacgtgtgttgttcgatgaacttggtctccctcctatcggcaagacagagaagaccggtaaacgtagcacttcagcggcggttttagaagctcttcgcgaagtccatcccattgtggacaagatcttgcaataccgcgaactcgcgaaattgaaaggcacctatattgaccgtcttccggcattagtccacccgaaaacgggacgcctccatacccgcttcaaccaaacagccacggcgaccggtcgtttgtcctcctctgatccaaaccttcagaatattccagtacgtaccccgttgggccagaagatccgccgtgcgtttgtagctgaggagggttggcgtttagtggccctcgattatagccaaattgaattacgtgtccttgcccatctttctggcgatgagaacctcatccgcgtgtttcaggaaggcaaagacattcacactcaaacggcaagctggatgtttggattatcagctgaagcgatcgatcctttgatgcgtcgtgcagcgaagaccatcaatttcggtgttctctacggtatgagtgcctttcgtttgtcgcaggaattaggcattccctatgaagaagctcaggcgttcattcagaaatactttcaaagctatcccaaagttaaagcatggatcgagaagactctcgaagaaggccgccaccgtggttacgtagagaccttatttggacgtcgccgctatgttcccgatttaaacgctcgcgtgaaaggcaagcgtgaagccgccgaacgcatggcgttcaacatgcctgtacagggcacggcagctgacctcatgaaacttgcaatggtgcgcctttttccacaattgcgtgaagttggtgcccgcatgctcttgcaggtccacgatgaactcttgttagaagcgccaaaagagcgtgcggaagaggtggcagccctcgcgaaagaagttatggaaggcgtgtggcccttagcggtgcctcttgaagtcgaagttggtattggcgaggattggctggctgccaaagga

SEQ ID NO: 3976 - protein, 841 aa, synthetic construct
  REGION 1..841: note = Variant of DNA polymerase I from Thermus sp. strain 2.9
MHHHHHHGGSGVLEVFEPKGRVLLVDGHHLAYRNFFALKGLTTSSGEPVQGVYGFAKSLLKALKEDGDVVIVVFDAKAPSFRHEAYEAYKAGRAPTPEDFPRQLALMKELVDLLGLERLEVPGFEADDVLATLAKKAEREGYEVQILTADRDLFQLLSPRISVLHPEGHRITPEWLWEKYGLRPEQWVDFRALAGDPSDNIPGVKGIGEKTALKLLKEWGSLENLLKNLDQVKPESVREKILAHLEDLELSRELSRVRTDLPLEVDFQRRREPDWEGLKAFLERLEFGSLLHEFGLLESPLPAEEAPWPPPEGAFLGYRLSRPEPMWAELLALAASAQGRVYRAEDPHGALRGLFEVRGLLAKDLAVVALREGLDLPPTDDPMLLAYLLDPSNTTPEGVARRYGGEWTEDAAKRALLAERLHANLLGRLQGEERLLWLYEEVEKPLSRVLAHMEATGVKLDVAYLENLSLEVAAHMRRLEEEVFRLAGRSFRLNSRDQLERVLFDELGLPPIGKTEKTGKRSTSAAVLEALREVHPIVDKILQYRELAKLKGTYIDRLPALVHPKTGRLHTRFNQTATATGRLSSSDPNLQNIPVRTPLGQKIRRAFVAEEGWRLVALDYSQIELRVLAHLSGDENLIRVFQEGKDIHTQTASWMFGLSAEAIDPLMRRAAKTINFGVLYGMSAFRLSQELGIPYEEAQAFIQKYFQSYPKVKAWIEKTLEEGRHRGYVETLFGRRRYVPDLNARVKGKREAAERMAFNMPVQGTAADLMKLAMVRLFPQLREVGARMLLQVHDELLLEAPKERAEEVAALAKEVMEGVWPLAVPLEVEVGIGEDWLAAKG

SEQ ID NO: 3977 - DNA, 2523 bp, synthetic construct
  misc_feature 1..2523: note = Variant of DNA polymerase I from Thermus sp. strain 2.9
  source 1..2523: mol_type = other DNA
atgcaccatcatcatcatcatggcggtagcggcgtgttaccggtgttcgagcctaaaggtcgcgtgcttctggttgatggccatcatctcgcgtatcgtaacttctttgccctgaaaggattaaccaccagcagcggcgagccggtacagggtgtctacggctttgcaaagtcgctcctgaaagctctgaaagaagacggtgatgtggtgattgttgtctttgatgcgaaagcgccaagttttcgccacgaagcgtacgaagcttacaaagccgggcgtgctccaacgccggaagactttcctcgccaattggcgcttatgaaggaattagtggatttgcttggcctcgaacgcttggaagttcccggtttcgaggcagacgacgtattagcgactctcgcaaagaaagccgaacgtgagggctatgaagtccagatcttgacagcagatcgcgatcttttccagcttttatctccgcgcatctcggtgttacacccggaagggcatcgtatcaccccggaatggctctgggagaaatatggtttgcgtcccgaacaatgggtggattttcgcgccttagcaggcgatccgagcgacaatattccgggagttaaaggtatcggcgagaagacggcgctcaagctccttaaagaatgggggtcgttggagaacttgcttaagaatttagatcaggtcaaaccagagtcagtgcgtgagaagattcttgctcacctcgaagacctcaaattaagccgcgaattgtcccgtgtacgcaccgatttgccgctcgaagttgatttccaacgccgccgcgaacctgactgggagggtcttaaagcgtttttagagcgtcttgaatttggttcgctcttgcatgaattcggccttttagaaagcccgttaccagccgaagaagcaccttggccaccgcccgagggcgcgtttttaggttaccgtttgagtcgcccggaaccgatgtgggccgaattactggctcttgcagcgtctgcccagggacgtgtgtatcgcgcggaagaccctcatggtgcgctccgcggcctcttcgaagtccgtggactccttgccaaagacttagctgttgttgcattgcgcgaaggtcttgatttacctccgactgatgatccaatgcttcttgcgtacctcttggacccgtcaaacacgacgcccgaaggcgtagcccgtcgttacggcggcgagtggaccgaagatgcagcgaaacgcgcgttattggccgaacgtttgcacgccaatttattaggacgtttgcaaggcgaggaacgtctcctctggctttacgaagaagtggagaaaccattgagtcgcgtgctcgcgcatatggaagctaccggtgtcaaattagctgtggcgtatttggagaatctcagccttgaagttgctgcccacatgcgccgcttggaggaagaagtattccgtttagcaggccgttcctttcgccttaattctcgcgatcagttagaacgtgtgttgttcgatgaacttggtctccctcctatcggcaagacagagaagaccggtaaacgtagcacttcagcggcggttttagaagctcttcgcgaagtccatcccattgtggacaagatcttgcaataccgcgaactcgcgaaattgaaaggcacctatattgaccgtcttccggcattagtccacccgaaaacgggacgcctccatacccgcttcaaccaaacagccacggcgaccggtcgtttgtcctcctctgatccaaaccttcagaatattccagtacgtaccccattgggccagaagatccgccgtgcgtttgtagctgaggagggttggcgtttagtggccctcgattatagccaaattgaattacgtgtccttgcccatctttctggcgatgagaacctcatccgcgtgtttcaggaaggcaaagacattcacactcaaacggcaagctggatgtttggattatcagctgaagcgatcgatcctttgatgcgtcgtgcagcgaagaccatcaatttcggtgttctctacggtatgagtgcctttcgtttgtcgcaggaattaggcattccctatgaagaagctcaggcgttcattcagaaatactttcaaagctatcccaaagttaaagcatggatcgagaagactctcgaagaaggccgcacacgtggttacgtagagaccttatttggacgtcgccgctatgttcccgatttaaacgctcgcgtgaaaggcaagcgtgaagccgccgaacgcatggcgttcaacatgcctgtacagggcacggcagctgacctcatgaaacttgcaatggtgcgcctttttccacaattgcgtgaagttggtgcccgcatgctcttgcaggtccacgatgaactcttgttagaagcgccaaaagagcgtgcggaagaggtggcagccctcgcgaaagaagttatggaaggcgtgtggcccttagcggtgcctcttgaagtcgaagttggtattggcgaggattggctggctgccaaagga

SEQ ID NO: 3978 - protein, 841 aa, synthetic construct
  REGION 1..841: note = Variant of DNA polymerase I from Thermus sp. strain 2.9
MHHHHHHGGSGVLPVFEPKGRVLLVDGHHLAYRNFFALKGLTTSSGEPVQGVYGFAKSLLKALKEDGDVVIVVFDAKAPSFRHEAYEAYKAGRAPTPEDFPRQLALMKELVDLLGLERLEVPGFEADDVLATLAKKAEREGYEVQILTADRDLFQLLSPRISVLHPEGHRITPEWLWEKYGLRPEQWVDFRALAGDPSDNIPGVKGIGEKTALKLLKEWGSLENLLKNLDQVKPESVREKILAHLEDLKLSRELSRVRTDLPLEVDFQRRREPDWEGLKAFLERLEFGSLLHEFGLLESPLPAEEAPWPPPEGAFLGYRLSRPEPMWAELLALAASAQGRVYRAEDPHGALRGLFEVRGLLAKDLAVVALREGLDLPPTDDPMLLAYLLDPSNTTPEGVARRYGGEWTEDAAKRALLAERLHANLLGRLQGEERLLWLYEEVEKPLSRVLAHMEATGVKLAVAYLENLSLEVAAHMRRLEEEVFRLAGRSFRLNSRDQLERVLFDELGLPPIGKTEKTGKRSTSAAVLEALREVHPIVDKILQYRELAKLKGTYIDRLPALVHPKTGRLHTRFNQTATATGRLSSSDPNLQNIPVRTPLGQKIRRAFVAEEGWRLVALDYSQIELRVLAHLSGDENLIRVFQEGKDIHTQTASWMFGLSAEAIDPLMRRAAKTINFGVLYGMSAFRLSQELGIPYEEAQAFIQKYFQSYPKVKAWIEKTLEEGRTRGYVETLFGRRRYVPDLNARVKGKREAAERMAFNMPVQGTAADLMKLAMVRLFPQLREVGARMLLQVHDELLLEAPKERAEEVAALAKEVMEGVWPLAVPLEVEVGIGEDWLAAKG

SEQ ID NO: 3979 - DNA, 2523 bp, synthetic construct
  misc_feature 1..2523: note = Variant of DNA polymerase I from Thermus sp. strain 2.9
  source 1..2523: mol_type = other DNA
atgcaccatcatcatcatcatggcggtagcggcgtgttaccggtgttcgagcctaaaggtcgcgtgcttctggttgatggccatcatctcgcgtatcgtaacttctttgccctgaaaggattaaccaccagcagcggcgagccggtacagggtgtctacggctttgcaaagtcgctcctgaaagctctgaaagaagacggtgatgtggtgattgttgtctttgatgcgaaagcgccaagttttcgccacgaagcgtacgaagcttacaaagccgggcgtgctccaacgccggaagactttcctcgccaattggcgcttatgaaggaattagtggatttgcttggcctcgaacgcttggaagttcccggtttcgaggcagacgacgtattagcgactctcgcaaagaaagccgaacgtgagggctatgaagtccagatcttgacagcagatcgcgatcttttccagcttttatctccgcgcatctcggtgttacacccggaagggcatcgtatcaccccggaatggctctgggagaaatatggtttgcgtcccgaacaatgggtggattttcgcgccttagcaggcgatccgagcgacaatattccgggagttaaaggtatcggcgagaagacggcgctcaagctccttaaagaatgggggtcgttggagaacttgcttaagaatttagatcaggtcaaaccagagtcagtgcgtgagaagattcttgctcacctcgaagacctcaaattaagccgcgaattgtcccgtgtacgcaccgatttgccgctcgaagttgatttccaacgccgccgcgaacctgactgggagggtcttaaagcgtttttagagcgtcttgaatttggttcgctcttgcatgaattcggccttttagaaagcccgttaccagccgaagaagcaccttggccaccgcccgagggcgcgtttttaggttaccgtttgagtcgcccggaaccgatgtgggccgaattactggctcttgcagcgtctgcccagggacgtgtgtatcgcgcggaagaccctcatggtgcgctccgcggcctcttcgaagtccgtggactccttgccaaagacttagctgttgttgcattgcgcgaaggtcttgatttacctccgactgatgatccaatgcttcttgcgtacctcttggacccgtcaaacacgacgcccgaaggcgtagcccgtcgttacggcggcgagtggaccgaagatgcagcgaaacgcgcgttattggccgaacgtttgcacgccaatttattaggacgtttgcaaggcgaggaacgtctcctctggctttacgaagaagtggagaaaccattgagtcgcgtgctcgcgcatatggaagctaccggtgtcaaattagacgtggcgtatttggagaatctcagccttgaagttgctgcccacatgcgccgcttggaggaagaagtattccgtttagcaggccgttcctttcgccttaattctcgcgatcagttagaacgtgtgttgttcgatgaacttggtctccctcctatcggcaagacagagaagaccggtaaacgtagcacttcagcggcggttttagaagctcttcgcgaagtccatcccattgtggacaagatcttgcaataccgcgaactcgcgaaattgaaaggcacctatattgaccgtcttccggcattagtccacccgcggacgggacgcctccatacccgcttcaaccaaacagccacggcgaccggtcgtttgtcctcctctgatccaaaccttcagaatattccagtacgtaccccattgggccagaagatccgccgtgcgtttgtagctgaggagggttggcgtttagtggccctcgattatagccaaattgaattacgtgtccttgcccatctttctggcgatgagaacctcatccgcgtgtttcaggaaggcaaagacattcacactcaaacggcaagctggatgtttggattatcagctgaagcgatcgatcctttgatgcgtcgtgcagcgaagaccatcaatttcggtgttctctacggtatgagtgcctttcgtttgtcgcaggaattaggcattccctatgaagaagctcaggcgttcattcagaaatactttcaaagctatcccaaagttaaagcatggatcgagaagactctcgaagaaggccgcacacgtggttacgtagagaccttatttggacgtcgccgctatgttcccgatttaaacgctcgcgtgaaaggcaagcgtgaagccgccgaacgcatggcgttcaacatgcctgtacagggcacggcagctgacctcatgaaacttgcaatggtgcgcctttttccacaattgcgtgaagttggtgcccgcatgctcttgcaggtccacgatgaactcttgttagaagcgccaaaagagcgtgcggaagaggtggcagccctcgcgaaagaagttatggaaggcgtgtggcccttagcggtgcctcttgaagtcgaagttggtattggcgaggattggctggctgccaaagga

SEQ ID NO: 3980 - protein, 841 aa, synthetic construct; identical to SEQ ID NO: 3308
  REGION 1..841: note = Variant of DNA polymerase I from Thermus sp. strain 2.9

SEQ ID NO: 3981 - DNA, 2523 bp, synthetic construct
  misc_feature 1..2523: note = Variant of DNA polymerase I from Thermus sp. strain 2.9
  source 1..2523: mol_type = other DNA
atgcaccatcatcatcatcatggcggtagcggcgtgttacctgtgttcgagcctaaaggtcgcgtgcttctggttgatggccatcatctcgcgtatcgtaacttctttgccctgaaaggattaaccaccagcagcggcgagccggtacagggtgtctacggctttgcaaagtcgctcctgaaagctctgaaagaagacggtgatgtggtgattgttgtctttgatgcgaaagcgccaagttttcgccacgaagcgtacgaagcttacaaagccgggcgtgctccaacgccggaagactttcctcgccaattggcgcttatgaaggaattagtggatttgcttggcctcgaacgcttggaagttcccggtttcgaggcagacgacgtattagcgactctcgcaaagaaagccgaacgcgagggctatgaagtccagatcttgacagcagatcgcgatcttttccagcttttatctccgcgcatctcggtgttacacccggaagggcatcgtatcaccccggaatggctctgggagaaatatggtttgcgtcccgaacaatgggtggattttcgcgccttagcaggcgatccgagcgacaatattccgggagttaaaggtatcggcgagaagacggcgctcaagctccttaaagaatgggggtcgttggagaacttgcttaagaatttagatcaggtcaaaccagagtcagtgcgtgagaagattcttgctcacctcgaagacctcaaattaagccgcgaattgtcccgtgtacgcaccgatttgccgctcgaagttgatttccaacgccgccgcgaacctgactgggagggtcttaaagcgtttttagagcgtcttgaatttggttcgctcttgcatgaattcggccttttagaaagcccgttaccagccgaagaagcaccttggccaccgcccgagggcgcgtttttaggttaccgtttgagtcgcccggaaccgatgtgggccgaattactggctcttgcagcgtctgcccagggacgtgtgtatcgcgcggaagaccctcatggtgcgctccgcggcctcttcgaagtccgtggactccttgccaaagacttagctgttgttgcattgcgcgaaggtcttgatttacctccgactgatgatccaatgcttcttgcgtacctcttggacccgtcaaacacgacgcctgaaggcgtagcccgtcgttacggcggcgagtggaccgaagatgcagcgaaacgcgcgttattggccgaacgtttgcacgccaatttattaggacgtttgcaaggcgaggaacgtctcctctggctttacgaagaagtggagaaaccattgagtcgcgtgctcgcgcatatggaagctaccggtgtcaaattagacgtggcgtatttggagaatctcagccttgaagttgctgcccacatgcgccgcttggaggaagaagtattccgtttagcaggccgttcctttcgccttaattctcgcgatcagttagaacgtgtgttgttcgatgaacttggtctccctcctatcggcaagacagagaagaccggtaaacgtagcacttcagcggcggttttagaagctcttcgcgaagtccatcccattgtggacaagatcttgcaataccgcgaactcgcgaaattgaaaggcacctatattgaccgtcttccggcattagtccacccgaaaacgggacgcctccatacccgcttcaaccaaacagccacggcgaccggtcgtttgtcctcctctgatccaaaccttcagaatattccagtacgtaccccattgggccagaagatccgccgtgcgtttgtagctgaggagggttggcgtttagtggccctcgattatagccaaattgaattacgtgtccttgcccatctttctggcgatgagaacctcatccgcgtgtttgaggaaggcaaagacattcacactcaaacggcaagctggatgtttggattatcagctgaagcgatcgatcctttgatgcgtcgtgcagcgaagaccatcaatttcggtgttctctacggtatgagtgcctttcgtttgtcgcaggaattaggcattccctacgaagaagctcaggcgttcattcagaaatactttcaaagctatcccaaagttaaagcatggatcgagaagactctcgaagaaggccgcacacgtggttacgtagagaccttatttggacgtcgccgctatgttcccgatttaaacgctcgcgtgaaaggcaagcgtgaagccgccgaacgcatggcgttcaacatgcctgtacagggcacggcagctgacctcatgaaacttgcaatggtgcgcctttttccacaattgcgtgaagttggtgcccgcatgctcttgcaggtccacgatgaactcttgttagaagcgccaaaagagcgtgcggaagaggtggcagccctcgcgaaagaagttatggaaggcgtgtggcccttagcggtgcctcttgaagtcgaagttggtattggcgaggattggctggctgccaaagga

SEQ ID NO: 3982 - protein, 841 aa, synthetic construct; identical to SEQ ID NO: 3444
  REGION 1..841: note = Variant of DNA polymerase I from Thermus sp. strain 2.9

SEQ ID NO: 3983 - DNA, 2523 bp, synthetic construct
  misc_feature 1..2523: note = Variant of DNA polymerase I from Thermus sp. strain 2.9
  source 1..2523: mol_type = other DNA
atgcaccatcatcatcatcatggcggtagcggcgtgttaccggtgttcgagcctaaaggtcgcgtgcttctggttgatggccatcatctcgcgtatcgtaacttctttgccctgaaaggattaaccaccagcagcggcgagccggtacagggtgtctacggctttgcaaagtcgctcctgaaagctctgaaagaagacggtgatgtggtgattgttgtctttgatgcgaaagcgccaagttttcgccacgaagcgtacgaagcttacaaagccgggcgtgctccaacgccggaagactttcctcgccaattggcgcttatgaaggaattagtggatttgcttggcctcgaacgcttggaagttcccggtttcgaggcagacgacgtattagcgactctcgcaaagaaagccgaacgtgagggctatgaagtccagatcttgacagcagatcgcgatcttttccagcttttatctccgcgcatctcggtgttacacccggaagggcatcgtatcaccccggaatggctctgggagaaatatggtttgcgtcccgaacaatgggtggattttcgcgccttagcaggcgatccgagcgacaatattccgggagttaaaggtatcggcgagaagacggcgctcaagctccttaaagaatgggggtcgttggagaacttgcttaagaatttagatcaggtcaaaccagagtcagtgcgtgagaagattcttgctcacctcgaagacctcaaattaagccgcgaattgtcccgtgtacgcaccgatttgccgctcgaagttgatttccaacgccgccgcgaacctgactgggagggtcttaaagcgtttttagagcgtcttgaatttggttcgctcctgcatgaattcggccttttagaaagcccgttaccagccgaagaagcaccttggccaccgcccgagggcgcgtttttaggttaccgtttgagtcgcccggaaccgatgtgggccgaattactggctcttgcagcgtctgcccagggacgtgtgtatcgcgcggaagaccctcatggtgcgctccgcggcctcttcgaagtccgtggactccttgccaaagacttagctgttgttgcattgcgcgaaggtcttgatttacctccgactgatgatccaatgcttcttgcgtacctcttggacccgtcaaacacgacgcccgaaggcgtagcccgtcgttacggcggcgagtggaccgaagatgcagcgaaacgcgcgttattggccgaacgtttgcacgccaatttattaggacgtttgcaaggcgaggaacgtctcctctggctttacgaagaagtggagaaaccattgagtcgcgtgctcgcgcatatggaagctaccggtgtcaaattagacgtggcgtatttggagaatctcagccttgaagttgctgcccacatgcgccgcttggaggaagaagtattccgtttagcaggccgttcctttcgccttaattctcgcgatcagttagaacgtgtgttgttcgatgaacttggtctccctcctatcggcaagacagagaagaccggtaaacgtagcacttcagcggcggttttagaagctcttcgcgaagtccatcccattgtggacaagatcttgcaataccgcgaactcgcgaaattgaaaggcacctatattgaccgtcttccggcattagtccacccgaaaacgggacgcctccatacccgcttcaaccaaacagccacggcgaccggtcgtttgtcctcctctgatccaaaccttcagaatattccagtacgtaccccattgggccagaagatccgccgtgcgtttgtagctgaggagggttggcgtttagtggccctcgattatagccaaattgaattacgtgtccttgcccatctttctggcgatgagaacctcatccgcgtgtttcaggaaggcaaagacattcacactcaaacggcaagctggatgtttggattatcagctgaagcgatcgatcctttgatgcgtcgtgcagcgaagacgatcaatttcggtgttctctacggtatgagtccgtttcgtttgtcgcaggaattaggcattccctatgaagaagctcaggcgttcattcagaaatactttcaaagctatcccaaagttaaagcatggatcgagaagactctcgaagaaggccgcacacgtggttacgtagagaccttatttggacgtcgccgctatgttcccgatttaaacgctcgcgtgaaaggcaagcgtgaagccgccgaacgcatggcgttcaacatgcctgtacagggcacggcagctgacctcatgaaacttgcaatggtgcgcctttttccacaattgcgtgaagttggtgcccgcatgctcttgcaggtccacgatgaactcttgttagaagcgccaaaagagcgtgcggaagaggtggcagccctcgcgaaagaagttatggaaggcgtgtggcccttagcggtgcctcttgaagtcgaagttggtattggcgaggattggctggctgccaaagga

SEQ ID NO: 3984 - protein, 841 aa, synthetic construct; identical to SEQ ID NO: 3776
  REGION 1..841: note = Variant of DNA polymerase I from Thermus sp. strain 2.9

SEQ ID NO: 3985 - DNA, 2523 bp, synthetic construct
  misc_feature 1..2523: note = Variant of DNA polymerase I from Thermus sp. strain 2.9
  source 1..2523: mol_type = other DNA
atgcaccatcatcatcatcatggcggtagcggcgtgttaccggtgttcgagcctaaaggtcgcgtgcttctggttgatggccatcatctcgcgtatcgtaacttctttgccctgaaaggattaaccaccagcctgggcgagccggtacagggtgtctacggctttgcaaagtcgctcctgaaagctctgaaagaagacggtgatgtggtgattgttgtctttgatgcgaaagcgccaagttttcgccacgaagcgtacgaagcttacaaagccgggcgtgctccaacgccggaagactttcctcgccaattggcgcttatgaaggaattagtggatttgcttggcctcgaacgcttggaagttcccggtttcgaggcagacgacgtattagcgactctcgcaaagaaagccgaacgtgagggctatgaagtccagatcttgacagcagatcgcgatcttttccagcttttatctccgcgcatctcggtgttacacccggaagggcatcgtatcaccccggaatggctctgggagaaatatggtttgcgtcccgaacaatgggtggattttcgcgccttagcaggcgatccgagcgacaatattccgggagttaaaggtatcggcgagaagacggcgctcaagctccttaaagaatgggggtcgttggagaacttgcttaagaatttagatcaggtcaaaccagagtcagtgcgtgagaagattcttgctcacctcgaagacctcaaattaagccgcgaattgtcccgtgtacgcaccgatttgccgctcgaagttgatttccaacgccgccgcgaacctgactgggagggtcttaaagcgtttttagagcgtcttgaatttggttcgctcttgcatgaattcggccttttagaaagcccgttaccagccgaagaagcaccttggccaccgcccgagggcgcgtttttaggttaccgtttgagtcgcccggaaccgatgtgggccgaattactggctcttgcagcgtctgcccagggacgtgtgtatcgcgcggaagaccctcatggtgcgctccgcggcctcttcgaagtccgtggactccttgccaaagacttagctgttgttgcattgcgcgaaggtcttgattttcctccgactgatgatccaatgctttttgcgtacctcttggacccgtcaaacacgacgcccgaaggagtagcccgtcgttacggcggcgagtgggccgaagatgcagcgaaacgcgcgttattggccgaacgtttgcacgcaaatttattaggacgtttgcaaggcgaggaacgtctcctctggctttacgaagaagtggagaaaccattgagtcgcgtgctcgcccatatggaagctaccggtgtcaaattagacgtggcgtatttggagaatctcagccttgaagttgctgcccacatgcgccgcttggaggaagaagtattccgtttagcaggccgttcctttcgccttgtttctcgcgatcagttagaacgtgtgttgttcgatgaacttggtctccctcctatcggcaagacagagaagaccggtaaacgtagcacttcacgtgcggttttagaggctcttcgcgaagtccatcccattgtggacaagatcttgcagtaccgcgaactcgcgaaattgaaaggcacctatattgaccgtcttccggcattagtccacccgaaaacgggacgcctccatacccgcttcaaccaaacagccacggcgaccggtcgtttgtcctcctctgatccaaaccttcagaatattccagtacgtaccccattgggccagaagatccgccgtgcgtttgtagctgaggagggttggcgtttagtggccctcgattatcgtcaaattgaattacgtgtccttgcccatctttctggcgatgagaacctcatccgcgtgtttcaggaaggcaaagacattcacactcaaacggcaagctggatgtttggattatcagctgaagcgatcgatcctttgatgcgtcgtgcagcgaagaccatcaatttcggtgttctctacggtatgagtgcctttcgtttgtcgcaggaattaggcattccctatcaagaagctcaggcgttcattcagaaatactttcaaagctatcccaaagttaaagcatggatcgagaagactctcgaagaaggccgcacacgtggttacgtagagaccttatttggacgtcgccgctatgttcccgatttaaacgctcgcgtgaaaggcaagcgtgaagccgccgaacgcatggcgttcaacatgcctgtacagggcacggcagctgacctcatgaaacttgcaatggtgcgcctttttccacaattgcgtgaagttggtgcccgcatgctcttgcaggtccacgatgaactcttgttagaagcgccaaaagagcgtgcggaagaggtggcagccctcgcgaaagaagttatggaaggcgtgtggcccttagcggtgcctcttgaagtcgaagttggtattggcgaggattggctggctgccaaagga

SEQ ID NO: 3986 - protein, 841 aa, synthetic construct
  REGION 1..841: note = Variant of DNA polymerase I from Thermus sp. strain 2.9
MHHHHHHGGSGVLPVFEPKGRVLLVDGHHLAYRNFFALKGLTTSLGEPVQGVYGFAKSLLKALKEDGDVVIVVFDAKAPSFRHEAYEAYKAGRAPTPEDFPRQLALMKELVDLLGLERLEVPGFEADDVLATLAKKAEREGYEVQILTADRDLFQLLSPRISVLHPEGHRITPEWLWEKYGLRPEQWVDFRALAGDPSDNIPGVKGIGEKTALKLLKEWGSLENLLKNLDQVKPESVREKILAHLEDLKLSRELSRVRTDLPLEVDFQRRREPDWEGLKAFLERLEFGSLLHEFGLLESPLPAEEAPWPPPEGAFLGYRLSRPEPMWAELLALAASAQGRVYRAEDPHGALRGLFEVRGLLAKDLAVVALREGLDFPPTDDPMLFAYLLDPSNTTPEGVARRYGGEWAEDAAKRALLAERLHANLLGRLQGEERLLWLYEEVEKPLSRVLAHMEATGVKLDVAYLENLSLEVAAHMRRLEEEVFRLAGRSFRLVSRDQLERVLFDELGLPPIGKTEKTGKRSTSRAVLEALREVHPIVDKILQYRELAKLKGTYIDRLPALVHPKTGRLHTRFNQTATATGRLSSSDPNLQNIPVRTPLGQKIRRAFVAEEGWRLVALDYRQIELRVLAHLSGDENLIRVFQEGKDIHTQTASWMFGLSAEAIDPLMRRAAKTINFGVLYGMSAFRLSQELGIPYQEAQAFIQKYFQSYPKVKAWIEKTLEEGRTRGYVETLFGRRRYVPDLNARVKGKREAAERMAFNMPVQGTAADLMKLAMVRLFPQLREVGARMLLQVHDELLLEAPKERAEEVAALAKEVMEGVWPLAVPLEVEVGIGEDWLAAKG

SEQ ID NO: 3987 - DNA, 2523 bp, synthetic construct
  misc_feature 1..2523: note = Variant of DNA polymerase I from Thermus sp. strain 2.9
  source 1..2523: mol_type = other DNA
atgcaccatcatcatcatcatggcggtagcggcgtgttaccggtgttcgagcctaaaggtcgcgtgcttctggttgatggccatcatctcgcgtatcgtaacttctttgccctgaaaggattaaccaccagcagcggcgagccggtacagggtgtctacggctttgcaaagtcgctcctgaaagctctgaaagaagacggtgatgtggtgattgttgtctttgatgcgaaagcgccaagttttcgccacgaagcgtacgaagcttacaaagccgggcgtgctcctacgccggaagactttcctcgccaattggcgcttatgaaggaattagtggatttgcttggcctcgaacgcttggaagttcccggtttcgaggcagacgacgtattagcgactctcgcaaagaaagccgaacgcgagggctatgaagtccagatcttgacagcagatcgcgatcttttccagcttttatctccgcgcatctcggtgttacacccggatgggcatcgtatcaccccggaatggctctgggagaaatatggtttgcgtcccgaacaatgggtggattttcgcgccttagcaggcgataaaagcgacaatattccgggagttaaaggtatcggcgagaagacggcgctcaagctccttaaagaatgggggtcgttggagaacttgcttaagaatttagatcaggtcaaaccagagtcagtgcgtgagaagattcttgctcacctcgaagacctcaagttaagccgcgaattgtcccgtgtacgcaccgatttgccgctcgaagttgatttccaacgccgccgcgaacctgactgggagggtcttaaagcgtttttagagcgtcttgaatttggttcgctcttgcatgaattcggccttttagaaagcccgttaccagccgaagaagcaccttggccaccgcccgagggcgcgtttttaggttaccgtttgagtcgcccggaaccgatgtgggccgaattactggctcttgcagcgtctgcccagggacgtgtgtatcgcgcggaagaccctcatggtgcgctccgcggcctcttcgaagtccgtggactccttgccaaagacttagctgttgttgcattgcgcgaaggtcttgatttacctccgactgatgatccaatgcttcttgcgtacctcttggacccgtcaaacacgacgcccgaaggcgtagcccgtcgttacggcggcgagtggaccgaagatgcagcgaaacgcgcgttattggccgaacgtttgcacgccaatttattaggacgtttgcaaggcgaggagcgtctcctctggctttacgaagaagtggagaaaccattgagtcgcgtgctcgcgcatatggaagctaccggtgtcaaattagacgtggcgtatttggagaatctcagccttgaagttgctgcccacatgcgccgcttggaggaagaagtattccgtttagcaggccgttcctttcgccttaattctcgcgatcagttagaacgtgtgttgttcgatgaacttggtctccctcctatcggcaagacagagaagaccggtaaacgtagcacttcagcggcggttttagaagctcttcgcgaagtccatcccattgtggacaagatcttgcaataccgcgaactcgcgaaattgaaaggcacctatattgaccgtcttccggcattagtccacccgaaaacgggacgcctccatacccgcttcaaccaaacagccacggcgaccggtcgtttgtcctcctctgatccaaaccttcagaatattccagtacgtaccccgttgggccagaagatccgccgtgcgtttgtagctgaggagggttggcgtttagtggccctcgattatagccaaattgaattacgtgtccttgcccatctttctggcgatgagaacctcatccgcgtgtttgaggaaggcaaagacattcacactcaaacggcaagctggatgtttggattatcagctgaagcgatcgatcctttgatgcgtcgtgcagcgaagaccatcaatttcggtgttctctacggtatgagtgcctttcgtttgtcgcaggaattaggcattcccaaagaagaagctcaggcgttcattcagaaatactttcaaagctatcccaaagttaaagcatggatcgagaagactctcgaagaaggccgccaccgtggttacgtagagaccttatttggacgtcgccgctatgttcccgatttaaacgctcgcgtgaaaggcaagcgtgaagccgccgaacgcatggcgttcaacatgcctgtacagggcacggcagctgacctcatgaaacttgcaatggtgcgcctttttccacaattgcgtgaagttggtgcccgcatgctcttgcaggtccacgatgaactcttgttagaagcgccaaaagagcgtgcggaagaggtggcagccctcgcgaaagaagttatggaaggcgtgtggcccttagcggtgcctcttgaagtcgaagttggtattggcgaggattggctggctgccaaagga

SEQ ID NO: 3988 - protein, 841 aa, synthetic construct
  REGION 1..841: note = Variant of DNA polymerase I from Thermus sp. strain 2.9
MHHHHHHGGSGVLPVFEPKGRVLLVDGHHLAYRNFFALKGLTTSSGEPVQGVYGFAKSLLKALKEDGDVVIVVFDAKAPSFRHEAYEAYKAGRAPTPEDFPRQLALMKELVDLLGLERLEVPGFEADDVLATLAKKAEREGYEVQILTADRDLFQLLSPRISVLHPDGHRITPEWLWEKYGLRPEQWVDFRALAGDKSDNIPGVKGIGEKTALKLLKEWGSLENLLKNLDQVKPESVREKILAHLEDLKLSRELSRVRTDLPLEVDFQRRREPDWEGLKAFLERLEFGSLLHEFGLLESPLPAEEAPWPPPEGAFLGYRLSRPEPMWAELLALAASAQGRVYRAEDPHGALRGLFEVRGLLAKDLAVVALREGLDLPPTDDPMLLAYLLDPSNTTPEGVARRYGGEWTEDAAKRALLAERLHANLLGRLQGEERLLWLYEEVEKPLSRVLAHMEATGVKLDVAYLENLSLEVAAHMRRLEEEVFRLAGRSFRLNSRDQLERVLFDELGLPPIGKTEKTGKRSTSAAVLEALREVHPIVDKILQYRELAKLKGTYIDRLPALVHPKTGRLHTRFNQTATATGRLSSSDPNLQNIPVRTPLGQKIRRAFVAEEGWRLVALDYSQIELRVLAHLSGDENLIRVFEEGKDIHTQTASWMFGLSAEAIDPLMRRAAKTINFGVLYGMSAFRLSQELGIPKEEAQAFIQKYFQSYPKVKAWIEKTLEEGRHRGYVETLFGRRRYVPDLNARVKGKREAAERMAFNMPVQGTAADLMKLAMVRLFPQLREVGARMLLQVHDELLLEAPKERAEEVAALAKEVMEGVWPLAVPLEVEVGIGEDWLAAKG

SEQ ID NO: 3989 - DNA, 2523 bp, synthetic construct
  misc_feature 1..2523: note = Variant of DNA polymerase I from Thermus sp. strain 2.9
  source 1..2523: mol_type = other DNA
atgcaccatcatcatcatcatggcggtagcggcgtgttaccggtgttcgagcctaaaggtcgcgtgcttctggttgatggccatcatctcgcgtatcgtaacttctttgccctgaaaggattaaccaccagcagcggcgagccggtacagggtgtctacggctttgcaaagtcgctcctgaaagctctgaaagaagacggtgatgtggtgattgttgtctttgatgcgaaagcgccaagttttcgccacgaagcgtacgaagcttacaaagccgggcgtgctccaacgccggaagactttcctcgccaattggcgcttatgaaggaattagtggatttgcttggcctcgaacgcttggaagttcccggtttcgaggcagacgacgtattagcgactctcgcaaagaaagccgaacgtgagggctatgaagtccagatcttgacagcagatcgcgatcttttccagcttttatctccgcgcatctcggtgttacacccggaagggcatcgtatcaccccggaatggctctgggagaaatatggtttgcgtcccgaacaatgggtggattttcgcgccttagcaggcgatccgagcgacaatattccgggagttaaaggtatcggcgagaagacggcgctcaagctccttaaagaatgggggtcgttggagaacttgcttaagaatttagatcaggtcaaaccagagtcagtgcgtgagaagattcttgctcacctcgaagacctcaaattaagccgcgaattgtcccgtgtacgcaccgatttgccgctcgaagttgatttccaacgccgccgcgaacctgactgggagggtcttaaagcgtttttagagcgtcttgaatttggttcgctcttgcatgaattcggccttttagaaagcccgttaccagccgaagaagcaccttggccaccgcccgagggcgcgtttttaggttaccgtttgagtcgcccggaaccgatgtgggccgaattactggctcttgcagcgtctgcccagggacgtgtgtatcgcgcggaagaccctcatggtgcgctccgcggcctcttcgaagtccgtggactccttgccaaagacttagctgttgttgcattgcgcgaaggtcttgatttacctccgactgatgatccaatgcttcttgcgtacctcttggacccgtcaaacacgacgcccgaaggcgtagcccgtcgttacaagggcgagtggaccgaagatgcagcgaaacgcgcgttattggccgaacgtttgcacgccaatttattaggacgtttgcaaggcgaggaacgtctcctctggctttacgaagaagtggagaaaccattgagtcgcgtgctcgcgcatatggaagctaccggtgtcaaattagacgtggcgtatttggagaatctcagccttgaagttgctgcccacatgcgccgcttggaggaagaagtattccgtttagcaggccgttcctttcgccttaattctcgcgatcagttagaacgtgtgttgttcgatgaacttggtctccctcctatcggcaagacagagaagaccggtaaacgtagcacttcagcggcggttttagaagctcttcgcgaagtccatcccattgtggacaagatcttgcaataccgcgaactcgcgaaattgaaaggcacctatattgaccgtcttccggcattagtccacccgaaaacgggacgcctccatacccgcttcaaccaaacagccacggcgaccggtcgtttgtcctcctctgatccaaaccttcagaatattccagtacgtaccccattgggccagaagatccgccgtgcgtttgtagctgaggagggttggcgtttagtggccctcgattatagccaaattgaattacgtgtccttgcccatctttctggcgatgagaacctcatccgcgtgtttcaggaaggcaaagacattcacactcaaacggcaagctggatgtttggattatcagctgaagcgatcgatcctttgatgcgtcgtgcagcgaagaccatcaatttcggtgttctctacggtatgagtgcctttcgtttgtcgcaggaattaggcattccctatgaagaagctcaggcgttcattcagaaatactttcaaagctatcccaaagttaaagcatggatcgagaagactctcgaagaaggccgcacacgtggttacgtagagaccttatttggacgtcgccgctatgttcccgatttaaacgctcgcgtgaaaggcaagcgtgaagccgccgaacgcatggcgttcaacatgcctgtacagggcacggcagctgacctcatgaaacttgcaatggtgcgcctttttccacaattgcgtgaagttggtgcccgcatgctcttgcaggtccacgatgaactcttgttagaagcgccaaaagagcgtgcggaagaggtggcagccctcgcgaaagaagttatggaaggcgtgtggcccttagcggtgcctcttgaagtcgaagttggtattggcgaggattggctggctgccaaagga

SEQ ID NO: 3990 - protein, 841 aa, synthetic construct
  REGION 1..841: note = Variant of DNA polymerase I from Thermus sp. strain 2.9
MHHHHHHGGSGVLPVFEPKGRVLLVDGHHLAYRNFFALKGLTTSSGEPVQGVYGFAKSLLKALKEDGDVVIVVFDAKAPSFRHEAYEAYKAGRAPTPEDFPRQLALMKELVDLLGLERLEVPGFEADDVLATLAKKAEREGYEVQILTADRDLFQLLSPRISVLHPEGHRITPEWLWEKYGLRPEQWVDFRALAGDPSDNIPGVKGIGEKTALKLLKEWGSLENLLKNLDQVKPESVREKILAHLEDLKLSRELSRVRTDLPLEVDFQRRREPDWEGLKAFLERLEFGSLLHEFGLLESPLPAEEAPWPPPEGAFLGYRLSRPEPMWAELLALAASAQGRVYRAEDPHGALRGLFEVRGLLAKDLAVVALREGLDLPPTDDPMLLAYLLDPSNTTPEGVARRYKGEWTEDAAKRALLAERLHANLLGRLQGEERLLWLYEEVEKPLSRVLAHMEATGVKLDVAYLENLSLEVAAHMRRLEEEVFRLAGRSFRLNSRDQLERVLFDELGLPPIGKTEKTGKRSTSAAVLEALREVHPIVDKILQYRELAKLKGTYIDRLPALVHPKTGRLHTRFNQTATATGRLSSSDPNLQNIPVRTPLGQKIRRAFVAEEGWRLVALDYSQIELRVLAHLSGDENLIRVFQEGKDIHTQTASWMFGLSAEAIDPLMRRAAKTINFGVLYGMSAFRLSQELGIPYEEAQAFIQKYFQSYPKVKAWIEKTLEEGRTRGYVETLFGRRRYVPDLNARVKGKREAAERMAFNMPVQGTAADLMKLAMVRLFPQLREVGARMLLQVHDELLLEAPKERAEEVAALAKEVMEGVWPLAVPLEVEVGIGEDWLAAKG

SEQ ID NO: 3991 - DNA, 2523 bp, synthetic construct
  misc_feature 1..2523: note = Variant of DNA polymerase I from Thermus sp. strain 2.9
  source 1..2523: mol_type = other DNA
atgcaccatcatcatcatcatggcggtagcggcgtgttaccggtgttcgagcctaaaggtcgcgtgcttctggttgatggccatcatctcgcgtatcgtaacttctttgccctgaaaggattaaccaccagcagcggcgagccggtacagggtgtctacggctttgcaaagtcgctcctgaaagctctgaaagaagacggtgatgtggtgattgttgtctttgatgcgaaagcgccaagttttcgccacgaagcgtacgaagcttacaaagccgggcgtgctccaacgccggaagactttcctcgccaattggcgcttatgaaggaattagtggatttgcttggcctcgaacgcttggaagttcccggtttcgaggcagacgacgtattagcgactctcgcaaagaaagccgaacgtgagggctatgaagtccagatcttgacagcagatcgcgatcttttccagcttttatctccgcgcatctcggtgttacacccggaagggcatcgtatcaccccggaatggctctgggagaaatatggtttgcgtcccgaacaatgggtggattttcgcgccttagcaggcgatccgagcgacaatattccgggagttaaaggtatcggcgagaagacggcgctcaagctccttaaagaatgggggtcgttggagaacttgcttaagaatttagatcaggtcaaaccagagtcagtgcgtgagaagattcttgctcacctcgaagcgctcaaattaagccgcgaattgtcccgtgtacgcaccgatttgccgctcgaagttgatttccaacgccgccgcgaacctgactgggagggtcttaaagcgtttttagagcgtcttgaatttggttcgctcttgcatgaattcggccttttagaaagcccgttaccagccgaagaagcaccttggccaccgcccgagggcgcgtttttaggttaccgtttgagtcgcccggaaccgatgtgggccgaattactggctcttgcagcgtctgcccagggacgtgtgtatcgcgcggaagaccctcatggtgcgctccgcggcctcttcgaagtccgtggactccttgccaaagacttagctgttgttgcattgcgcgaaggtcttgatttacctccgactgatgatccaatgcttcttgcgtacctcttggacccgtcaaacacgacgcccgaaggcgtagcccgtcgttacggcggcgagtggaccgaagatgcagcgaaacgcgcgttattggccgaacgtttgcacgccaatttattaggacgtttgcaaggcgaggaacgtctcctctggctttacgaagaagtggagaaaccattgagtcgcgtgctcgcgcatatggaagctaccggtgtcaaattagacgtggcgtatttggagaatctcagccttgaagttgctgcccacatgcgccgcttggaggaagaagtattccgtttagcaggccgttcctttcgccttaattctcgcgatcagttagaacgtgtgttgttcgatgaacttggtctccctcctatcggcaagacagagaagaccggtaaacgtagcacttcagcggcggttttagaagctcttcgcgaagtccatcccattgtggacaagatcttgcaataccgcgaactcgcgaaattgaaaggcacctatattgaccgtcttccggcattagtccacccgaaaacgggacgcctccatacccgcttcaaccaaacagccacggcgaccggtcgtttgtcctcctctgatccaaaccttcagaatattccagtacgtaccccattgggccagaagatccgccgtgcgtttgtagctgaggagggttggcgtttagtggccctcgattatagccaaattgaattacgtgtccttgcccatctttctggcgatgagaacctcatccgcgtgtttcaggaaggcaaagacattcacactcaaacggcaagctggatgtttggattatcagctgaagcgatcgatcctttgatgcgtcgtgcagcgaagaccatcaatttcggtgttctctacggtatgagtgcctttcgtttgtcgcaggaattaggcattccctatgaagaagctcaggcgttcattcagaaatactttcaaagctatcccaaagttaaagcatggatcgagaagactctcgaagaaggccgcacacgtggttacgtagagaccttatttggacgtcgccgctatgttcccgatttaaacgctcgcgtgaaaggcaagcgtgaagccgccgaacgcatggcgttcaacatgcctgtacagggcacggcagctgacctcatgaaacttgcaatggtgcgcctttttccacaattgcgtgaagttggtgcccgcatgctcttgcaggtccacgatgaactcttgttagaagcgccaaaagagcgtgcggaagaggtggcagccctcgcgaaagaagttatggaaggcgtgtggcccttagcggtgcctcttgaagtcgaagttggtattggcgaggattggctggctgccaaagga

SEQ ID NO: 3992 - protein, 841 aa, synthetic construct
  REGION 1..841: note = Variant of DNA polymerase I from Thermus sp. strain 2.9
MHHHHHHGGSGVLPVFEPKGRVLLVDGHHLAYRNFFALKGLTTSSGEPVQGVYGFAKSLLKALKEDGDVVIVVFDAKAPSFRHEAYEAYKAGRAPTPEDFPRQLALMKELVDLLGLERLEVPGFEADDVLATLAKKAEREGYEVQILTADRDLFQLLSPRISVLHPEGHRITPEWLWEKYGLRPEQWVDFRALAGDPSDNIPGVKGIGEKTALKLLKEWGSLENLLKNLDQVKPESVREKILAHLEALKLSRELSRVRTDLPLEVDFQRRREPDWEGLKAFLERLEFGSLLHEFGLLESPLPAEEAPWPPPEGAFLGYRLSRPEPMWAELLALAASAQGRVYRAEDPHGALRGLFEVRGLLAKDLAVVALREGLDLPPTDDPMLLAYLLDPSNTTPEGVARRYGGEWTEDAAKRALLAERLHANLLGRLQGEERLLWLYEEVEKPLSRVLAHMEATGVKLDVAYLENLSLEVAAHMRRLEEEVFRLAGRSFRLNSRDQLERVLFDELGLPPIGKTEKTGKRSTSAAVLEALREVHPIVDKILQYRELAKLKGTYIDRLPALVHPKTGRLHTRFNQTATATGRLSSSDPNLQNIPVRTPLGQKIRRAFVAEEGWRLVALDYSQIELRVLAHLSGDENLIRVFQEGKDIHTQTASWMFGLSAEAIDPLMRRAAKTINFGVLYGMSAFRLSQELGIPYEEAQAFIQKYFQSYPKVKAWIEKTLEEGRTRGYVETLFGRRRYVPDLNARVKGKREAAERMAFNMPVQGTAADLMKLAMVRLFPQLREVGARMLLQVHDELLLEAPKERAEEVAALAKEVMEGVWPLAVPLEVEVGIGEDWLAAKG

SEQ ID NO: 3993 - DNA, 2523 bp, synthetic construct
  misc_feature 1..2523: note = Variant of DNA polymerase I from Thermus sp. strain 2.9
  source 1..2523: mol_type = other DNA
atgcaccatcatcatcatcatggcggtagcggcgtgttagaggtgttcgagcctaaaggtcgcgtgcttctggttgatggccatcatctcgcgtatcgtaacttctttgccctgaaaggattaaccaccagcagcggcgagccggtacagggtgtctacggctttgcaaagtcgctcctgaaagctctgaaagaagacggtgatgtggtgattgttgtctttgatgcgaaagcgccaagttttcgccacgaagcgtacgaagcttacaaagccgggcgtgctccaacgccggaagactttcctcgccaattggcgcttatgaaggaattagtggatttgcttggcctcgaacgcttggaagttcccggtttcgaggcagacgacgtattagcgactctcgcaaagaaagccgaacgtgagggctatgaagtccagatcttgacagcagatcgcgatcttttccagcttttatctccgcgcatctcggtgttacacccggatgggcatcgtatcaccccggaatggctctgggagaaatatggtttgcgtcccgaacaatgggtggattttcgcgccttagcaggcgatccgagcgacaatattccgggagttaaaggtatcggcgagaagacggcgctcaagctccttaaagaatgggggtcgttggagaacttgcttaagaatttagatcaggtcaaaccagagtcagtgcgtgagaagattcttgctcacctcgaagacctcaaattaagccgcgaattgtcccgtgtacgcaccgatttgccgctcgaagttgatttccaacgccgccgcgaacctgactgggagggtcttaaagcgtttttagagcgtcttgaatttggttcgctcttgcatgaattcggccttttagaaagcccgttaccagccgaagaagcaccttggccaccgcccgagggcgcgtttttaggttaccgtttgagtcgcccggaaccgatgtgggccgaattactggctcttgcagcgtctgcccagggacgtgtgtatcgcgcggaagaccctcatggtgcgctccgcggcctcttcgaagtccgtggactccttgccaaagacttagctgttgttgcattgcgcgaaggtcttgatttacctccgactgatgatccaatgcttcttgcgtacctcttggacccgtcaaacacgacgcctgaaggcgtagcccgtcgttacggcggcgagtggaccgaagatgcagcgaaacgcgcgttattggccgaacgtttgcacgccaatttattaggacgtttgcaaggcgaggagcgtctcctctggctttacgaagaagtggagaaaccattgagtcgcgtgctcgcgcatatggaagctaccggtgtcaaattagacgtggcgtatttggagaatctcagccttgaagttgctgcccacatgcgccgcttggaggaagaagtattccgtttagcaggccgttcctttcgccttaattctcgcgatcagttagaacgtgtgttgttcgatgaacttggtctccctcctatcggcaagacagagaagaccggtaaacgtagcacttcagcggcggttttagaagctcttcgcgaagtccatcccattgtggacaagatcttgcaataccgcgaactcgcgaaattgaaaggcacctatattgaccgtcttccggcattagtccacccgaaaacgggacgcctccatacccgcttcaaccaaacagccacggcgaccggtcgtttgtcctcctctgatccaaaccttcagaatattccagtacgtaccccattgggccagaagatccgccgtgcgtttgtagctgaggagggttggcgtttagtggccctcgattatagccaaattgaattacgtgtccttgcccatctttctggcgatgagaacctcatccgcgtgtttcaggaaggcaaagacattcacactcaaacggcaagctggatgtttggattatcagctgaagcgatcgatcctttgatgcgtcgtgcagcgaagaccatcaatttcggtgttctctacggtatgagtgcctttcgtttgtcgcaggaattaggcattccctatgaagaagctcaggcgttcattcagaaatactttcaaagctatcccaaagttaaagcatggatcgagaagactctcgaagaaggccgccaccgtggttacgtagagaccttatttggacgtcgccgctatgttcccgatttaaacgctcgcgtgaaaggcaagcgtgaagccgccgaacgcatggcgttcaacatgcctgtacagggcacggcagctgacctcatgaaacttgcaatggtgcgcctttttccacaattgcgtgaagttggtgcccgcatgctcttgcaggtccacgatgaactcttgttagaagcgccaaaagagcgtgcggaagaggtggcagccctcgcgaaagaagttatggaaggcgtgtggcccttagcggtgcctcttgaagtcgaagttggtattggcgaggattggctggctgccaaagga

SEQ ID NO: 3994 - protein, 841 aa, synthetic construct; identical to SEQ ID NO: 3452
  REGION 1..841: note = Variant of DNA polymerase I from Thermus sp. strain 2.9

SEQ ID NO: 3995 - DNA, 2523 bp, synthetic construct
  misc_feature 1..2523: note = Variant of DNA polymerase I from Thermus sp. strain 2.9
  source 1..2523: mol_type = other DNA
atgcaccatcatcatcatcatggcggtagcggcgtgttaccggtgttcgagcctaaaggtcgcgtgcttctggttgatggccatcatctcgcgtatcgtaacttctttgccctgaaaggattaaccaccagcagcggcgagccggtacagggtgtctacggctttgcaaagtcgctcctgaaagctctgaaagaagacggtgatgtggtgattgttgtctttgatgcgaaagcgccaagttttcgccacgaagcgtacgaagcttacaaagccgggcgtgctccaacgccggaagactttcctcgccaattggcgcttatgaaggaattagtggatttgcttggcctcgaacgcttggaagttcccggtttcgaggcagacgacgtattagcgactctcgcaaagaaagccgaacgtgagggctatgaagtccagatcttgacagcagatcgcgatcttttccagcttttatctccgcgcatctcggtgttacacccggaagggcatcgtatcaccccggaatggctctgggagaaatatggtttgcgtcccgaacaatgggtggattttcgcgccttagcaggcgatccgagcgacaatattccgggagttaaaggtatcggcgagaagacggcgctcaagctccttaaagaatgggggtcgttggagaacttgcttaagaatttagatcaggtcaaaccagagtcagtgcgtgagaagattcttgctcacctcgaagacctcaaattaagccgcgaattgtcccgtgtacgcaccgatttgccgctcgaagttgatttccaacgccgccgcgaacctgactgggagggtcttaaagcgtttttagagcgtcttgaatttggttcgctcttgcatgaattcggccttttagaaagcccgttaccagccgaagaagcaccttggccaccgcccgagggcgcgtttttaggttaccgtttgagtcgcccggaaccgatgtgggccgaattactggctcttgcagcgtctgcccagggacgtgtgtatcgcgcggaagaccctcatggtgcgctccgcggcctcttcgaagtccgtggactccttgccaaagacttagctgttgttgcattgcgcgaaggtcttgatttacctccgactgatgatccaatgcttcttgcgtacctcttggacccgtcaaacacgacgcccgaaggcgtagcccgtcgttacggcggcgagtggaccgaagatgcagcgaaacgcgcgttattggccgaacgtttgcacgccaatttattaggacgtttgcaaggcgaggaacgtctctggtggctttacgaagaagtggagaaaccattgagtcgcgtgctcgcgcatatggaagctaccggtgtcaaattagacgtggcgtatttggagaatctcagccttgaagttgctgcccacatgcgccgcttggaggaagaagtattccgtttagcaggccgttcctttcgccttaattctcgcgatcagttagaacgtgtgttgttcgatgaacttggtctccctcctatcggcaagacagagaagaccggtaaacgtagcacttcagcggcggttttagaagctcttcgcgaagtccatcccattgtggacaagatcttgcaataccgcgaactcgcgaaattgaaaggcacctatattgaccgtcttccggcattagtccacccgaaaacgggacgcctccatacccgcttcaaccaaacagccacggcgaccggtcgtttgtcctcctctgatccaaaccttcagaatattccagtacgtaccccattgggccagaagatccgccgtgcgtttgtagctgaggagggttggcgtttagtggccctcgattatagccaaattgaattacgtgtccttgcccatctttctggcgatgagaacctcatccgcgtgtttcaggaaggcaaagacattcacactcaaacggcaagctggatgtttggattatcagctgaagcgatcgatcctttgatgcgtcgtgcagcgaagaccatcaatttcggtgttctctacggtatgagtgcctttcgtttgtcgcaggaattaggcattccctatgaagaagctcaggcgttcattcagaaatactttcaaagctatcccaaagttaaagcatggatcgagaagactctcgaagaaggccgcacacgtggttacgtagagaccttatttggacgtcgccgctatgttcccgatttaaacgctcgcgtgaaaggcaagcgtgaagccgccgaacgcatggcgttcaacatgcctgtacagggcacggcagctgacctcatgaaacttgcaatggtgcgcctttttccacaattgcgtgaagttggtgcccgcatgctcttgcaggtccacgatgaactcttgttagaagcgccaaaagagcgtgcggaagaggtggcagccctcgcgaaagaagttatggaaggcgtgtggcccttagcggtgcctcttgaagtcgaagttggtattggcgaggattggctggctgccaaagga

SEQ ID NO: 3996 - protein, 841 aa, synthetic construct
  REGION 1..841: note = Variant of DNA polymerase I from Thermus sp. strain 2.9
MHHHHHHGGSGVLPVFEPKGRVLLVDGHHLAYRNFFALKGLTTSSGEPVQGVYGFAKSLLKALKEDGDVVIVVFDAKAPSFRHEAYEAYKAGRAPTPEDFPRQLALMKELVDLLGLERLEVPGFEADDVLATLAKKAEREGYEVQILTADRDLFQLLSPRISVLHPEGHRITPEWLWEKYGLRPEQWVDFRALAGDPSDNIPGVKGIGEKTALKLLKEWGSLENLLKNLDQVKPESVREKILAHLEDLKLSRELSRVRTDLPLEVDFQRRREPDWEGLKAFLERLEFGSLLHEFGLLESPLPAEEAPWPPPEGAFLGYRLSRPEPMWAELLALAASAQGRVYRAEDPHGALRGLFEVRGLLAKDLAVVALREGLDLPPTDDPMLLAYLLDPSNTTPEGVARRYGGEWTEDAAKRALLAERLHANLLGRLQGEERLWWLYEEVEKPLSRVLAHMEATGVKLDVAYLENLSLEVAAHMRRLEEEVFRLAGRSFRLNSRDQLERVLFDELGLPPIGKTEKTGKRSTSAAVLEALREVHPIVDKILQYRELAKLKGTYIDRLPALVHPKTGRLHTRFNQTATATGRLSSSDPNLQNIPVRTPLGQKIRRAFVAEEGWRLVALDYSQIELRVLAHLSGDENLIRVFQEGKDIHTQTASWMFGLSAEAIDPLMRRAAKTINFGVLYGMSAFRLSQELGIPYEEAQAFIQKYFQSYPKVKAWIEKTLEEGRTRGYVETLFGRRRYVPDLNARVKGKREAAERMAFNMPVQGTAADLMKLAMVRLFPQLREVGARMLLQVHDELLLEAPKERAEEVAALAKEVMEGVWPLAVPLEVEVGIGEDWLAAKG

SEQ ID NO: 3997 - DNA, 2523 bp, synthetic construct; identical to SEQ ID NO: 3547
  misc_feature 1..2523: note = Variant of DNA polymerase I from Thermus sp. strain 2.9
  source 1..2523: mol_type = other DNA

SEQ ID NO: 3998 - protein, 841 aa, synthetic construct; identical to SEQ ID NO: 3548
  REGION 1..841: note = Variant of DNA polymerase I from Thermus sp. strain 2.9

SEQ ID NO: 3999 - DNA, 2523 bp, synthetic construct; identical to SEQ ID NO: 3369
  misc_feature 1..2523: note = Variant of DNA polymerase I from Thermus sp. strain 2.9
  source 1..2523: mol_type = other DNA

SEQ ID NO: 4000 - protein, 841 aa, synthetic construct; identical to SEQ ID NO: 3370
  REGION 1..841: note = Variant of DNA polymerase I from Thermus sp. strain 2.9

SEQ ID NO: 4001 - DNA, 2523 bp, synthetic construct
  misc_feature 1..2523: note = Variant of DNA polymerase I from Thermus sp. strain 2.9
  source 1..2523: mol_type = other DNA
atgcaccatcatcatcatcatggcggtagcggcgtgttaccggtgttcgagcctaaaggtcgcgtgcttctggttgatggccatcatctcgcgtatcgtaacttctttgccctgaaaggattaaccaccagcagcggcgagccggtacagggtgtctacggctttgcaaagtcgctcctgaaagctctgaaagaagacggtgatgtggtgattgttgtctttgatgcgaaagcgccaagttttcgccacgaagcgtacgaagcttacaaagccgggcgtgctccaacgccggaagactttcctcgccaattggcgcttatgaaggaattagtggatttgcttggcctcgaacgcttggaagttcccggtttcgaggcagacgacgtattagcgactctcgcaaagaaagccgaacgtgagggctatgaagtccagatcttgacagcagatcgcgatcttttccagcttttatctccgcgcatctcggtgttacacccggaagggcatcgtatcaccccggaatggctctgggagaaatatggtttgcgtcccgaacaatgggtggattttcgcgccttagcaggcgatccgagcgacaatattccgggagttaaaggtatcggcgagaagacggcgctcaagctccttaaagaatgggggtcgttggagaacttgcttaagaatttagatcaggtcaaaccagagtcagtgcgtgagaagattcttgctcacctcgaagacctcaaattaagccgcgaattgtcccgtgtacgcaccgatttgccgctcgaagttgatttccaacgccgccgcgaacctgactgggagggtcttaaagcgtttttagagcgtcttgaatttggttcgctcttgcatgaattcggccttttagaaagcccgttaccagccgaagaagcaccttggccaccgcccgagggcgcgtttttaggttaccgtttgagtcgcccggaaccgatgtgggccgaattactggctcttgcagcgtctgcccagggacgtgtgtatcgcgcggaagaccctcatggtgcgctccgcggcctcttcgaagtccgtggactccttgccaaagacttagctgttgttgcattgcgcgaaggtcttgatttacctccgactgatgatccaatgcttcttgcgtacctcttggacccgtcaaacacgacgcccgaaggcgtagcccgtcgttacggcggcgagtggaccgaagatgcagcgaaacgcgcgttattggccgaacgtttgcacgccaatttattaggacgtttgcaaggcgaggaacgtctcctctggctttacgaagaagtggagaaaccattgagtcgcgtgctcgcgcatatggaagctaccggtgtcaaattagacgtggcgtatttggagaatctcagccttgaagttgctgcccacatgcgccgcttggaggaagaagtattccgtttagcaggccgttcctttcgccttaattctcgcgatcagttagaacgtgtgttgttcgatgaacttggtctccctcctatcggcaagacagagaagaccggtaaacgtagcacttcagcggcggttttagaagctcttcgcgaagtccatcccattgtggacaagatcttgcaataccgcgaaatggcgaaattgaaaggcacctatattgaccgtcttccggcattagtccacccgaaaacgggacgcctccatacccgcttcaaccaaacagccacggcgaccggtcgtttgtcctcctctgatccaaaccttcagaatattccagtacgtaccccattgggccagaagatccgccgtgcgtttgtagctgaggagggttggcgtttagtggccctcgattatagccaaattgaattacgtgtccttgcccatctttctggcgatgagaacctcatccgcgtgtttcaggaaggcaaagacattcacactcaaacggcaagctggatgtttggattatcagctgaagcgatcgatcctttgatgcgtcgtgcagcgaagacgatcaatttcggtgttctctacggtatgagtgcctttcgtttgtcgcaggaattaggcattccctatgaagaagctcaggcgttcattcagaaatactttcaaagctatcccaaagttaaagcatggatcgagaagactctcgaagaaggccgcacacgtggttacgtagagaccttatttggacgtcgccgctatgttcccgatttaaacgctcgcgtgaaaggcaagcgtgaagccgccgaacgcatggcgttcaacatgcctgtacagggcacggcagctgacctcatgaaacttgcaatggtgcgcctttttccacaattgcgtgaagttggtgcccgcatgctcttgcaggtccacgatgaactcttgttagaagcgccaaaagagcgtgcggaagaggtggcagccctcgcgaaagaagttatggaaggcgtgtggcccttagcggtgcctcttgaagtcgaagttggtattggcgaggattggctggctgccaaagga

SEQ ID NO: 4002 - protein, 841 aa, synthetic construct
  REGION 1..841: note = Variant of DNA polymerase I from Thermus sp. strain 2.9
MHHHHHHGGSGVLPVFEPKGRVLLVDGHHLAYRNFFALKGLTTSSGEPVQGVYGFAKSLLKALKEDGDVVIVVFDAKAPSFRHEAYEAYKAGRAPTPEDFPRQLALMKELVDLLGLERLEVPGFEADDVLATLAKKAEREGYEVQILTADRDLFQLLSPRISVLHPEGHRITPEWLWEKYGLRPEQWVDFRALAGDPSDNIPGVKGIGEKTALKLLKEWGSLENLLKNLDQVKPESVREKILAHLEDLKLSRELSRVRTDLPLEVDFQRRREPDWEGLKAFLERLEFGSLLHEFGLLESPLPAEEAPWPPPEGAFLGYRLSRPEPMWAELLALAASAQGRVYRAEDPHGALRGLFEVRGLLAKDLAVVALREGLDLPPTDDPMLLAYLLDPSNTTPEGVARRYGGEWTEDAAKRALLAERLHANLLGRLQGEERLLWLYEEVEKPLSRVLAHMEATGVKLDVAYLENLSLEVAAHMRRLEEEVFRLAGRSFRLNSRDQLERVLFDELGLPPIGKTEKTGKRSTSAAVLEALREVHPIVDKILQYREMAKLKGTYIDRLPALVHPKTGRLHTRFNQTATATGRLSSSDPNLQNIPVRTPLGQKIRRAFVAEEGWRLVALDYSQIELRVLAHLSGDENLIRVFQEGKDIHTQTASWMFGLSAEAIDPLMRRAAKTINFGVLYGMSAFRLSQELGIPYEEAQAFIQKYFQSYPKVKAWIEKTLEEGRTRGYVETLFGRRRYVPDLNARVKGKREAAERMAFNMPVQGTAADLMKLAMVRLFPQLREVGARMLLQVHDELLLEAPKERAEEVAALAKEVMEGVWPLAVPLEVEVGIGEDWLAAKG

SEQ ID NO: 4003 - DNA, 2523 bp, synthetic construct
  misc_feature 1..2523: note = Variant of DNA polymerase I from Thermus sp. strain 2.9
  source 1..2523: mol_type = other DNA
atgcaccatcatcatcatcatggcggtagcggcgtgttaccggtgttcgagcataaaggtcgcgtgcttctggttgatggccatcatctcgcgtatcgtaacttctttgccctgaaaggattaaccaccagcagcggcgagccggtacagggtgtctacggctttgcaaagtcgctcctgaaagctctgaaagaagacggtgatgtggtgattgttgtctttgatgcgaaagcgccaagttttcgccacgaagcgtacgaagcttacaaagccgggcgtgctccaacgccggaagactttcctcgccaattggcgcttatgaaggaattagtggatttgcttggcctcgaacgcttggaagttcccggtttcgaggcagacgacgtattagcgactctcgcaaagaaagccgaacgtgagggctatgaagtccagatcttgacagcagatcgcgatcttttccagcttttatctccgcgcatctcggtgttacacccggaagggcatcgtatcaccccggaatggctctgggagaaatatggtttgcgtcccgaacaatgggtggattttcgcgccttagcaggcgatccgagcgacaatattccgggagttaaaggtatcggcgagaagacggcgctcaagctccttaaagaatgggggtcgttggagaacttgcttaagaatttagatcaggtcaaaccagagtcagtgcgtgagaagattcttgctcacctcgaagacctcaaattaagccgcgaattgtcccgtgtacgcaccgatttgccgctcgaagttgatttccaacgccgccgcgaacctgactgggagggtcttaaagcgtttttagagcgtcttgaatttggttcgctcttgcatgaattcggccttttagaaagcccgttagtggccgaagaagcaccttggccaccgcccgagggcgcgtttttaggttaccgtttgagtcgcccggaaccgatgtgggccgaattactggctcttgcagcgtctgcccagggacgtgtgtatcgcgcggaagaccctcatggtgcgctccgcggcctcttcgaagtccgtggactccttgccaaagacttagctgttgttgcattgcgcgaaggtcttgatttacctccgactgatgatccaatgcttcttgcgtacctcttggacccgtcaaacacgacgcccgaaggcgtagcccgtcgttacggcggcgagtggaccgaagatgcagcgaaacgcgcgttattggccgaacgtttgcacgccaatttattaggacgtttgcaaggcgaggaacgtctcctctggctttacgaagaagtggagaaaccattgagtcgcgtgctcgcgcatatggaagctaccggtgtcaaattagacgtggcgtatttggagaatctcagccttgaagttgctgcccacatgcgccgcttggaggaagaagtattccgtttagcaggccgttcctttcgccttaattctcgcgatcagttagaacgtgtgttgttcgatgaacttggtctccctcctatcggcaagacagagaagaccggtaaacgtagcacttcagcggcggttttagaagctcttcgcgaagtccatcccattgtggacaagatcttgcaataccgcgaaatggcgaaattgaaaggcacctatattgaccgtcttccggcattagtccacccgaaaacgggacgcctccatacccgcttcaaccaaacagccacggcgaccggtcgtttgtcctcctctgatccaaaccttcagaatattccagtacgtaccccattgggccagaagatccgccgtgcgtttgtagctgaggagggttggcgtttagtggccctcgattatagccaaattgaattacgtgtccttgcccatctttctggcgatgagaacctcatccgcgtgtttcaggaaggcaaagacattcacactcaaacggcaagctggatgtttggattatcagctgaagcgatcgatcctttgatgcgtcgtgcagcgaagaccatcaatttcggtgttctctacggtatgagtgcctttcgtttgtcgcaggaattaggcattccctatgaagaagctcaggcgttcattcagaaatactttcaaagctatcccaaagttaaagcatggatcgagaagactctcgaagaaggccgcacacgtggttacgtagagaccttatttggacgtcgccgctatgttcccgatttaaacgctcgcgtgaaaggcaagcgtgaagccgccgaacgcatggcgttcaacatgcctgtacagggcacggcagctgacctcatgaaacttgcaatggtgcgcctttttccacaattgcgtgaagttggtgcccgcatgctcttgcaggtccacgatgaactcttgttagaagcgccaaaagagcgtgcggaagaggtggcagccctcgcgaaagaagttatggaaggcgtgtggcccttagcggtgcctcttgaagtcgaagttggtattggcgaggattggctggctgccaaagga

SEQ ID NO: 4004 - protein, 841 aa, synthetic construct
  REGION 1..841: note = Variant of DNA polymerase I from Thermus sp. strain 2.9
MHHHHHHGGSGVLPVFEHKGRVLLVDGHHLAYRNFFALKGLTTSSGEPVQGVYGFAKSLLKALKEDGDVVIVVFDAKAPSFRHEAYEAYKAGRAPTPEDFPRQLALMKELVDLLGLERLEVPGFEADDVLATLAKKAEREGYEVQILTADRDLFQLLSPRISVLHPEGHRITPEWLWEKYGLRPEQWVDFRALAGDPSDNIPGVKGIGEKTALKLLKEWGSLENLLKNLDQVKPESVREKILAHLEDLKLSRELSRVRTDLPLEVDFQRRREPDWEGLKAFLERLEFGSLLHEFGLLESPLVAEEAPWPPPEGAFLGYRLSRPEPMWAELLALAASAQGRVYRAEDPHGALRGLFEVRGLLAKDLAVVALREGLDLPPTDDPMLLAYLLDPSNTTPEGVARRYGGEWTEDAAKRALLAERLHANLLGRLQGEERLLWLYEEVEKPLSRVLAHMEATGVKLDVAYLENLSLEVAAHMRRLEEEVFRLAGRSFRLNSRDQLERVLFDELGLPPIGKTEKTGKRSTSAAVLEALREVHPIVDKILQYREMAKLKGTYIDRLPALVHPKTGRLHTRFNQTATATGRLSSSDPNLQNIPVRTPLGQKIRRAFVAEEGWRLVALDYSQIELRVLAHLSGDENLIRVFQEGKDIHTQTASWMFGLSAEAIDPLMRRAAKTINFGVLYGMSAFRLSQELGIPYEEAQAFIQKYFQSYPKVKAWIEKTLEEGRTRGYVETLFGRRRYVPDLNARVKGKREAAERMAFNMPVQGTAADLMKLAMVRLFPQLREVGARMLLQVHDELLLEAPKERAEEVAALAKEVMEGVWPLAVPLEVEVGIGEDWLAAKG

SEQ ID NO: 4005 - DNA, 2523 bp, synthetic construct
  misc_feature 1..2523: note = Variant of DNA polymerase I from Thermus sp. strain 2.9
  source 1..2523: mol_type = other DNA
atgcaccatcatcatcatcatggcggtagcggcgtgttaccggtgttcgagcctaaaggtcgcgtgcttctggttgatggccatcatctcgcgtatcgtaacttctttgccctgaaaggattaaccaccagcagcggcgagccggtacagggtgtctacggctttgcaaagtcgctcctgaaagctctgaaagaagacggtgatgtggtgattgttgtctttgatgcgaaagcgccaagttttcgccacgaagcgtacgaagcttacaaagccgggcgtgctccaacgccggaagactttcctcgccaattggcgcttatgaaggaattagtggatttgcttggcctcgaacgcttggaagttcccggtttcgaggcagacgacgtattagcgactctcgcaaagaaagccgaacgtgagggctatgaagtccagatcttgacagcagatcgcgatcttttccagcttttatctccgcgcatctcggtgttacacccggaagggcatcgtatcaccccggaatggctctgggagaaatatggtttgcgtcccgaacaatgggtggattttcgcgccttagcaggcgatccgagcgacaatattccgggagttaaaggtatcggcgagaagacggcgctcaagctccttaaagaatgggggtcgttggagaacttgcttaagaatttagatcaggtcaaaccagagtcagtgcgtgagaagattcttgctcacctcgaagacctcaaattaagccgcgaattgtcccgtgtacgcaccgatttgccgctcgaagttgatttccaacgccgccgcgaacctgactgggagggtcttaaagcgtttttagagcgtcttgaatttggttcgctcttgcatgaattcggccttttagaaccgccgttaccagccgaagaagcaccttggccaccgcccgagggcgcgtttttaggttaccgtttgagtcgcccggaaccgatgtgggccgaattactggctcttgcagcgtctgcccagggacgtgtgtatcgcgcggaagaccctcatggtgcgctccgcggcctcttcgaagtccgtggactccttgccaaagacttagctgttgttgcattgcgcgaaggtcttgatttacctccgactgatgatccaatgcttcttgcgtacctcttggacccgtcaaacacgacgcccgaaggcgtagcccgtcgttacggcggcgagtggaccgaagatgcagcgaaacgcgcgttattggccgaacgtttgcacgccaatttattaggacgtttgcaaggcgaggaacgtctcctctggctttacgaagaagtggagaaaccattgagtcgcgtgctcgcgcatatggaagctaccggtgtcaaattagacgtggcgtatttggagaatctcagccttgaagttgctgcccacatgcgccgcttggaggaagaagtattccgtttagcaggccgttcctttcgccttaattctcgcgatcagttagaacgtgtgttgttcgatgaacttggtctccctcctatcggcaagacagagaagaccggtaaacgtagcacttcagcggcggttttagaagctcttcgcgaagtccatcccattgtggacaagatcttgcaataccgcgaactcgcgaaattgaaaggcacctatattgaccgtcttccggcattagtccacccgaaaacgggacgcctccatacccgcttcaaccaaacagccacggcgaccggtcgtttgtcctcctctgatccaaaccttcagaatattccagtacgtaccccattgggccagaagatccgccgtgcgtttgtagctgaggagggttggcgtttagtggccctcgattatagccaaattgaattacgtgtccttgcccatctttctggcgatgagaacctcatccgcgtgtttcaggaaggcaaagacattcacactcaaacggcaagctggatgtttggattatcagctgaagcgatcgatcctttgatgcgtcgtgcagcgaagaccatcaatttcggtgttctctacggtatgagtgcctttcgtttgtcgcaggaattaggcattccctatgaagaagctcaggcgttcattcagaaatactttcaaagctatcccaaagttaaagcatggatcgagaagactctcgaagaaggccgcacacgtggttacgtagagaccttatttggacgtcgccgctatgttcccgatttaaacgctcgcgtgaaaggcaagcgtgaagccgccgaacgcatggcgttcaacatgcctgtacagggcacggcagctgacctcatgaaacttgcaatggtgcgcctttttccacaattgcgtgaagttggtgcccgcatgctcttgcaggtccacgatgaactcttgttagaagcgccaaaagagcgtgcggaagaggtggcagccctcgcgaaagaagttatggaaggcgtgtggcccttagcggtgcctcttgaagtcgaagttggtattggcgaggattggctggctgccaaagga

SEQ ID NO: 4006 - protein, 841 aa, synthetic construct
  REGION 1..841: note = Variant of DNA polymerase I from Thermus sp. strain 2.9
MHHHHHHGGSGVLPVFEPKGRVLLVDGHHLAYRNFFALKGLTTSSGEPVQGVYGFAKSLLKALKEDGDVVIVVFDAKAPSFRHEAYEAYKAGRAPTPEDFPRQLALMKELVDLLGLERLEVPGFEADDVLATLAKKAEREGYEVQILTADRDLFQLLSPRISVLHPEGHRITPEWLWEKYGLRPEQWVDFRALAGDPSDNIPGVKGIGEKTALKLLKEWGSLENLLKNLDQVKPESVREKILAHLEDLKLSRELSRVRTDLPLEVDFQRRREPDWEGLKAFLERLEFGSLLHEFGLLEPPLPAEEAPWPPPEGAFLGYRLSRPEPMWAELLALAASAQGRVYRAEDPHGALRGLFEVRGLLAKDLAVVALREGLDLPPTDDPMLLAYLLDPSNTTPEGVARRYGGEWTEDAAKRALLAERLHANLLGRLQGEERLLWLYEEVEKPLSRVLAHMEATGVKLDVAYLENLSLEVAAHMRRLEEEVFRLAGRSFRLNSRDQLERVLFDELGLPPIGKTEKTGKRSTSAAVLEALREVHPIVDKILQYRELAKLKGTYIDRLPALVHPKTGRLHTRFNQTATATGRLSSSDPNLQNIPVRTPLGQKIRRAFVAEEGWRLVALDYSQIELRVLAHLSGDENLIRVFQEGKDIHTQTASWMFGLSAEAIDPLMRRAAKTINFGVLYGMSAFRLSQELGIPYEEAQAFIQKYFQSYPKVKAWIEKTLEEGRTRGYVETLFGRRRYVPDLNARVKGKREAAERMAFNMPVQGTAADLMKLAMVRLFPQLREVGARMLLQVHDELLLEAPKERAEEVAALAKEVMEGVWPLAVPLEVEVGIGEDWLAAKG

SEQ ID NO: 4007 - DNA, 2523 bp, synthetic construct
  misc_feature 1..2523: note = Variant of DNA polymerase I from Thermus sp. strain 2.9
  source 1..2523: mol_type = other DNA
atgcaccatcatcatcatcatggcggtagcggcgtgttacctgtgttcgagcctaaaggtcgcgtgcttctggttgatggccatcatctcgcgtatcgtaacttctttgccctgaaaggattaaccaccagcagcggcgagccggtacagggtgtctacggctttgcaaagtcgctcctgaaagctctgaaagaagacggtgatgtggtgattgttgtctttgatgcgaaagcgccaagttttcgccacgaagcgtacgaagcttacaaagccgggcgtgctccaacgccggaagactttcctcgccaattggcgcttatgaaggaattagtggatttgcttggcctcgaacgcttggaagttcccggtttcgaggcagacgacgtattagcgactctcgcaaagaaagccgaacgtgagggctatgaagtccagatcttgacagcagatcgcgatcttttccagcttttatctccgcgcatctcggtgttacacccggaagggcatcgtatcaccccggaatggctctgggagaaatatggtttgcgtcccgaacaatgggtggattttcgcgccttagcaggcgatccgagcgacaatattccgggagttaaaggtatcggcgagaagacggcgctcaagctccttaaagaatgggggtcgttggagaacttgcttaagaatttagatcaggtcaaaccagagtcagtgcgtgagaagattcttgctcacctcgaagacctcaaattaagccgcgaattgtcccgtgtacgcaccgatttgccgctcgaagttgatttccaacgccgccgcgaacctgactgggagggtcttaaagcgtttttagagcgtcttgaatttggttcgctcttgcatgaattcggccttttagaaagcccgttaccagccgaagaagcaccttggccaccgcccgagggcgcgtttttaggttaccgtttgagtcgcccggaaccgatgtgggccgaattactggctcttgcagcgtctgcccagggacgtgtgtatcgcgcggaagaccctcatggtgcgctccgcggcctcttcgaagtccgtggactccttgccaaagacttagctgttgttgcattgcgcgaaggtcttgatttacctccgactgatgatccaatgcttcttgcgtacctcttggacccgtcaaacacgacgcctgaaggcgtagcccgtcgttacggcggcgagtggaccgaagatgcagcgaaacgcgcgttattggccgaacgtttgcacgccaatttattaggacgtttgcaaggcgaggagcgtctcctctggctttacgaagaagtggagaaaccattgagtcgcgtgctcgcgcatatggaagctaccggtgtcaaattagacgtggcgtatttggagaatctcagccttgaagttgctgcccacatgcgccgcttggaggaagaagtattccgtttagcaggccgttcctttcgccttaattctcgcgatcagttagaacgtgtgttgttcgatgaacttggtctccctcctatcggcaagacagagaagaccggtaaacgtagcacttcagcggcggttttagaagctcttcgcgaagtccatcccattgtggacaagatcttgcaataccgcgaactcgcgaaattgaaaggcacctatattgaccgtcttccggcattagtccacccgaaaacgggacgcctccatacccgcttcaaccaaacagccacggcgaccggtcgtttgtcctcctctgatccaaaccttcagaatattccagtacgtaccaaattgggccagaagatccgccgtgcgtttgtagctgaggagggttggcgtttagtggccctcgattatagccaaattgaattacgtgtccttgcccatctttctggcgatgagaacctcatccgcgtgtttgaggaaggcaaagacattcacactcaaacggcaagctggatgtttggattatcagctgaagcgatcgatcctttgatgcgtcgtgcagcgaagaccatcaatttcggtgttctctacggtatgagtgcctttcgtttgtcgcaggaattaggcattcccaaagaagaagctcaggcgttcattcagaaatactttcaaagctatcccaaagttaaagcatggatcgagaagactctcgaagaaggccgcacccgtggttacgtagagaccttatttggacgtcgccgctatgttcccgatttaaacgctcgcgtgaaaggcaagcgtgaagccgccgaacgcatggcgttcaacatgcctgtacagggcacggcagctgacctcatgaaacttgcaatggtgcgcctttttccacaattgcgtgaagttggtgcccgcatgctcttgcaggtccacgatgaactcttgttagaagcgccaaaagagcgtgcggaagaggtggcagccctcgcgaaagaagttatggaaggcgtgtggcccttagcggtgcctcttgaagtcgaagttggtattggcgaggattggctggctgccaaagga

SEQ ID NO: 4008 - protein, 841 aa, synthetic construct
  REGION 1..841: note = Variant of DNA polymerase I from Thermus sp. strain 2.9
MHHHHHHGGSGVLPVFEPKGRVLLVDGHHLAYRNFFALKGLTTSSGEPVQGVYGFAKSLLKALKEDGDVVIVVFDAKAPSFRHEAYEAYKAGRAPTPEDFPRQLALMKELVDLLGLERLEVPGFEADDVLATLAKKAEREGYEVQILTADRDLFQLLSPRISVLHPEGHRITPEWLWEKYGLRPEQWVDFRALAGDPSDNIPGVKGIGEKTALKLLKEWGSLENLLKNLDQVKPESVREKILAHLEDLKLSRELSRVRTDLPLEVDFQRRREPDWEGLKAFLERLEFGSLLHEFGLLESPLPAEEAPWPPPEGAFLGYRLSRPEPMWAELLALAASAQGRVYRAEDPHGALRGLFEVRGLLAKDLAVVALREGLDLPPTDDPMLLAYLLDPSNTTPEGVARRYGGEWTEDAAKRALLAERLHANLLGRLQGEERLLWLYEEVEKPLSRVLAHMEATGVKLDVAYLENLSLEVAAHMRRLEEEVFRLAGRSFRLNSRDQLERVLFDELGLPPIGKTEKTGKRSTSAAVLEALREVHPIVDKILQYRELAKLKGTYIDRLPALVHPKTGRLHTRFNQTATATGRLSSSDPNLQNIPVRTKLGQKIRRAFVAEEGWRLVALDYSQIELRVLAHLSGDENLIRVFEEGKDIHTQTASWMFGLSAEAIDPLMRRAAKTINFGVLYGMSAFRLSQELGIPKEEAQAFIQKYFQSYPKVKAWIEKTLEEGRTRGYVETLFGRRRYVPDLNARVKGKREAAERMAFNMPVQGTAADLMKLAMVRLFPQLREVGARMLLQVHDELLLEAPKERAEEVAALAKEVMEGVWPLAVPLEVEVGIGEDWLAAKG

SEQ ID NO: 4009 - DNA, 2523 bp, synthetic construct
  misc_feature 1..2523: note = Variant of DNA polymerase I from Thermus sp. strain 2.9
  source 1..2523: mol_type = other DNA
atgcaccatcatcatcatcatggcggtagcggcgtgttaccggtgttcgagcctaaaggtcgcgtgcttctggttgatggccatcatctcgcgtatcgtaacttctttgccctgaaaggattaaccaccagcagcggcgagccggtacagggtgtctacggctttgcaaagtcgctcctgaaagctctgaaagaagacggtgatgtggtgattgttgtctttgatgcgaaagcgccaagttttcgccacgaagcgtacgaagcttacaaagccgggcgtgctccaacgccggaagactttcctcgccaattggcgcttatgaaggaattagtggatttgcttggcctcgaacgcttggaagttcccggtttcgaggcagacgacgtattagcgactctcgcaaagaaagccgaacgtgagggctatgaagtccagatcttgacagcagatcgcgatcttttccagcttttatctccgcgcatctcggtgttacacccggaagggcatcgtatcaccccggaatggctctgggagaaatatggtttgcgtcccgaacaatgggtggattttcgcgccttagcaggcgatccgagcgacaatattccgggagttaaaggtatcggcgagaagacggcgctcaagctccttaaagaatgggggtcgttggagaacttgcttaagaatttagatcaggtcaaaccagagtcagtgcgtgagaagattcttgctcacctcgaagacctcaaattaagccgcgaattgtcccgtgtacgcaccgatttgccgctcgaagttgatttccaacgccgccgcgaacctgactgggagggtcttaaagcgtttttagagcgtcttgaatttggttcgctcttgcatgaattcggccttttagaaagcccgttaccagccgaagaagcaccttggccaccgcccgagggcgcgtttttaggttaccgtttgagtcgcccggaaccgatgtgggccgaattactggctcttgcagcgtctgcccagggacgtgtgtatcgcgcggaagaccctcatggtgcgctccgcggcctcttcgaagtccgtggactccttgccaaagacttagctgttgttgcattgcgcgaaggtcttgatttacctccgactgatgatccaatgcttcttgcgtacctcttggacccgtcaaacacgacgcccgaaggcgtagcccgtcgttacggcggcgagtggaccgaagatgcagcgaaacgcgcgttattggccgaacgtttgcacgccaatttattaggacgtttgcaaggcgaggaacgtctcctctggctttacgaagaagtggagaaaccattgagtcgcgtgctcgcgcatatggaagctaccggtgtcaaattagacgtggcgtatttggagaatctcagccttgaagttgctgcccacatgcgccgcttggaggaagaagtattccgtttagcaggccgttcctttcgccttaattctcgcgatcagttagaacgtgtgttgttcgatgaacttggtctccctcctatcggcaagacagagaagaccggtaaacgtagcacttcagcggcggttttagaagctcttcgcgaagtccatcccattgtggacaagatcttgcaataccgcgaactcgcgaaattgaaaggcacctatattgaccgtcttccggcattagtccacccgaaaacgggacgcctccatacccgcttcaaccaaacagccacggcgaccggtcgtttgtcctcctctgatccaaaccttcagaatattccagtacgtaccccattgggccagaagatccgccgtgcgtttgtagctgaggagggttggcgtttagtggccctcgattatagccaaattgaattacgtgtccttgcccatctttctggcgatgagaacctcatccgcgtgtttcaggaaggcaaagacattcacactcaaacggcaagctggatgtttggattatcagctgaagcgatcgatcctttgatgcgtcgtgcagcgaagaagatcaatttcggtgttctctacggtatgagtgcctttcgtttgtcgcaggaattaggcattccctatgaagaagctcaggcgttcattcagaaatactttcaaagctatcccaaagttaaagcatggatcgagaagactctcgaagaaggccgcacacgtggttacgtagagaccttatttggacgtcgccgctatgttcccgatttaaacgctcgcgtgaaaggcaagcgtgaagccgccgaacgcatggcgttcaacatgcctgtacagggcacggcagctgacctcatgaaacttgcaatggtgcgcctttttccacaattgcgtgaagttggtgcccgcatgctcttgcaggtccacgatgaactcttgttagaagcgccaaaagagcgtgcggaagaggtggcagccctcgcgaaagaagttatggaaggcgtgtggcccttagcggtgcctcttgaagtcgaagttggtattggcgaggattggctggctgccaaagga

SEQ ID NO: 4010 - protein, 841 aa, synthetic construct
  REGION 1..841: note = Variant of DNA polymerase I from Thermus sp. strain 2.9
MHHHHHHGGSGVLPVFEPKGRVLLVDGHHLAYRNFFALKGLTTSSGEPVQGVYGFAKSLLKALKEDGDVVIVVFDAKAPSFRHEAYEAYKAGRAPTPEDFPRQLALMKELVDLLGLERLEVPGFEADDVLATLAKKAEREGYEVQILTADRDLFQLLSPRISVLHPEGHRITPEWLWEKYGLRPEQWVDFRALAGDPSDNIPGVKGIGEKTALKLLKEWGSLENLLKNLDQVKPESVREKILAHLEDLKLSRELSRVRTDLPLEVDFQRRREPDWEGLKAFLERLEFGSLLHEFGLLESPLPAEEAPWPPPEGAFLGYRLSRPEPMWAELLALAASAQGRVYRAEDPHGALRGLFEVRGLLAKDLAVVALREGLDLPPTDDPMLLAYLLDPSNTTPEGVARRYGGEWTEDAAKRALLAERLHANLLGRLQGEERLLWLYEEVEKPLSRVLAHMEATGVKLDVAYLENLSLEVAAHMRRLEEEVFRLAGRSFRLNSRDQLERVLFDELGLPPIGKTEKTGKRSTSAAVLEALREVHPIVDKILQYRELAKLKGTYIDRLPALVHPKTGRLHTRFNQTATATGRLSSSDPNLQNIPVRTPLGQKIRRAFVAEEGWRLVALDYSQIELRVLAHLSGDENLIRVFQEGKDIHTQTASWMFGLSAEAIDPLMRRAAKKINFGVLYGMSAFRLSQELGIPYEEAQAFIQKYFQSYPKVKAWIEKTLEEGRTRGYVETLFGRRRYVPDLNARVKGKREAAERMAFNMPVQGTAADLMKLAMVRLFPQLREVGARMLLQVHDELLLEAPKERAEEVAALAKEVMEGVWPLAVPLEVEVGIGEDWLAAKG

SEQ ID NO: 4011 - DNA, 2523 bp, synthetic construct
  misc_feature 1..2523: note = Variant of DNA polymerase I from Thermus sp. strain 2.9
  source 1..2523: mol_type = other DNA
atgcaccatcatcatcatcatggcggtagcggcgtgttacctgtgttcgagcctaaaggtcgcgtgcttctggttgatggccatcatctcgcgtatcgtaacttctttgccctgaaaggattaaccaccagcagcggcgagccggtacagggtgtctacggctttgcaaagtcgctcctgaaagctctgaaagaagacggtgatgtggtgattgttgtctttgatgcgaaagcgccaagttttcgccacgaagcgtacgaagcttacaaagccgggcgtgctcctacgccggaagactttcctcgccaattggcgcttatgaaggaattagtggatttgcttggcctcgaacgcttggaagttcccggtttcgaggcagacgacgtattagcgactctcgcaaagaaagccgaacgtgagggctatgaagtccagatcttgacagcagatcgcgatcttttccagcttttatctccgcgcatctcggtgttacacccggaagggcatcgtatcaccccggaatggctctgggagaaatatggtttgcgtcccgaacaatgggtggattttcgcgccttagcaggcgatccgagcgacaatattccgggagttaaaggtatcggcgagaagacggcgctcaagctccttaaagaatgggggtcgttggagaacttgcttaagaatttagatcaggtcaaaccagagtcagtgcgtgagaagattcttgctcacctcgaagacctcaaattaagccgcgaattgtcccgtgtacgcaccgatttgccgctcgaagttgatttccaacgccgccgcgaacctgactgggagggtcttaaagcgtttttagagcgtcttgaatttggttcgctcttgcatgaattcggccttttagaaagcccgttaccagccgaagaagcaccttggccaccgcccgagggcgcgtttttaggttaccgtttgagtcgcccggaaccgatgtgggccgaattactggctcttgcagcgtctgcccagggacgtgtgtatcgcgcggaagaccctcatggtgcgctccgcggcctcttcgaagtccgtggactccttgccaaagacttagctgttgttgcattgcgcgaaggtcttgatttacctccgactgatgatccaatgcttcttgcgtacctcttggacccgtcaaacacgacgcccgaaggcgtagcccgtcgttacggcggcgagtggaccgaagatgcagcgaaacgcgcgttattggccgaacgtttgcacgccaatttattaggacgtttgcaaggcgaggaacgtctcctctggctttacgaagaagtggagaaaccattgagtcgcgtgctcgcgcatatggaagctaccggtgtcaaattagacgtggcgtatttggagaatctcagccttgaagttgctgcccacatgcgccgcttggaggaagaagtattccgtttagcaggccgttcctttcgccttaattctcgcgatcagttagaacgtgtgttgttcgatgaacttggtctccctcctatcggcaagacagagaagaccggtaaacgtagcacttcagcggcggttttagaagctcttcgcgaagtccatcccattgtggacaagatcttgcaataccgcgaactcgcgaaattgaaaggcacctatattgaccgtcttccggcattagtccacccgaaaacgggacgcctccatacccgcttcaaccaaacagccacggcgaccggtcgtttgtcctcctctgatccaaaccttcagaatattccagtacgtaccaaattgggccagaagatccgccgtgcgtttgtagctgaggagggttggcgtttagtggccctcgattatagccaaattgaattacgtgtccttgcccatctttctggcgatgagaacctcatccgcgtgtttcaggaaggcaaagacattcacactcaaacggcaagctggatgtttggattatcagctgaagcgatcgatcctttgatgcgtcgtgcagcgaagaccatcaatttcggtgttctctacggtatgagtgcctttcgtttgtcgcaggaattaggcattccctacgaagaagctcaggcgttcattcagaaatactttcaaagctatcccaaagttaaagcatggatcgagaagactctcgaagaaggccgcacacgtggttacgtagagaccttatttggacgtcgccgctatgttcccgatttaaacgctcgcgtgaaaggcaagcgtgaagccgccgaacgcatggcgttcaacatgcctgtacagggcacggcagctgacctcatgaaacttgcaatggtgcgcctttttccacaattgcgtgaagttggtgcccgcatgctcttgcaggtccacgatgaactcttgttagaagcgccaaaagagcgtgcggaagaggtggcagccctcgcgaaagaagttatggaaggcgtgtggcccttagcggtgcctcttgaagtcgaagttggtattggcgaggattggctggctgccaaagga

SEQ ID NO: 4012 - protein, 841 aa, synthetic construct; identical to SEQ ID NO: 3912
  REGION 1..841: note = Variant of DNA polymerase I from Thermus sp. strain 2.9

SEQ ID NO: 4013 - DNA, 2523 bp, synthetic construct
  misc_feature 1..2523: note = Variant of DNA polymerase I from Thermus sp. strain 2.9
  source 1..2523: mol_type = other DNA
atgcaccatcatcatcatcatggcggtagcggcgtgttaccggtgttcgagcctaaaggtcgcgtgcttctggttgatggccatcatctcgcgtatcgtaacttctttgccctgaaaggattaaccaccagcagcggcgagccggtacagggtgtctacggctttgcaaagtcgctcctgaaagctctgaaagaagacggtgatgtggtgattgttgtctttgatgcgaaagcgccaagttttcgccacgaagcgtacgaagcttacaaagccgggcgtgctccaacgccggaagactttcctcgccaattggcgcttatgaaggaattagtggatttgcttggcctcgaacgcttggaagttcccggtttcgaggcagacgacgtattagcgactctcgcaaagaaagccgaacgtgagggctatgaagtccagatcttgacagcagatcgcgatcttttccagcttttatctccgcgcatctcggtgttacacccggaagggcatcgtatcaccccggaatggctctgggagaaatatggtttgcgtcccgaacaatgggtggattttcgcgccttagcaggcgatccgagcgacaatattccgggagttaaaggtatcggcgagaagacggcgctcaagctccttaaagaatgggggtcgttggagaacttgcttaagaatttagatcaggtcaaaccagagtcagtgcgtgagaagattcttgctcacctcgaagacctcaaattaagccgcgaattgtcccgtgtacgcaccgatttgccgctcgaagttgatttccaacgccgccgcgaacctgactgggagggtcttaaagcgtttttagagcgtcttgaatttggttcgctcttgcatgaattcggccttttagaaagcccgttaccagccgaagaagcaccttggccaccgcccgagggcgcgtttttaggttaccgtttgagtcgcccggaaccgatgtgggccgaattactggctcttgcagcgtctgcccagggacgtgtgtatcgcgcggaagaccctcatggtgcgctccgcggcctcttcgaagtccgtggactccttgccaaagacttagctgttgttgcattgcgcgaaggtcttgatttacctccgactgatgatccaatgcttcttgcgtacctcttggacccgtcaaacggtacgcccgaaggcgtagcccgtcgttacggcggcgagtggaccgaagatgcagcgaaacgcgcgttattggccgaacgtttgcacgccaatttattaggacgtttgcaaggcgaggaacgtctcctctggctttacgaagaagtggagaaaccattgagtcgcgtgctcgcgcatatggaagctaccggtgtcaaattagacgtggcgtatttggagaatctcagccttgaagttgctgcccacatgcgccgcttggaggaagaagtattccgtttagcaggccgttcctttcgccttaattctcgcgatcagttagaacgtgtgttgttcgatgaacttggtctccctcctatcggcaagacagagaagaccggtaaacgtagcacttcagcggcggttttagaagctcttcgcgaagtccatcccattgtggacaagatcttgcaataccgcgaactcgcgaaattgaaaggcacctatattgaccgtcttccggcattagtccacccgaaaacgggacgcctccatacccgcttcaaccaaacagccacggcgaccggtcgtttgtcctcctctgatccaaaccttcagaatattccagtacgtaccccattgggccagaagatccgccgtgcgtttgtagctgaggagggttggcgtttagtggccctcgattatagccaaattgaattacgtgtccttgcccatctttctggcgatgagaacctcatccgcgtgtttcaggaaggcaaagacattcacactcaaacggcaagctggatgtttggattatcagctgaagcgatcgatcctttgatgcgtcgtgcagcgaagaccatcaatttcggtgttctctacggtatgagtgcctttcgtttgtcgcaggaattaggcattccctatgaagaagctcaggcgttcattcagaaatactttcaaagctatcccaaagttaaagcatggatcgagaagactctcgaagaaggccgcacacgtggttacgtagagaccttatttggacgtcgccgctatgttcccgatttaaacgctcgcgtgaaaggcaagcgtgaagccgccgaacgcatggcgttcaacatgcctgtacagggcacggcagctgacctcatgaaacttgcaatggtgcgcctttttccacaattgcgtgaagttggtgcccgcatgctcttgcaggtccacgatgaactcttgttagaagcgccaaaagagcgtgcggaagaggtggcagccctcgcgaaagaagttatggaaggcgtgtggcccttagcggtgcctcttgaagtcgaagttggtattggcgaggattggctggctgccaaagga

SEQ ID NO: 4014 - protein, 841 aa, synthetic construct; identical to SEQ ID NO: 3632
  REGION 1..841: note = Variant of DNA polymerase I from Thermus sp. strain 2.9

SEQ ID NO: 4015 - DNA, 2523 bp, synthetic construct
  misc_feature 1..2523: note = Variant of DNA polymerase I from Thermus sp. strain 2.9
  source 1..2523: mol_type = other DNA
atgcaccatcatcatcatcatggcggtagcggcgtgttaccggtgttcgagcctaaaggtcgcgtgcttctggttgatggccatcatctcgcgtatcgtaacttctttgccctgaaaggattaaccaccagcagcggcgagccggtacagggtgtctacggctttgcaaagtcgctcctgaaagctctgaaagaagacggtgatgtggtgattgttgtctttgatgcgaaagcgccaagttttcgccacgaagcgtacgaagcttacaaagccgggcgtgctccaacgccggaagactttcctcgccaattggcgcttatgaaggaattagtggatttgcttggcctcgaacgcttggaagttcccggtttcgaggcagacgacgtattagcgactctcgcaaagaaagccgaacgtgagggctatgaagtccagatcttgacagcagatcgcgatcttttccagcttttatctccgcgcatctcggtgttacacccggaagggcatcgtatcaccccggaatggctctgggagaaatatggtttgcgtcccgaacaatgggtggattttcgcgccttagcaggcgatccgagcgacaatattccgggagttaaaggtatcggcgagaagacggcgctcaagctccttaaagaatgggggtcgttggagaacttgcttaagaatttagatcaggtcaaaccagagtcagtgcgtgagaagattcttgctcacctcgaagacctcaaattaagccgcgaattgtcccgtgtacgcaccgatttgccgctcgaagttgatttccaacgccgccgcgaacctgactgggagggtcttaaagcgtttttagagcgtcttgaatttggttcgctcttgcatgaattcggccttttagaaagcccgttaccagccgaagaagcaccttggccaccgcccgagggcgcgtttttaggttaccgtttgagtcgcccggaaccgatgtgggccgaattactggctcttgcagcgtctgcccagggacgtgtgtatcgcgcggaagaccctcatggtgcgctccgcggcctcttcgaagtccgtggactccttgccaaagacttagctgttgttgcattgcgcgaaggtcttgatttacctccgactgatgatccaatgcttcttgcgtacctcttggacccgtcaaacacgacgcccgaaggcgtagcccgtcgttacggcggcgagtggaccgaagatgcagcgaaacgcgcgttattggccgaacgtttgcacgccaatttattaggacgtttgcaaggcgaggaacgtctcctctggctttacgaagaagtggagaaaccattgagtcgcgtgctcgcgcatatggaagctaccggtgtcaaattagacgtggcgtatttggagaatctcagccttgaagttgctgcccacatgcgccgcttggaggaagaagtattccgtttagcaggccgttcctttcgccttaattctcgcgatcagttagaacgtgtgttgttcgatgaacttggtctccctcctatcggcaagacagagaagaccggtaaacgtagcacttcagcggcggttttagaagctcttcgcgaagtccatcccattgtggacaagatcttgcaataccgcgaactcgcgaaattgaaaggcacctatattgaccgtcttccggcattagtccacccgaaaacgggacgcctccatacccgcttcaaccaaacagccacggcgaccggtcgtttgtcctcctctgatccaaaccttcagaatattccagtacgtaccccattgggccagaagatccgccgtgcgtttgtagctgaggagggttggcgtttagtggccctcgattatagccaaattgaattacgtgtccttgcccatctttctggcgatgagaacctcatccgcgtgtttcaggaaggcaaagacattcacactcaaacggcaagctggatgtttggattatcagctgaagcgatcgatcctttgatgcgtcgtgcagcgaagaccatcaatttcggtgttctctacggtatgagtgcctttcgtttgtcgcagagtttaggcattccctatgaagaagctcaggcgttcattcagaaatactttcaaagctatcccaaagttaaagcatggatcgagaagactctcgaagaaggccgcacacgtggttacgtagagaccttatttggacgtcgccgctatgttcccgatttaaacgctcgcgtgaaaggcaagcgtgaagccgccgaacgcatggcgttcaacatgcctgtacagggcacggcagctgacctcatgaaacttgcaatggtgcgcctttttccacaattgcgtgaagttggtgcccgcatgctcttgcaggtccacgatgaactcttgttagaagcgccaaaagagcgtgcggaagaggtggcagccctcgcgaaagaagttatggaaggcgtgtggcccttagcggtgcctcttgaagtcgaagttggtattggcgaggattggctggctgccaaagga

SEQ ID NO: 4016 - protein, 841 aa, synthetic construct
  REGION 1..841: note = Variant of DNA polymerase I from Thermus sp. strain 2.9
MHHHHHHGGSGVLPVFEPKGRVLLVDGHHLAYRNFFALKGLTTSSGEPVQGVYGFAKSLLKALKEDGDVVIVVFDAKAPSFRHEAYEAYKAGRAPTPEDFPRQLALMKELVDLLGLERLEVPGFEADDVLATLAKKAEREGYEVQILTADRDLFQLLSPRISVLHPEGHRITPEWLWEKYGLRPEQWVDFRALAGDPSDNIPGVKGIGEKTALKLLKEWGSLENLLKNLDQVKPESVREKILAHLEDLKLSRELSRVRTDLPLEVDFQRRREPDWEGLKAFLERLEFGSLLHEFGLLESPLPAEEAPWPPPEGAFLGYRLSRPEPMWAELLALAASAQGRVYRAEDPHGALRGLFEVRGLLAKDLAVVALREGLDLPPTDDPMLLAYLLDPSNTTPEGVARRYGGEWTEDAAKRALLAERLHANLLGRLQGEERLLWLYEEVEKPLSRVLAHMEATGVKLDVAYLENLSLEVAAHMRRLEEEVFRLAGRSFRLNSRDQLERVLFDELGLPPIGKTEKTGKRSTSAAVLEALREVHPIVDKILQYRELAKLKGTYIDRLPALVHPKTGRLHTRFNQTATATGRLSSSDPNLQNIPVRTPLGQKIRRAFVAEEGWRLVALDYSQIELRVLAHLSGDENLIRVFQEGKDIHTQTASWMFGLSAEAIDPLMRRAAKTINFGVLYGMSAFRLSQSLGIPYEEAQAFIQKYFQSYPKVKAWIEKTLEEGRTRGYVETLFGRRRYVPDLNARVKGKREAAERMAFNMPVQGTAADLMKLAMVRLFPQLREVGARMLLQVHDELLLEAPKERAEEVAALAKEVMEGVWPLAVPLEVEVGIGEDWLAAKG

SEQ ID NO: 4017 - DNA, 2523 bp, synthetic construct
  misc_feature 1..2523: note = Variant of DNA polymerase I from Thermus sp. strain 2.9
  source 1..2523: mol_type = other DNA
atgcaccatcatcatcatcatggcggtagcggcgtgttaccggtgttcgagcctaaaggtcgcgtgcttctggttgatggccatcatctcgcgtatcgtaacttctttgccctgaaaggattaaccaccagcagcggcgagccggtacagggtgtctacggctttgcaaagtcgctcctgaaagctctgaaagaagacggtgatgtggtgattgttgtctttgatgcgaaagcgccaagttttcgccacgaagcgtacgaagcttacaaaagggggcgtgctccaacgccggaagactttcctcgccaattggcgcttatgaaggaattagtggatttgcttggcctcgaacgcttggaagttcccggtttcgaggcagacgacgtattagcgactctcgcaaagaaagccgaacgtgagggctatgaagtccagatcttgacagcagatcgcgatcttttccagcttttatctccgcgcatctcggtgttacacccggaagggcatcgtatcaccccggaatggctctgggagaaatatggtttgcgtcccgaacaatgggtggattttcgcgccttagcaggcgatccgagcgacaatattccgggagttaaaggtatcggcgagaagacggcgctcaagctccttaaagaatgggggtcgttggagaacttgcttaagaatttagatcaggtcaaaccagagtcagtgcgtgagaagattcttgctcacctcgaagacctcaaattaagccgcgaattgtcccgtgtacgcaccgatttgccgctcgaagttgatttccaacgccgccgcgaacctgactgggagggtcttaaagcgtttttagagcgtcttgaatttggttcgctcttgcatgaattcggccttttagaaagcccgttaccagccgaagaagcaccttggccaccgcccgagggcgcgtttttaggttaccgtttgagtcgcccggaaccgatgtgggccgaattactggctcttgcagcgtctgcccagggacgtgtgtatcgcgcggaagaccctcatggtgcgctccgcggcctcttcgaagtccgtggactccttgccaaagacttagctgttgttgcattgcgcgaaggtcttgatttacctccgactgatgatccaatgcttcttgcgtacctcttggacccgtcaaacacgacgcccgaaggcgtagcccgtcgttacggcggcgagtggaccgaagatgcagcgaaacgcgcgttattggccgaacgtttgcacgccaatttattaggacgtttgcaaggcgaggaacgtctcctctggctttacgaagaagtggagaaaccattgagtcgcgtgctcgcgcatatggaagctaccggtgtcaaattagacgtggcgtatttggagaatctcagccttgaagttgctgcccacatgcgccgcttggaggaagaagtattccgtttagcaggccgttcctttcgccttaattctcgcgatcagttagaacgtgtgttgttcgatgaacttggtctccctcctatcggcaagacagagaagaccggtaaacgtagcacttcagcggcggttttagaagctcttcgcgaagtccatcccattgtggacaagatcttgcaataccgcgaactcgcgaaattgaaaggcacctatattgaccgtcttccggcattagtccacccgaaaacgggacgcctccatacccgcttcaaccaaacagccacggcgaccggtcgtttgtcctcctctgatccaaaccttcagaatattccagtacgtaccccattgggccagaagatccgccgtgcgtttgtagctgaggagggttggcgtttagtggccctcgattatagccaaattgaattacgtgtccttgcccatctttctggcgatgagaacctcatccgcgtgtttcaggaaggcaaagacattcacactcaaacggcaagctggatgtttggattatcagctgaagcgatcgatcctttgatgcgtcgtgcagcgaagaccatcaatttcggtgttctctacggtatgagtgcctttcgtttgtcgcaggaattaggcattccctatgaagaagctcaggcgttcattcagaaatactttcaaagctatcccaaagttaaagcatggatcgagaagactctcgaagaaggccgcacacgtggttacgtagagaccttatttggacgtcgccgctatgttcccgatttaaacgctcgcgtgaaaggcaagcgtgaagccgccgaacgcatggcgttcaacatgcctgtacagggcacggcagctgacctcatgaaacttgcaatggtgcgcctttttccacaattgcgtgaagttggtgcccgcatgctcttgcaggtccacgatgaactcttgttagaagcgccaaaagagcgtgcggaagaggtggcagccctcgcgaaagaagttatggaaggcgtgtggcccttagcggtgcctcttgaagtcgaagttggtattggcgaggattggctggctgccaaagga

SEQ ID NO: 4018 - protein, 841 aa, synthetic construct
  REGION 1..841: note = Variant of DNA polymerase I from Thermus sp. strain 2.9
MHHHHHHGGSGVLPVFEPKGRVLLVDGHHLAYRNFFALKGLTTSSGEPVQGVYGFAKSLLKALKEDGDVVIVVFDAKAPSFRHEAYEAYKRGRAPTPEDFPRQLALMKELVDLLGLERLEVPGFEADDVLATLAKKAEREGYEVQILTADRDLFQLLSPRISVLHPEGHRITPEWLWEKYGLRPEQWVDFRALAGDPSDNIPGVKGIGEKTALKLLKEWGSLENLLKNLDQVKPESVREKILAHLEDLKLSRELSRVRTDLPLEVDFQRRREPDWEGLKAFLERLEFGSLLHEFGLLESPLPAEEAPWPPPEGAFLGYRLSRPEPMWAELLALAASAQGRVYRAEDPHGALRGLFEVRGLLAKDLAVVALREGLDLPPTDDPMLLAYLLDPSNTTPEGVARRYGGEWTEDAAKRALLAERLHANLLGRLQGEERLLWLYEEVEKPLSRVLAHMEATGVKLDVAYLENLSLEVAAHMRRLEEEVFRLAGRSFRLNSRDQLERVLFDELGLPPIGKTEKTGKRSTSAAVLEALREVHPIVDKILQYRELAKLKGTYIDRLPALVHPKTGRLHTRFNQTATATGRLSSSDPNLQNIPVRTPLGQKIRRAFVAEEGWRLVALDYSQIELRVLAHLSGDENLIRVFQEGKDIHTQTASWMFGLSAEAIDPLMRRAAKTINFGVLYGMSAFRLSQELGIPYEEAQAFIQKYFQSYPKVKAWIEKTLEEGRTRGYVETLFGRRRYVPDLNARVKGKREAAERMAFNMPVQGTAADLMKLAMVRLFPQLREVGARMLLQVHDELLLEAPKERAEEVAALAKEVMEGVWPLAVPLEVEVGIGEDWLAAKG

SEQ ID NO: 4019 - DNA, 2523 bp, synthetic construct
  misc_feature 1..2523: note = Variant of DNA polymerase I from Thermus sp. strain 2.9
  source 1..2523: mol_type = other DNA
atgcaccatcatcatcatcatggcggtagcggcgtgttaccggtgttcgagcctaaaggtcgcgtgcttctggttgatggccatcatctcgcgtatcgtaacttctttgccctgaaaggattaaccaccagcagcggcgagccggtacagggtgtctacggctttgcaaagtcgctcctgaaagctctgaaagaagacggtgatgtggtgattgttgtctttgatgcgaaagcgccaagttttcgccacgaagcgtacgaagcttacaaagccgggcgtgctccaacgccggaagactttcctcgccaattggcgcttatgaaggaattagtggatttgcttggcctcgaacgcttggaagttcccggtttcgaggcagacgacgtattagcgactctcgcaaagaaagccgaacgtgagggctatgaagtccagatcttgacagcagatcgcgatcttttccagcttttatctccgcgcatctcggtgttacacccggaagggcatcgtatcaccccggaatggctctgggagaaatatggtttgcgtcccgaacaatgggtggattttcgcgccttagcaggcgatccgagcgacaatattccgggagttaaaggtatcggcgagaagacggcgctcaagctccttacggaatgggggtcgttggagaacttgcttaagaatttagatcaggtcaaaccagagtcagtgcgtgagaagattcttgctcacctcgaagacctcaaattaagccgcgaattgtcccgtgtacgcaccgatttgccgctcgaagttgatttccaacgccgccgcgaacctgactgggagggtcttaaagcgtttttagagcgtcttgaatttggttcgctcttgcatgaattcggccttttagaaagcccgttaccagccgaagaagcaccttggccaccgcccgagggcgcgtttttaggttaccgtttgagtcgcccggaaccgatgtgggccgaattactggctcttgcagcgtctgcccagggacgtgtgtatcgcgcggaagaccctcatggtgcgctccgcggcctcttcgaagtccgtggactccttgccaaagacttagctgttgttgcattgcgcgaaggtcttgatttacctccgactgatgatccaatgcttcttgcgtacctcttggacccgtcaaacacgacgcccgaaggcgtagcccgtcgttacggcggcgagtggaccgaagatgcagcgaaacgcgcgttattggccgaacgtttgcacgccaatttattaggacgtttgcaaggcgaggaacgtctcctctggctttacgaagaagtggagaaaccattgagtcgcgtgctcgcgcatatggaagctaccggtgtcaaattagacgtggcgtatttggagaatctcagccttgaagttgctgcccacatgcgccgcttggaggaagaagtattccgtttagcaggccgttcctttcgccttaattctcgcgatcagttagaacgtgtgttgttcgatgaacttggtctccctcctatcggcaagacagagaagaccggtaaacgtagcacttcagcggcggttttagaagctcttcgcgaagtccatcccattgtggacaagatcttgcaataccgcgaactcgcgaaattgaaaggcacctatattgaccgtcttccggcattagtccacccgaaaacgggacgcctccatacccgcttcaaccaaacagccacggcgaccggtcgtttgtcctcctctgatccaaaccttcagaatattccagtacgtaccccattgggccagaagatccgccgtgcgtttgtagctgaggagggttggcgtttagtggccctcgattatagccaaattgaattacgtgtccttgcccatctttctggcgatgagaacctcatccgcgtgtttcaggaaggcaaagacattcacactcaaacggcaagctggatgtttggattatcagctgaagcgatcgatcctttgatgcgtcgtgcagcgaagaccatcaatttcggtgttctctacggtatgagtgcctttcgtttgtcgcaggaattaggcattccctatgaagaagctcaggcgttcattcagaaatactttcaaagctatcccaaagttaaagcatggatcgagaagactctcgaagaaggccgcacacgtggttacgtagagaccttatttggacgtcgccgctatgttcccgatttaaacgctcgcgtgaaaggcaagcgtgaagccgccgaacgcatggcgttcaacatgcctgtacagggcacggcagctgacctcatgaaacttgcaatggtgcgcctttttccacaattgcgtgaagttggtgcccgcatgctcttgcaggtccacgatgaactcttgttagaagcgccaaaagagcgtgcggaagaggtggcagccctcgcgaaagaagttatggaaggcgtgtggcccttagcggtgcctcttgaagtcgaagttggtattggcgaggattggctggctgccaaagga

SEQ ID NO: 4020 - protein, 841 aa, synthetic construct
  REGION 1..841: note = Variant of DNA polymerase I from Thermus sp. strain 2.9
MHHHHHHGGSGVLPVFEPKGRVLLVDGHHLAYRNFFALKGLTTSSGEPVQGVYGFAKSLLKALKEDGDVVIVVFDAKAPSFRHEAYEAYKAGRAPTPEDFPRQLALMKELVDLLGLERLEVPGFEADDVLATLAKKAEREGYEVQILTADRDLFQLLSPRISVLHPEGHRITPEWLWEKYGLRPEQWVDFRALAGDPSDNIPGVKGIGEKTALKLLTEWGSLENLLKNLDQVKPESVREKILAHLEDLKLSRELSRVRTDLPLEVDFQRRREPDWEGLKAFLERLEFGSLLHEFGLLESPLPAEEAPWPPPEGAFLGYRLSRPEPMWAELLALAASAQGRVYRAEDPHGALRGLFEVRGLLAKDLAVVALREGLDLPPTDDPMLLAYLLDPSNTTPEGVARRYGGEWTEDAAKRALLAERLHANLLGRLQGEERLLWLYEEVEKPLSRVLAHMEATGVKLDVAYLENLSLEVAAHMRRLEEEVFRLAGRSFRLNSRDQLERVLFDELGLPPIGKTEKTGKRSTSAAVLEALREVHPIVDKILQYRELAKLKGTYIDRLPALVHPKTGRLHTRFNQTATATGRLSSSDPNLQNIPVRTPLGQKIRRAFVAEEGWRLVALDYSQIELRVLAHLSGDENLIRVFQEGKDIHTQTASWMFGLSAEAIDPLMRRAAKTINFGVLYGMSAFRLSQELGIPYEEAQAFIQKYFQSYPKVKAWIEKTLEEGRTRGYVETLFGRRRYVPDLNARVKGKREAAERMAFNMPVQGTAADLMKLAMVRLFPQLREVGARMLLQVHDELLLEAPKERAEEVAALAKEVMEGVWPLAVPLEVEVGIGEDWLAAKG

SEQ ID NO: 4021 - DNA, 2523 bp, synthetic construct
  misc_feature 1..2523: note = Variant of DNA polymerase I from Thermus sp. strain 2.9
  source 1..2523: mol_type = other DNA
atgcaccatcatcatcatcatggcggtagcggcgtgttagaggtgttcgagcctaaaggtcgcgtgcttctggttgatggccatcatctcgcgtatcgtaacttctttgccctgaaaggattaaccaccagcagcggcgagccggtacagggtgtctacggctttgcaaagtcgctcctgaaagctctgaaagaagacggtgatgtggtgattgttgtctttgatgcgaaagcgccaagttttcgccacgaagcgtacgaagcttacaaagccgggcgtgctccaacgccggaagactttcctcgccaattggcgcttatgaaggaattagtggatttgcttggcctcgaacgcttggaagttcccggtttcgaggcagacgacgtattagcgactctcgcaaagaaagccgaacgtgagggctatgaagtccagatcttgacagcagatcgcgatcttttccagcttttatctccgcgcatctcggtgttacacccggaagggcatcgtatcaccccggaatggctctgggagaaatatggtttgcgtcccgaacaatgggtggattttcgcgccttagcaggcgatccgagcgacaatattccgggagttaaaggtatcggcgagaagacggcgctcaagctccttaaagaatgggggtcgttggagaacttgcttaagaatttagatcaggtcaaaccagagtcagtgcgtgagaagattcttgctcacctcgaagacctcgagttaagccgcgaattgtcccgtgtacgcaccgatttgccgctcgaagttgatttccaacgccgccgcgaacctgactgggagggtcttaaagcgtttttagagcgtcttgaatttggttcgctcttgcatgaattcggccttttagaaagcccgttaccagccgaagaagcaccttggccaccgcccgagggcgcgtttttaggttaccgtttgagtcgcccggaaccgatgtgggccgaattactggctcttgcagcgtctgcccagggacgtgtgtatcgcgcggaagaccctcatggtgcgctccgcggcctcttcgaagtccgtggactccttgccaaagacttagctgttgttgcattgcgcgaaggtcttgatttacctccgactgatgatccaatgcttcttgcgtacctcttggacccgtcaaacacgacgcctgaaggcgtagcccgtcgttacggcggcgagtggaccgaagatgcagcgaaacgcgcgttattggccgaacgtttgcacgccaatttattaggacgtttgcaaggcgaggagcgtctcctctggctttacgaagaagtggagaaaccattgagtcgcgtgctcgcgcatatggaagctaccggtgtcaaattagacgtggcgtatttggagaatctcagccttgaagttgctgcccacatgcgccgcttggaggaagaagtattccgtttagcaggccgttcctttcgccttaattctcgcgatcagttagaacgtgtgttgttcgatgaacttggtctccctcctatcggcaagacagagaagaccggtaaacgtagcacttcagcggcggttttagaagctcttcgcgaagtccatcccattgtggacaagatcttgcaataccgcgaactcgcgaaattgaaaggcacctatattgaccgtcttccggcattagtccacccgaaaacgggacgcctccatacccgcttcaaccaaacagccacggcgaccggtcgtttgtcctcctctgatccaaaccttcagaatattccagtacgtaccccattgggccagaagatccgccgtgcgtttgtagctgaggagggttggcgtttagtggccctcgattatagccaaattgaattacgtgtccttgcccatctttctggcgatgagaacctcatccgcgtgtttgaggaaggcaaagacattcacactcaaacggcaagctggatgtttggattatcagctgaagcgatcgatcctttgatgcgtcgtgcagcgaagaccatcaatttcggtgttctctacggtatgagtgcctttcgtttgtcgcaggaattaggcattccctatgaagaagctcaggcgttcattcagaaatactttcaaagctatcccaaagttaaagcatggatcgagaagactctcgaagaaggccgcacacgtggttacgtagagaccttatttggacgtcgccgctatgttcccgatttaaacgctcgcgtgaaaggcaagcgtgaagccgccgaacgcatggcgttcaacatgcctgtacagggcacggcagctgacctcatgaaacttgcaatggtgcgcctttttccacaattgcgtgaagttggtgcccgcatgctcttgcaggtccacgatgaactcttgttagaagcgccaaaagagcgtgcggaagaggtggcagccctcgcgaaagaagttatggaaggcgtgtggcccttagcggtgcctcttgaagtcgaagttggtattggcgaggattggctggctgccaaagga

SEQ ID NO: 4022 - protein, 841 aa, synthetic construct; identical to SEQ ID NO: 3688
  REGION 1..841: note = Variant of DNA polymerase I from Thermus sp. strain 2.9

SEQ ID NO: 4023 - DNA, 2523 bp, synthetic construct
  misc_feature 1..2523: note = Variant of DNA polymerase I from Thermus sp. strain 2.9
  source 1..2523: mol_type = other DNA
atgcaccatcatcatcatcatggcggtagcggcgtgttaccggtgttcgagcctaaaggtcgcgtgcttctggttgatggccatcatctcgcgtatcgtaacttctttgccctgaaaggattaaccaccagcagtggcgagccggtacagggtgtctacggctttgcaaagtcgctcctgaaagctctgaaagaagacggtgatgtggtgattgttgtctttgatgcgaaagcgccaagttttcgccacgaagcgtacgaagcttacaaagccgggcgtgctccaacgccggaagactttcctcgccaattggcgcttatgaaggaattagtggatttgcttggcctcgaacgcttggaagttcccggtttcgaggcagacgacgtattagcgactctcgcaaagaaagccgaacgtgagggctatgaagtccagatcttgacagcagatcgcgatcttttccagcttttatctccgcgcatctcggtgttacacccggaagggcatcgtatcaccccggaatggctctgggagaaatatggtttgcgtcccgaacaatgggtggattttcgcgccttagcaggcgatccgagcgacaatattccgggagttaaaggtatcggcgagaagacggcgctcaagctccttaaagaatgggggtcgttggagaacttgcttaagaatttagatcaggtcaaaccagagtcagtgcgtgagaagattcttgctcacctcgaagacctcaaattaagccgcgaattgtcccgtgtacgcaccgatttgccgctcgaagttgatttcggtcgccgccgcgaacctgactgggagggtcttaaagcgtttttagagcgtcttgaatttggttcgctcttgcatgaattcggccttttagaaagcccgttagtcgccgaagaagcaccttggccaccgcccgagggcgcgtttttaggttaccgtttgagtcgcccggaaccgatgtgggccgaattactggctcttgcagcgtctgcccagggacgtgtgtatcgcgcggaagaccctcatggtgcgctccgcggcctcttcgaagtccgtggactccttgccaaagacttagctgttgttgcattgcgcgaaggtcttgatttacctccgactgatgatccaatgcttcttgcgtacctcttggacccgtcaaacacgacgcccgaaggcgtagcccgtcgttacggcggcgagtggaccgaagatgcagcgaaacgcgcgttattggccgaacgtttgcacgcaaatttattaggacgtttgcaaggcgaggaacgtctcctctggctttacgaagaagtggagaaaccattgagtcgcgtgctcggccatatggaagctaccggtgtcaaattagacgtggcgtatttggagaatctcagccttgaagttgctgcccacatgcgccgcttggaggaagaagtattccgtttagcaggccgttcctttcgccttagctctcgcgatcagttagaacgtgtgttgttcgatgaacttggtctccctcctatcggcaagacagagaagaccggtaaacgtagcacttcagcggcggttttagaagctcttcgcgaagtccatcccattgtggacaagatcttgcagtaccgcgaactcgcgaaattgaaaggcacctatattgaccgtcttccggcattagtccacccgaaaacgggacgcctccatacccgcttcaaccaaacagccacggcgaccggtcgtttgtcctcctctgatccaaaccttcagaatattccagtacgtaccccattgggccagaagatccgccgtgcgtttgtagctgaggagggttggcgtttagtggccctcgattatcgtcaaattgaattacgtgtccttgcccatctttctggcgatgagaacctcatccgcgtgtttcaggaaggcaaagacattcacactcaaacggcaagctggatgtttggattatcagctgaagcgatcgatcctttgatgcgtcgtgcagcgaagaccatcaatttcggtgttctctacggtatgagtgcctttcgtttgtcgcaggaattaggcattccctatgaagaagctcaggcgttcattcagaaatactttcaaagctatcccaaagttaaagcatggatcgagaagactctcgaggaaggccgcacacgtggttacgtagagaccttatttggacgtcgccgctatgttcccgatttaaacgctcgcgtgaaaggcaagcgtgaagccgccgaacgcatggcgttcaacatgcctgtacagggcacggcagctgacctcatgaaacttgcaatggtgcgcctttttccacaattgcgtgaagttggtgcccgcatgctcttgcaggtccacgatgaactcttgttagaagcgccaaaagagcgtgcggaagaggtggcagccctcgcgaaagaagttatggaaggcgtgtggcccttagcggtgcctcttgaagtcgaagttggtattggcgaggattggctggctgccaaagga

SEQ ID NO: 4024 - protein, 841 aa, synthetic construct
  REGION 1..841: note = Variant of DNA polymerase I from Thermus sp. strain 2.9
MHHHHHHGGSGVLPVFEPKGRVLLVDGHHLAYRNFFALKGLTTSSGEPVQGVYGFAKSLLKALKEDGDVVIVVFDAKAPSFRHEAYEAYKAGRAPTPEDFPRQLALMKELVDLLGLERLEVPGFEADDVLATLAKKAEREGYEVQILTADRDLFQLLSPRISVLHPEGHRITPEWLWEKYGLRPEQWVDFRALAGDPSDNIPGVKGIGEKTALKLLKEWGSLENLLKNLDQVKPESVREKILAHLEDLKLSRELSRVRTDLPLEVDFGRRREPDWEGLKAFLERLEFGSLLHEFGLLESPLVAEEAPWPPPEGAFLGYRLSRPEPMWAELLALAASAQGRVYRAEDPHGALRGLFEVRGLLAKDLAVVALREGLDLPPTDDPMLLAYLLDPSNTTPEGVARRYGGEWTEDAAKRALLAERLHANLLGRLQGEERLLWLYEEVEKPLSRVLGHMEATGVKLDVAYLENLSLEVAAHMRRLEEEVFRLAGRSFRLSSRDQLERVLFDELGLPPIGKTEKTGKRSTSAAVLEALREVHPIVDKILQYRELAKLKGTYIDRLPALVHPKTGRLHTRFNQTATATGRLSSSDPNLQNIPVRTPLGQKIRRAFVAEEGWRLVALDYRQIELRVLAHLSGDENLIRVFQEGKDIHTQTASWMFGLSAEAIDPLMRRAAKTINFGVLYGMSAFRLSQELGIPYEEAQAFIQKYFQSYPKVKAWIEKTLEEGRTRGYVETLFGRRRYVPDLNARVKGKREAAERMAFNMPVQGTAADLMKLAMVRLFPQLREVGARMLLQVHDELLLEAPKERAEEVAALAKEVMEGVWPLAVPLEVEVGIGEDWLAAKG

SEQ ID NO: 4025 - DNA, 2523 bp, synthetic construct
  misc_feature 1..2523: note = Variant of DNA polymerase I from Thermus sp. strain 2.9
  source 1..2523: mol_type = other DNA
atgcaccatcatcatcatcatggcggtagcggcgtgttagaggtgttcgagcctaaaggtcgcgtgcttctggttgatggccatcatctcgcgtatcgtaacttctttgccctgaaaggattaaccaccagcagcggcgagccggtacagggtgtctacggctttgcaaagtcgctcctgaaagctctgaaagaagacggtgatgtggtgattgttgtctttgatgcgaaagcgccaagttttcgccacgaagcgtacgaagcttacaaagccgggcgtgctgatacgccggaagactttcctcgccaattggcgcttatgaaggaattagtggatttgcttggcctcgaacgcttggaagttcccggtttcgaggcagacgacgtattagcgactctcgcaaagaaagccgaacgtgagggctatgaagtccagatcttgacagcagatcgcgatcttttccagcttttatctccgcgcatctcggtgttacacccggaagggcatcgtatcaccccggaatggctctgggagaaatatggtttgcgtcccgaacaatgggtggattttcgcgccttagcaggcgatccgagcgacaatattccgggagttaaaggtatcggcgagaagacggcgctcaagctccttaaagaatgggggtcgttggagaacttgcttaagaatttagatcaggtcaaaccagagtcagtgcgtgagaagattcttgctcacctcgaagacctcaaattaagccgcgaattgtcccgtgtacgcaccgatttgccgctcgaagttgatttccaacgccgccgcgaacctgactgggagggtcttaaagcgtttttagagcgtcttgaatttggttcgctcttgcatgaattcggccttttagaaagcccgttaccagccgaagaagcaccttggccaccgcccgagggcgcgtttttaggttaccgtttgagtcgcccggaaccgatgtgggccgaattactggctcttgcagcgtctgcccagggacgtgtgtatcgcgcggaagaccctcatggtgcgctccgcggcctcttcgaagtccgtggactccttgccaaagacttagctgttgttgcattgcgcgaaggtcttgatttacctccgactgatgatccaatgcttcttgcgtacctcttggacccgtcaaacacgacgcccgaaggcgtagcccgtcgttacggcggcgagtggaccgaagatgcagcgaaacgcgcgttattggccgaacgtttgcacgccaatttattaggacgtttgcaaggcgaggagcgtctcctctggctttacgaagaagtggagaaaccattgagtcgcgtgctcgcgcatatggaagctaccggtgtcaaattagacgtggcgtatttggagaatctcagccttgaagttgctgcccacatgcgccgcttggaggaagaagtattccgtttagcaggccgttcctttcgccttaattctcgcgatcagttagaacgtgtgttgttcgatgaacttggtctccctcctatcggcaagacagagaagaccggtaaacgtagcacttcagcggcggttttagaagctcttcgcgaagtccatcccattgtggacaagatcttgcaataccgcgaactcgcgaaattgaaaggcacctatattgaccgtcttccggcattagtccacccgaaaacgggacgcctccatacccgcttcaaccaaacagccacggcgaccggtcgtttgtcctcctctgatccaaaccttcagaatattccagtacgtaccccattgggccagaagatccgccgtgcgtttgtagctgaggagggttggcgtttagtggccctcgattatagccaaattgaattacgtgtccttgcccatctttctggcgatgagaacctcatccgcgtgtttcaggaaggcaaagacattcacactcaaacggcaagctggatgtttggattatcagctgaagcgatcgatcctttgatgcgtcgtgcagcgaagaccatcaatttcggtgttctctacggtatgagtgcctttcgtttgtcgcaggaattaggcattccctacgaagaagctcaggcgttcattcagaaatactttcaaagctatcccaaagttaaagcatggatcgagaagactctcgaagaaggccgcacacgtggttacgtagagaccttatttggacgtcgccgctatgttcccgatttaaacgctcgcgtgaaaggcaagcgtgaagccgccgaacgcatggcgttcaacatgcctgtacagggcacggcagctgacctcatgaaacttgcaatggtgcgcctttttccacaattgcgtgaagttggtgcccgcatgctcttgcaggtccacgatgaactcttgttagaagcgccaaaagagcgtgcggaagaggtggcagccctcgcgaaagaagttatggaaggcgtgtggcccttagcggtgcctcttgaagtcgaagttggtattggcgaggattggctggctgccaaagga

SEQ ID NO: 4026 - protein, 841 aa, synthetic construct
  REGION 1..841: note = Variant of DNA polymerase I from Thermus sp. strain 2.9
MHHHHHHGGSGVLEVFEPKGRVLLVDGHHLAYRNFFALKGLTTSSGEPVQGVYGFAKSLLKALKEDGDVVIVVFDAKAPSFRHEAYEAYKAGRADTPEDFPRQLALMKELVDLLGLERLEVPGFEADDVLATLAKKAEREGYEVQILTADRDLFQLLSPRISVLHPEGHRITPEWLWEKYGLRPEQWVDFRALAGDPSDNIPGVKGIGEKTALKLLKEWGSLENLLKNLDQVKPESVREKILAHLEDLKLSRELSRVRTDLPLEVDFQRRREPDWEGLKAFLERLEFGSLLHEFGLLESPLPAEEAPWPPPEGAFLGYRLSRPEPMWAELLALAASAQGRVYRAEDPHGALRGLFEVRGLLAKDLAVVALREGLDLPPTDDPMLLAYLLDPSNTTPEGVARRYGGEWTEDAAKRALLAERLHANLLGRLQGEERLLWLYEEVEKPLSRVLAHMEATGVKLDVAYLENLSLEVAAHMRRLEEEVFRLAGRSFRLNSRDQLERVLFDELGLPPIGKTEKTGKRSTSAAVLEALREVHPIVDKILQYRELAKLKGTYIDRLPALVHPKTGRLHTRFNQTATATGRLSSSDPNLQNIPVRTPLGQKIRRAFVAEEGWRLVALDYSQIELRVLAHLSGDENLIRVFQEGKDIHTQTASWMFGLSAEAIDPLMRRAAKTINFGVLYGMSAFRLSQELGIPYEEAQAFIQKYFQSYPKVKAWIEKTLEEGRTRGYVETLFGRRRYVPDLNARVKGKREAAERMAFNMPVQGTAADLMKLAMVRLFPQLREVGARMLLQVHDELLLEAPKERAEEVAALAKEVMEGVWPLAVPLEVEVGIGEDWLAAKG

SEQ ID NO: 4027 - DNA, 2523 bp, synthetic construct
  misc_feature 1..2523: note = Variant of DNA polymerase I from Thermus sp. strain 2.9
  source 1..2523: mol_type = other DNA
atgcaccatcatcatcatcatggcggtagcggcgtgttaccggtgttcgagcctaaaggtcgcgtgcttctggttgatggccatcatctcgcgtatcgtaacttctttgccctgaaaggattaaccaccagcagcggcgagccggtacagggtgtctacggctttgcaaagtcgctcctgaaagctctgaaagaagacggtgatgtggtgattgttgtctttgatgcgaaagcgccaagttttcgccacgaagcgtacgaagcttacaaagccgggcgtgctccaacgccggaagactttcctcgccaattggcgcttatgaaggaattagtggatttgcttggcctcgaacgcttggaagttcccggtttcgaggcagacgacgtattagcgactctcgcaaagaaagccgaacgtgagggctatgaagtccagatcttgacagcagatcgcgatcttttccagcttttatctccgcgcatctcggtgttacacccggaagggcatcgtatcaccccggaatggctctgggagaaatatggtttgcgtcccgaacaatgggtggattttcgcgccttagcaggcgatccgagcgacaatattccgggagttaaaggtatcggcatgaagacggcgctcaagctccttaaagaatgggggtcgttggagaacttgcttaagaatttagatcaggtcaaaccagagtcagtgcgtgagaagattcttgctcacctcgaagacctcaaattaagccgcgaattgtcccgtgtacgcaccgatttgccgctcgaagttgatttccaacgccgccgcgaacctgactgggagggtcttaaagcgtttttagagcgtcttgaatttggttcgctcttgcatgaattcggccttttagaaagcccgttaccagccgaagaagcaccttggccaccgcccgagggcgcgtttttaggttaccgtttgagtcgcccggaaccgatgtgggccgaattactggctcttgcagcgtctgcccagggacgtgtgtatcgcgcggaagaccctcatggtgcgctccgcggcctcttcgaagtccgtggactccttgccaaagacttagctgttgttgcattgcgcgaaggtcttgatttacctccgactgatgatccaatgcttcttgcgtacctcttggacccgtcaaacacgacgcccgaaggcgtagcccgtcgttacggcggcgagtggaccgaagatgcagcgaaacgcgcgttattggccgaacgtttgcacgccaatttattaggacgtttgcaaggcgaggaacgtctcctctggctttacgaagaagtggagaaaccattgagtcgcgtgctcgcgcatatggaagctaccggtgtcaaattagacgtggcgtatttggagaatctcagccttgaagttgctgcccacatgcgccgcttggaggaagaagtattccgtttagcaggccgttcctttcgccttaattctcgcgatcagttagaacgtgtgttgttcgatgaacttggtctccctcctatcggcaagacagagaagaccggtaaacgtagcacttcagcggcggttttagaagctcttcgcgaagtccatcccattgtggacaagatcttgcaataccgcgaactcgcgaaattgaaaggcacctatattgaccgtcttccggcattagtccacccgaaaacgggacgcctccatacccgcttcaaccaaacagccacggcgaccggtcgtttgtcctcctctgatccaaaccttcagaatattccagtacgtaccccattgggccagaagatccgccgtgcgtttgtagctgaggagggttggcgtttagtggccctcgattatagccaaattgaattacgtgtccttgcccatctttctggcgatgagaacctcatccgcgtgtttcaggaaggcaaagacattcacactcaaacggcaagctggatgtttggattatcagctgaagcgatcgatcctttgatgcgtcgtgcagcgaagaccatcaatttcggtgttctctacggtatgagtgcctttcgtttgtcgcaggaattaggcattccctatgaagaagctcaggcgttcattcagaaatactttcaaagctatcccaaagttaaagcatggatcgagaagactctcgaagaaggccgcacacgtggttacgtagagaccttatttggacgtcgccgctatgttcccgatttaaacgctcgcgtgaaaggcaagcgtgaagccgccgaacgcatggcgttcaacatgcctgtacagggcacggcagctgacctcatgaaacttgcaatggtgcgcctttttccacaattgcgtgaagttggtgcccgcatgctcttgcaggtccacgatgaactcttgttagaagcgccaaaagagcgtgcggaagaggtggcagccctcgcgaaagaagttatggaaggcgtgtggcccttagcggtgcctcttgaagtcgaagttggtattggcgaggattggctggctgccaaagga

SEQ ID NO: 4028 - protein, 841 aa, synthetic construct
  REGION 1..841: note = Variant of DNA polymerase I from Thermus sp. strain 2.9
MHHHHHHGGSGVLPVFEPKGRVLLVDGHHLAYRNFFALKGLTTSSGEPVQGVYGFAKSLLKALKEDGDVVIVVFDAKAPSFRHEAYEAYKAGRAPTPEDFPRQLALMKELVDLLGLERLEVPGFEADDVLATLAKKAEREGYEVQILTADRDLFQLLSPRISVLHPEGHRITPEWLWEKYGLRPEQWVDFRALAGDPSDNIPGVKGIGMKTALKLLKEWGSLENLLKNLDQVKPESVREKILAHLEDLKLSRELSRVRTDLPLEVDFQRRREPDWEGLKAFLERLEFGSLLHEFGLLESPLPAEEAPWPPPEGAFLGYRLSRPEPMWAELLALAASAQGRVYRAEDPHGALRGLFEVRGLLAKDLAVVALREGLDLPPTDDPMLLAYLLDPSNTTPEGVARRYGGEWTEDAAKRALLAERLHANLLGRLQGEERLLWLYEEVEKPLSRVLAHMEATGVKLDVAYLENLSLEVAAHMRRLEEEVFRLAGRSFRLNSRDQLERVLFDELGLPPIGKTEKTGKRSTSAAVLEALREVHPIVDKILQYRELAKLKGTYIDRLPALVHPKTGRLHTRFNQTATATGRLSSSDPNLQNIPVRTPLGQKIRRAFVAEEGWRLVALDYSQIELRVLAHLSGDENLIRVFQEGKDIHTQTASWMFGLSAEAIDPLMRRAAKTINFGVLYGMSAFRLSQELGIPYEEAQAFIQKYFQSYPKVKAWIEKTLEEGRTRGYVETLFGRRRYVPDLNARVKGKREAAERMAFNMPVQGTAADLMKLAMVRLFPQLREVGARMLLQVHDELLLEAPKERAEEVAALAKEVMEGVWPLAVPLEVEVGIGEDWLAAKG

SEQ ID NO: 4029 - DNA, 2523 bp, synthetic construct
  misc_feature 1..2523: note = Variant of DNA polymerase I from Thermus sp. strain 2.9
  source 1..2523: mol_type = other DNA
atgcaccatcatcatcatcatggcggtagcggcgtgttaccggtgttcgagcctaaaggtcgcgtgcttctggttgatggccatcatctcgcgtatcgtaacttctttgccctgaaaggattaaccaccagcagcggcgagccggtacagggtgtctacggctttgcaaagtcgctcctgaaagctctgaaagaagacggtgatgtggtgattgttgtctttgatgcgaaagcgccaagttttcgccacgaagcgtacgaagcttacaaagccgggcgtgctccaacgccggaagactttcctcgccaattggcgcttatgaaggaattagtggatttgcttggcctcgaacgcttggaagttcccggtttcgaggcagacgacgtattagcgactctcgcaaagaaagccgaacgtgagggctatgaagtccagatcttgacagcagatcgcgatcttttccagcttttatctccgcgcatctcggtgttacacccggaagggcatcgtatcaccccggaatggctctgggagaaatatggtttgcgtcccgaacaatgggtggattttcgcgccttagcaggcgatccgagcgacaatattccgggagttaaaggtatcggcgagaagacggcgctcaagctccttaaagaatgggggtcgttggagaacttgcttaagaatttagatcaggtcaaaccagagtcagtgcgtgagaagattcttgctcacctcgaagacctcaaattaagccgcgaattgtcccgtgtacgcaccgatttgccgctcgaagttgatttccaacgccgccgcgaacctgactgggagggtcttaaagcgtttttagagcgtcttgaatttggttcgctcttgcatgaattcggccttttagaaagcccgttaccagccgaagaagcaccttggccaccgcccgagggcgcgtttttaggttaccgtttgagtcgcccggaaccgatgtgggccgaattactggctcttgcagcgtctgcccagggacgtgtgtatcgcgcggaagaccctcatggtgcgctccgcggcctcttcgaagtccgtggactccttgccaaagacttagctgttgttgcattgcgcgaaggtcttgatttacctccgactgatgatccaatgcttcttgcgtacctcttggacccgtcaaacacgacgcccgaaggcgtagcccgtcgttacggcggcgagtggaccgaagatgcagcgaaacgcgcgttattggccgaacgtttgcacgccaatttattaggacgtttgcaaggcgaggaacgtctcctctggctttacgaagaagtggagaaaccattgagtcgcgtgctcgcgcatatggaagctaccggtgtcaaattagacgtggcgtatttggagaatctcagccttgaagttgctgcccacatgcgccgcttggaggaagaagtattccgtttagcaggccgttcctttcgccttaattctcgcgatcagttagaacgtgtgttgttcgatgaacttggtctccctcctatcggcaagacagagaagaccggtaaacgtagcacttcagcggcggttttagaagctcttcgcgaagtccatcccattgtggacaagatcttgcaataccgcgaactcgcgaaattgaaaggcacctatattgaccgtcttccggcattagtccacccgaaaacgggacgcctccatacccgcttcaaccaaacagccacggcgaccggtcgtttgtcctcctctgatccaaaccttcagaatattccagtacgtaccccattgggccagaagatccgccgtgcgtttgtagctgaggagggttggcgtttagtggccctcgattatagccaaattgaattacgtgtccttgcccatctttctggcgatgagaacctcatccgcgtgtttcaggaaggcaaagacattcacactcaaacggcaagctggatgtttggattatcagctgaagcgatcgatcctttgatgcgtcgtgcagcgaagaccatcaatttcggtgttctctacggtatgagtgcctttcgtttgtcgcaggaattaggcattccctatgaagaagctcaggcgttcattcagaaatactttcaaagctatcccaaagttaaagcatggatcgagaagactctcgaagaaggccgcacacgtggttacgtagagaccttatttggacgtcgccgctatgttcccgatttaaaccagcgcgtgaaaggcaagcgtgaagccgccgaacgcatggcgttcaacatgcctgtacagggcacggcagctgacctcatgaaacttgcaatggtgcgcctttttccacaattgcgtgaagttggtgcccgcatgctcttgcaggtccacgatgaactcttgttagaagcgccaaaagagcgtgcggaagaggtggcagccctcgcgaaagaagttatggaaggcgtgtggcccttagcggtgcctcttgaagtcgaagttggtattggcgaggattggctggctgccaaagga

SEQ ID NO: 4030 - protein, 841 aa, synthetic construct
  REGION 1..841: note = Variant of DNA polymerase I from Thermus sp. strain 2.9
MHHHHHHGGSGVLPVFEPKGRVLLVDGHHLAYRNFFALKGLTTSSGEPVQGVYGFAKSLLKALKEDGDVVIVVFDAKAPSFRHEAYEAYKAGRAPTPEDFPRQLALMKELVDLLGLERLEVPGFEADDVLATLAKKAEREGYEVQILTADRDLFQLLSPRISVLHPEGHRITPEWLWEKYGLRPEQWVDFRALAGDPSDNIPGVKGIGEKTALKLLKEWGSLENLLKNLDQVKPESVREKILAHLEDLKLSRELSRVRTDLPLEVDFQRRREPDWEGLKAFLERLEFGSLLHEFGLLESPLPAEEAPWPPPEGAFLGYRLSRPEPMWAELLALAASAQGRVYRAEDPHGALRGLFEVRGLLAKDLAVVALREGLDLPPTDDPMLLAYLLDPSNTTPEGVARRYGGEWTEDAAKRALLAERLHANLLGRLQGEERLLWLYEEVEKPLSRVLAHMEATGVKLDVAYLENLSLEVAAHMRRLEEEVFRLAGRSFRLNSRDQLERVLFDELGLPPIGKTEKTGKRSTSAAVLEALREVHPIVDKILQYRELAKLKGTYIDRLPALVHPKTGRLHTRFNQTATATGRLSSSDPNLQNIPVRTPLGQKIRRAFVAEEGWRLVALDYSQIELRVLAHLSGDENLIRVFQEGKDIHTQTASWMFGLSAEAIDPLMRRAAKTINFGVLYGMSAFRLSQELGIPYEEAQAFIQKYFQSYPKVKAWIEKTLEEGRTRGYVETLFGRRRYVPDLNQRVKGKREAAERMAFNMPVQGTAADLMKLAMVRLFPQLREVGARMLLQVHDELLLEAPKERAEEVAALAKEVMEGVWPLAVPLEVEVGIGEDWLAAKG

SEQ ID NO: 4031 - DNA, 2523 bp, synthetic construct
  misc_feature 1..2523: note = Variant of DNA polymerase I from Thermus sp. strain 2.9
  source 1..2523: mol_type = other DNA
atgcaccatcatcatcatcatggcggtagcggcgtgttaccggtgttcgagcctaaaggtcgcgtgcttctggttgatggccatcatctcgcgtatcgtaacttctttgccctgaaaggattaaccaccagcagcggcgagccggtacagggtgtctacggctttgcaaagtcgctcctgaaagctctgaaagaagacggtgatgtggtgattgttgtctttgatgcgaaagcgccaagttttcgccacgaagcgtacgaagcttacaaagccgggcgtgctccaacgccggaagactttcctcgccaattggcgcttatgaaggaattagtggatttgcttggcctcgaacgcttggaagttcccggtttcgaggcagacgacgtattagcgactctcgcaaagaaagccgaacgtgagggctatgaagtccagatcttgacagcagatcgcgatcttttccagcttttatctccgcgcatctcggtgttacacccggaagggcatcgtatcaccccggaatggctctgggagaaatatggtttgcgtcccgaacaatgggtggattttcgcgccttagcaggcgatccgagcgacaatattccgggagttaaaggtatcggcgagaagacggcgctcaagctccttcgggaatgggggtcgttggagaacttgcttaagaatttagatcaggtcaaaccagagtcagtgcgtgagaagattcttgctcacctcgaagacctcaaattaagccgcgaattgtcccgtgtacgcaccgatttgccgctcgaagttgatttccaacgccgccgcgaacctgactgggagggtcttaaagcgtttttagagcgtcttgaatttggttcgctcttgcatgaattcggccttttagaaagcccgttaccagccgaagaagcaccttggccaccgcccgagggcgcgtttttaggttaccgtttgagtcgcccggaaccgatgtgggccgaattactggctcttgcagcgtctgcccagggacgtgtgtatcgcgcggaagaccctcatggtgcgctccgcggcctcttcgaagtccgtggactccttgccaaagacttagctgttgttgcattgcgcgaaggtcttgatttacctccgactgatgatccaatgcttcttgcgtacctcttggacccgtcaaacacgacgcccgaaggcgtagcccgtcgttacggcggcgagtggaccgaagatgcagcgaaacgcgcgttattggccgaacgtttgcacgccaatttattaggacgtttgcaaggcgaggaacgtctcctctggctttacgaagaagtggagaaaccattgagtcgcgtgctcgcgcatatggaagctaccggtgtcaaattagacgtggcgtatttggagaatctcagccttgaagttgctgcccacatgcgccgcttggaggaagaagtattccgtttagcaggccgttcctttcgccttaattctcgcgatcagttagaacgtgtgttgttcgatgaacttggtctccctcctatcggcaagacagagaagaccggtaaacgtagcacttcagcggcggttttagaagctcttcgcgaagtccatcccattgtggacaagatcttgcaataccgcgaactcgcgaaattgaaaggcacctatattgaccgtcttccggcattagtccacccgaaaacgggacgcctccatacccgcttcaaccaaacagccacggcgaccggtcgtttgtcctcctctgatccaaaccttcagaatattccagtacgtaccccattgggccagaagatccgccgtgcgtttgtagctgaggagggttggcgtttagtggccctcgattatagccaaattgaattacgtgtccttgcccatctttctggcgatgagaacctcatccgcgtgtttcaggaaggcaaagacattcacactcaaacggcaagctggatgtttggattatcagctgaagcgatcgatcctttgatgcgtcgtgcagcgaagaccatcaatttcggtgttctctacggtatgagtgcctttcgtttgtcgcaggaattaggcattccctatgaagaagctcaggcgttcattcagaaatactttcaaagctatcccaaagttaaagcatggatcgagaagactctcgaagaaggccgcacacgtggttacgtagagaccttatttggacgtcgccgctatgttcccgatttaaacgctcgcgtgaaaggcaagcgtgaagccgccgaacgcatggcgttcaacatgcctgtacagggcacggcagctgacctcatgaaacttgcaatggtgcgcctttttccacaattgcgtgaagttggtgcccgcatgctcttgcaggtccacgatgaactcttgttagaagcgccaaaagagcgtgcggaagaggtggcagccctcgcgaaagaagttatggaaggcgtgtggcccttagcggtgcctcttgaagtcgaagttggtattggcgaggattggctggctgccaaagga

SEQ ID NO: 4032 - protein, 841 aa, synthetic construct
  REGION 1..841: note = Variant of DNA polymerase I from Thermus sp. strain 2.9
MHHHHHHGGSGVLPVFEPKGRVLLVDGHHLAYRNFFALKGLTTSSGEPVQGVYGFAKSLLKALKEDGDVVIVVFDAKAPSFRHEAYEAYKAGRAPTPEDFPRQLALMKELVDLLGLERLEVPGFEADDVLATLAKKAEREGYEVQILTADRDLFQLLSPRISVLHPEGHRITPEWLWEKYGLRPEQWVDFRALAGDPSDNIPGVKGIGEKTALKLLREWGSLENLLKNLDQVKPESVREKILAHLEDLKLSRELSRVRTDLPLEVDFQRRREPDWEGLKAFLERLEFGSLLHEFGLLESPLPAEEAPWPPPEGAFLGYRLSRPEPMWAELLALAASAQGRVYRAEDPHGALRGLFEVRGLLAKDLAVVALREGLDLPPTDDPMLLAYLLDPSNTTPEGVARRYGGEWTEDAAKRALLAERLHANLLGRLQGEERLLWLYEEVEKPLSRVLAHMEATGVKLDVAYLENLSLEVAAHMRRLEEEVFRLAGRSFRLNSRDQLERVLFDELGLPPIGKTEKTGKRSTSAAVLEALREVHPIVDKILQYRELAKLKGTYIDRLPALVHPKTGRLHTRFNQTATATGRLSSSDPNLQNIPVRTPLGQKIRRAFVAEEGWRLVALDYSQIELRVLAHLSGDENLIRVFQEGKDIHTQTASWMFGLSAEAIDPLMRRAAKTINFGVLYGMSAFRLSQELGIPYEEAQAFIQKYFQSYPKVKAWIEKTLEEGRTRGYVETLFGRRRYVPDLNARVKGKREAAERMAFNMPVQGTAADLMKLAMVRLFPQLREVGARMLLQVHDELLLEAPKERAEEVAALAKEVMEGVWPLAVPLEVEVGIGEDWLAAKG

SEQ ID NO: 4033 - DNA, 2523 bp, synthetic construct
  misc_feature 1..2523: note = Variant of DNA polymerase I from Thermus sp. strain 2.9
  source 1..2523: mol_type = other DNA
atgcaccatcatcatcatcatggcggtagcggcgtgttagaggtgttcgagcctaaaggtcgcgtgcttctggttgatggccatcatctcgcgtatcgtaacttctttgccctgaaaggattaaccaccagcagcggcgagccggtacagggtgtctacggctttgcaaagtcgctcctgaaagctctgaaagaagacggtgatgtggtgattgttgtctttgatgcgaaagcgccaagttttcgccacgaagcgtacgaagcttacaaagccgggcgtgctccaacgccggaagactttcctcgccaattggcgcttatgaaggaattagtggatttgcttggcctcgaacgcttggaagttcccggtttcgaggcagacgacgtattagcgactctcgcaaagaaagccgaacgtgagggctatgaagtccagatcttgacagcagatcgcgatcttttccagcttttatctccgcgcatctcggtgttacacccggaagggcatcgtatcaccccggaatggctctgggagaaatatggtttgcgtcccgaacaatgggtggattttcgcgccttagcaggcgatccgagcgacaatattccgggagttaaaggtatcggcgagaagacggcgctcaagctccttaaagaatgggggtcgttggagaacttgcttaagaatttagatcaggtcaaaccagagtcagtgcgtgagaagattcttgctcacctcgaagacctcgagttaagccgcgaattgtcccgtgtacgcaccgatttgccgctcgaagttgatttccaacgccgccgcgaacctgactgggagggtcttaaagcgtttttagagcgtcttgaatttggttcgctcttgcatgaattcggccttttagaaagcccgttaccagccgaagaagcaccttggccaccgcccgagggcgcgtttttaggttaccgtttgagtcgcccggaaccgatgtgggccgaattactggctcttgcagcgtctgcccagggacgtgtgtatcgcgcggaagaccctcatggtgcgctccgcggcctcttcgaagtccgtggactccttgccaaagacttagctgttgttgcattgcgcgaaggtcttgatttacctccgactgatgatccaatgcttcttgcgtacctcttggacccgtcaaacacgacgcctgaaggcgtagcccgtcgttacggcggcgagtggaccgaagatgcagcgaaacgcgcgttattggccgaacgtttgcacgccaatttattaggacgtttgcaaggcgagaagcgtctcctctggctttacgaagaagtggagaaaccattgagtcgcgtgctcgcgcatatggaagctaccggtgtcaaattagacgtggcgtatttggagaatctcagccttgaagttgctgcccacatgcgccgcttggaggaagaagtattccgtttagcaggccgttcctttcgccttaattctcgcgatcagttagaacgtgtgttgttcgatgaacttggtctccctcctatcggcaagacagagaagaccggtaaacgtagcacttcagcggcggttttagaagctcttcgcgaagtccatcccattgtggacaagatcttgcaataccgcgaactcgcgaaattgaaaggcacctatattgaccgtcttccggcattagtccacccgaaaacgggacgcctccatacccgcttcaaccaaacagccacggcgaccggtcgtttgtcctcctctgatccaaaccttcagaatattccagtacgtaccccattgggccagaagatccgccgtgcgtttgtagctgaggagggttggcgtttagtggccctcgattatagccaaattgaattacgtgtccttgcccatctttctggcgatgagaacctcatccgcgtgtttcaggaaggcaaagacattcacactcaaacggcaagctggatgtttggattatcagctgaagcgatcgatcctttgatgcgtcgtgcagcgaagaccatcaatttcggtgttctctacggtatgagtgcctttcgtttgtcgcaggaattaggcattccctatgaagaagctcaggcgttcattcagaaatactttcaaagctatcccaaagttaaagcatggatcgagaagactctcgaagaaggccgccaccgtggttacgtagagaccttatttggacgtcgccgctatgttcccgatttaaacgctcgcgtgaaaggcaagcgtgaagccgccgaacgcatggcgttcaacatgcctgtacagggcacggcagctgacctcatgaaacttgcaatggtgcgcctttttccacaattgcgtgaagttggtgcccgcatgctcttgcaggtccacgatgaactcttgttagaagcgccaaaagagcgtgcggaagaggtggcagccctcgcgaaagaagttatggaaggcgtgtggcccttagcggtgcctcttgaagtcgaagttggtattggcgaggattggctggctgccaaagga

SEQ ID NO: 4034 - protein, 841 aa, synthetic construct
  REGION 1..841: note = Variant of DNA polymerase I from Thermus sp. strain 2.9
MHHHHHHGGSGVLEVFEPKGRVLLVDGHHLAYRNFFALKGLTTSSGEPVQGVYGFAKSLLKALKEDGDVVIVVFDAKAPSFRHEAYEAYKAGRAPTPEDFPRQLALMKELVDLLGLERLEVPGFEADDVLATLAKKAEREGYEVQILTADRDLFQLLSPRISVLHPEGHRITPEWLWEKYGLRPEQWVDFRALAGDPSDNIPGVKGIGEKTALKLLKEWGSLENLLKNLDQVKPESVREKILAHLEDLELSRELSRVRTDLPLEVDFQRRREPDWEGLKAFLERLEFGSLLHEFGLLESPLPAEEAPWPPPEGAFLGYRLSRPEPMWAELLALAASAQGRVYRAEDPHGALRGLFEVRGLLAKDLAVVALREGLDLPPTDDPMLLAYLLDPSNTTPEGVARRYGGEWTEDAAKRALLAERLHANLLGRLQGEKRLLWLYEEVEKPLSRVLAHMEATGVKLDVAYLENLSLEVAAHMRRLEEEVFRLAGRSFRLNSRDQLERVLFDELGLPPIGKTEKTGKRSTSAAVLEALREVHPIVDKILQYRELAKLKGTYIDRLPALVHPKTGRLHTRFNQTATATGRLSSSDPNLQNIPVRTPLGQKIRRAFVAEEGWRLVALDYSQIELRVLAHLSGDENLIRVFQEGKDIHTQTASWMFGLSAEAIDPLMRRAAKTINFGVLYGMSAFRLSQELGIPYEEAQAFIQKYFQSYPKVKAWIEKTLEEGRHRGYVETLFGRRRYVPDLNARVKGKREAAERMAFNMPVQGTAADLMKLAMVRLFPQLREVGARMLLQVHDELLLEAPKERAEEVAALAKEVMEGVWPLAVPLEVEVGIGEDWLAAKG

SEQ ID NO: 4035 - DNA, 2523 bp, synthetic construct
  misc_feature 1..2523: note = Variant of DNA polymerase I from Thermus sp. strain 2.9
  source 1..2523: mol_type = other DNA
atgcaccatcatcatcatcatggcggtagcggcgtgttacctgtgttcgagcctaaaggtcgcgtgcttctggttgatggccatcatctcgcgtatcgtaacttctttgccctgaaaggattaaccaccagcagcggcgagccggtacagggtgtctacggctttgcaaagtcgctcctgaaagctctgaaagaagacggtgatgtggtgattgttgtctttgatgcgaaagcgccaagttttcgccacgaagcgtacgaagcttacaaagccgggcgtgctcctacgccggaagactttcctcgccaattggcgcttatgaaggaattagtggatttgcttggcctcgaacgcttggaagttcccggtttcgaggcagacgacgtattagcgactctcgcaaagaaagccgaacgcgagggctatgaagtccagatcttgacagcagatcgcgatcttttccagcttttatctccgcgcatctcggtgttacacccggaagggcatcgtatcaccccggaatggctctgggagaaatatggtttgcgtcccgaacaatgggtggattttcgcgccttagcaggcgatccgagcgacaatattccgggagttaaaggtatcggcgagaagacggcgctcaagctccttaaagaatgggggtcgttggagaacttgcttaagaatttagatcaggtcaaaccagagtcagtgcgtgagaagattcttgctcacctcgaagacctcaaattaagccgcgaattgtcccgtgtacgcaccgatttgccgctcgaagttgatttccaacgccgccgcgaacctgactgggagggtcttaaagcgtttttagagcgtcttgaatttggttcgctcttgcatgaattcggccttttagaaagcccgttaccagccgaagaagcaccttggccaccgcccgagggcgcgtttttaggttaccgtttgagtcgcccggaaccgatgtgggccgaattactggctcttgcagcgtctgcccagggacgtgtgtatcgcgcggaagaccctcatggtgcgctccgcggcctcttcgaagtccgtggactccttgccaaagacttagctgttgttgcattgcgcgaaggtcttgatttacctccgactgatgatccaatgcttcttgcgtacctcttggacccgtcaaacacgacgcccgaaggcgtagcccgtcgttacggcggcgagtggaccgaagatgcagcgaaacgcgcgttattggccgaacgtttgcacgccaatttattaggacgtttgcaaggcgaggaacgtctcctctggctttacgaagaagtggagaaaccattgagtcgcgtgctcgcgcatatggaagctaccggtgtcaaattagacgtggcgtatttggagaatctcagccttgaagttgctgcccacatgcgccgcttggaggaagaagtattccgtttagcaggccgttcctttcgccttaattctcgcgatcagttagaacgtgtgttgttcgatgaacttggtctccctcctatcggcaagacagagaagaccggtaaacgtagcacttcagcggcggttttagaagctcttcgcgaagtccatcccattgtggacaagatcttgcaataccgcgaactcgcgaaattgaaaggcacctatattgaccgtcttccggcattagtccacccgaaaacgggacgcctccatacccgcttcaaccaaacagccacggcgaccggtcgtttgtcctcctctgatccaaaccttcagaatattccagtacgtaccccattgggccagaagatccgccgtgcgtttgtagctgaggagggttggcgtttagtggccctcgattatagccaaattgaattacgtgtccttgcccatctttctggcgatgagaacctcatccgcgtgtttcaggaaggcaaagacattcacactcaaacggcaagctggatgtttggattatcagctgaagcgatcgatcctttgatgcgtcgtgcagcgaagaccatcaatttcggtgttctctacggtatgagtgcctttcgtttgtcgcaggaattaggcattcccaaagaagaagctcaggcgttcattcagaaatactttcaaagctatcccaaagttaaagcatggatcgagaagactctcgaagaaggccgcacccgtggttacgtagagaccttatttggacgtcgccgctatgttcccgatttaaacgctcgcgtgaaaggcaagcgtgaagccgccgaacgcatggcgttcaacatgcctgtacagggcacggcagctgacctcatgaaacttgcaatggtgcgcctttttccacaattgcgtgaagttggtgcccgcatgctcttgcaggtccacgatgaactcttgttagaagcgccaaaagagcgtgcggaagaggtggcagccctcgcgaaagaagttatggaaggcgtgtggcccttagcggtgcctcttgaagtcgaagttggtattggcgaggattggctggctgccaaagga

SEQ ID NO: 4036 - protein, 841 aa, synthetic construct; identical to SEQ ID NO: 3464
  REGION 1..841: note = Variant of DNA polymerase I from Thermus sp. strain 2.9

SEQ ID NO: 4037 - DNA, 2523 bp, synthetic construct
  misc_feature 1..2523: note = Variant of DNA polymerase I from Thermus sp. strain 2.9
  source 1..2523: mol_type = other DNA
atgcaccatcatcatcatcatggcggtagcggcgtgttaccggtgttcgagcctaaaggtcgcgtgcttctggttgatggccatcatctcgcgtatcgtaacttctttgccctgaaaggattaaccaccagcagcggcgagccggtacagggtgtctacggctttgcaaagtcgctcctgaaagctctgaaagaagacggtgatgtggtgattgttgtctttgattataaagcgccaagttttcgccacgaagcgtacgaagcttacaaagccgggcgtgctccaacgccggaagactttcctcgccaattggcgcttatgaaggaattagtggatttgcttggcctcgaacgcttggaagttcccggtttcgaggcagacgacgtattagcgactctcgcaaagaaagccgaacgtgagggctatgaagtccagatcttgacagcagatcgcgatcttttccagcttttatctccgcgcatctcggtgttacacccggaagggcatcgtatcaccccggaatggctctgggagaaatatggtttgcgtcccgaacaatgggtggattttcgcgccttagcaggcgatccgagcgacaatattccgggagttaaaggtatcggcgagaagacggcgctcaagctccttaaagaatgggggtcgttggagaacttgcttaagaatttagatcaggtcaaaccagagtcagtgcgtgagaagattcttgctcacctcgaagacctcaaattaagccgcgaattgtcccgtgtacgcaccgatttgccgctcgaagttgatttccaacgccgccgcgaacctgactgggagggtcttaaagcgtttttagagcgtcttgaatttggttcgctcttgcatgaattcggccttttagaaagcccgttaccagccgaagaagcaccttggccaccgcccgagggcgcgtttttaggttaccgtttgagtcgcccggaaccgatgtgggccgaattactggctcttgcagcgtctgcccagggacgtgtgtatcgcgcggaagaccctcatggtgcgctccgcggcctcttcgaagtccgtggactccttgccaaagacttagctgttgttgcattgcgcgaaggtcttgatttacctccgactgatgatccaatgcttcttgcgtacctcttggacccgtcaaacacgacgcccgaaggcgtagcccgtcgttacggcggcgagtggaccgaagatgcagcgaaacgcgcgttattggccgaacgtttgcacgccaatttattaggacgtttgcaaggcgaggaacgtctcctctggctttacgaagaagtggagaaaccattgagtcgcgtgctcgcgcatatggaagctaccggtgtcaaattagacgtggcgtatttggagaatctcagccttgaagttgctgcccacatgcgccgcttggaggaagaagtattccgtttagcaggccgttcctttcgccttaattctcgcgatcagttagaacgtgtgttgttcgatgaacttggtctccctcctatcggcaagacagagaagaccggtaaacgtagcacttcagcggcggttttagaagctcttcgcgaagtccatcccattgtggacaagatcttgcaataccgcgaactcgcgaaattgaaaggcacctatattgaccgtcttccggcattagtccacccgaaaacgggacgcctccatacccgcttcaaccaaacagccacggcgaccggtcgtttgtcctcctctgatccaaaccttcagaatattccagtacgtaccccattgggccagaagatccgccgtgcgtttgtagctgaggagggttggcgtttagtggccctcgattatagccaaattgaattacgtgtccttgcccatctttctggcgatgagaacctcatccgcgtgtttcaggaaggcaaagacattcacactcaaacggcaagctggatgtttggattatcagctgaagcgatcgatcctttgatgcgtcgtgcagcgaagaccatcaatttcggtgttctctacggtatgagtgcctttcgtttgtcgcaggaattaggcattccctatgaagaagctcaggcgttcattcagaaatactttcaaagctatcccaaagttaaagcatggatcgagaagactctcgaagaaggccgcacacgtggttacgtagagaccttatttggacgtcgccgctatgttcccgatttaaacgctcgcgtgaaaggcaagcgtgaagccgccgaacgcatggcgttcaacatgcctgtacagggcacggcagctgacctcatgaaacttgcaatggtgcgcctttttccacaattgcgtgaagttggtgcccgcatgctcttgcaggtccacgatgaactcttgttagaagcgccaaaagagcgtgcggaagaggtggcagccctcgcgaaagaagttatggaaggcgtgtggcccttagcggtgcctcttgaagtcgaagttggtattggcgaggattggctggctgccaaagga

SEQ ID NO: 4038 - protein, 841 aa, synthetic construct
  REGION 1..841: note = Variant of DNA polymerase I from Thermus sp. strain 2.9
MHHHHHHGGSGVLPVFEPKGRVLLVDGHHLAYRNFFALKGLTTSSGEPVQGVYGFAKSLLKALKEDGDVVIVVFDYKAPSFRHEAYEAYKAGRAPTPEDFPRQLALMKELVDLLGLERLEVPGFEADDVLATLAKKAEREGYEVQILTADRDLFQLLSPRISVLHPEGHRITPEWLWEKYGLRPEQWVDFRALAGDPSDNIPGVKGIGEKTALKLLKEWGSLENLLKNLDQVKPESVREKILAHLEDLKLSRELSRVRTDLPLEVDFQRRREPDWEGLKAFLERLEFGSLLHEFGLLESPLPAEEAPWPPPEGAFLGYRLSRPEPMWAELLALAASAQGRVYRAEDPHGALRGLFEVRGLLAKDLAVVALREGLDLPPTDDPMLLAYLLDPSNTTPEGVARRYGGEWTEDAAKRALLAERLHANLLGRLQGEERLLWLYEEVEKPLSRVLAHMEATGVKLDVAYLENLSLEVAAHMRRLEEEVFRLAGRSFRLNSRDQLERVLFDELGLPPIGKTEKTGKRSTSAAVLEALREVHPIVDKILQYRELAKLKGTYIDRLPALVHPKTGRLHTRFNQTATATGRLSSSDPNLQNIPVRTPLGQKIRRAFVAEEGWRLVALDYSQIELRVLAHLSGDENLIRVFQEGKDIHTQTASWMFGLSAEAIDPLMRRAAKTINFGVLYGMSAFRLSQELGIPYEEAQAFIQKYFQSYPKVKAWIEKTLEEGRTRGYVETLFGRRRYVPDLNARVKGKREAAERMAFNMPVQGTAADLMKLAMVRLFPQLREVGARMLLQVHDELLLEAPKERAEEVAALAKEVMEGVWPLAVPLEVEVGIGEDWLAAKG

SEQ ID NO: 4039 - DNA, 2523 bp, synthetic construct
  misc_feature 1..2523: note = Variant of DNA polymerase I from Thermus sp. strain 2.9
  source 1..2523: mol_type = other DNA
atgcaccatcatcatcatcatggcggtagcggcgtgttaccggtgttcgagcataaaggtcgcgtgcttctggttgatggccatcatctcgcgtatcgtaacttctttgccctgaaaggattaaccaccagcagcggcgagccggtacagggtgtctacggctttgcaaagtcgctcctgaaagctctgaaagaagacggtgatgtggtgattgttgtctttgatgcgaaagcgccaagttttcgccacgaagcgtacgaagcttacaaagccgggcgtgctccaacgccggaagactttcctcgccaattggcgcttatgaaggaattagtggatttgcttggcctcgaacgcttggaagttcccggtttcgaggcagacgacgtattagcgactctcgcaaagaaagccgaacgtgagggctatgaagtccagatcttgacagcagatcgcgatcttttccagcttttatctccgcgcatctcggtgttacacccggaagggcatcgtatcaccccggaatggctctgggagaaatatggtttgcgtcccgaacaatgggtggattttcgcgccttagcaggcgatccgagcgacaatattccgggagttaaaggtatcggcgagaagacggcgctcaagctccttaaagaatgggggtcgttggagaacttgcttaagaatttagatcaggtcaaaccagagtcagtgcgtgagaagattcttgctcacctcgaagacctcaaattaagccgcgaattgtcccgtgtacgcaccgatttgccgctcgaagttgatttccaacgccgccgcgaacctgactgggagggtcttaaagcgtttttagagcgtcttgaatttggttcgctcctgcatgaattcggccttttagaaagcccgttaccagccgaagaagcaccttggccaccgcccgagggcgcgtttttaggttaccgtttgagtcgcccggaaccgatgtgggccgaattactggctcttgcagcgtctgcccagggacgtgtgtatcgcgcggaagaccctcatggtgcgctccgcggcctcttcgaagtccgtggactccttgccaaagacttagctgttgttgcattgcgcgaaggtcttgatttacctccgactgatgatccaatgcttcttgcgtacctcttggacccgtcaaacacgacgcccgaaggcgtagcccgtcgttacggcggcgagtggaccgaagatgcagcgaaacgcgcgttattggccgaacgtttgcacgccaatttattaggacgtttgcaaggcgaggaacgtctcctctggctttacgaagaagtggagaaaccattgagtcgcgtgctcgcgcatatggaagctaccggtgtcaaattagacgtggcgtatttggagaatctcagccttgaagttgctgcccacatgcgccgcttggaggaagaagtattccgtttagcaggccgttcctttcgccttaattctcgcgatcagttagaacgtgtgttgttcgatgaacttggtctccctcctatcggcaagacagagaagaccggtaaacgtagcacttcagcggcggttttagaagctcttcgcgaagtccatcccattgtggacaagatcttgcaataccgcgaaatggcgaaattgaaaggcacctatattgaccgtcttccggcattagtccacccgaaaacgggacgcctccatacccgcttcaaccaaacagccacggcgaccggtcgtttgtcctcctctgatccaaaccttcagaatattccagtacgtaccccattgggccagaagatccgccgtgcgtttgtagctgaggagggttggcgtttagtggccctcgattatagccaaattgaattacgtgtccttgcccatctttctggcgatgagaacctcatccgcgtgtttcaggaaggcaaagacattcacactcaaacggcaagctggatgtttggattatcagctgaagcgatcgatcctttgatgcgtcgtgcagcgaagacgatcaatttcggtgttctctacggtatgagtgcctttcgtttgtcgcaggaattaggcattccctatgaagaagctcaggcgttcattcagaaatactttcaaagctatcccaaagttaaagcatggatcgagaagactctcgaagaaggccgcacacgtggttacgtagagaccttatttggacgtcgccgctatgttcccgatttaaacgctcgcgtgaaaggcaagcgtgaagccgccgaacgcatggcgttcaacatgcctgtacagggcacggcagctgacctcatgaaacttgcaatggtgcgcctttttccacaattgcgtgaagttggtgcccgcatgctcttgcaggtccacgatgaactcttgttagaagcgccaaaagagcgtgcggaagaggtggcagccctcgcgaaagaagttatggaaggcgtgtggcccttagcggtgcctcttgaagtcgaagttggtattggcgaggattggctggctgccaaagga

SEQ ID NO: 4040 - protein, 841 aa, synthetic construct
  REGION 1..841: note = Variant of DNA polymerase I from Thermus sp. strain 2.9
MHHHHHHGGSGVLPVFEHKGRVLLVDGHHLAYRNFFALKGLTTSSGEPVQGVYGFAKSLLKALKEDGDVVIVVFDAKAPSFRHEAYEAYKAGRAPTPEDFPRQLALMKELVDLLGLERLEVPGFEADDVLATLAKKAEREGYEVQILTADRDLFQLLSPRISVLHPEGHRITPEWLWEKYGLRPEQWVDFRALAGDPSDNIPGVKGIGEKTALKLLKEWGSLENLLKNLDQVKPESVREKILAHLEDLKLSRELSRVRTDLPLEVDFQRRREPDWEGLKAFLERLEFGSLLHEFGLLESPLPAEEAPWPPPEGAFLGYRLSRPEPMWAELLALAASAQGRVYRAEDPHGALRGLFEVRGLLAKDLAVVALREGLDLPPTDDPMLLAYLLDPSNTTPEGVARRYGGEWTEDAAKRALLAERLHANLLGRLQGEERLLWLYEEVEKPLSRVLAHMEATGVKLDVAYLENLSLEVAAHMRRLEEEVFRLAGRSFRLNSRDQLERVLFDELGLPPIGKTEKTGKRSTSAAVLEALREVHPIVDKILQYREMAKLKGTYIDRLPALVHPKTGRLHTRFNQTATATGRLSSSDPNLQNIPVRTPLGQKIRRAFVAEEGWRLVALDYSQIELRVLAHLSGDENLIRVFQEGKDIHTQTASWMFGLSAEAIDPLMRRAAKTINFGVLYGMSAFRLSQELGIPYEEAQAFIQKYFQSYPKVKAWIEKTLEEGRTRGYVETLFGRRRYVPDLNARVKGKREAAERMAFNMPVQGTAADLMKLAMVRLFPQLREVGARMLLQVHDELLLEAPKERAEEVAALAKEVMEGVWPLAVPLEVEVGIGEDWLAAKG

SEQ ID NO: 4041 - DNA, 2523 bp, synthetic construct; identical to SEQ ID NO: 3383
  misc_feature 1..2523: note = Variant of DNA polymerase I from Thermus sp. strain 2.9
  source 1..2523: mol_type = other DNA

SEQ ID NO: 4042 - protein, 841 aa, synthetic construct; identical to SEQ ID NO: 3384
  REGION 1..841: note = Variant of DNA polymerase I from Thermus sp. strain 2.9

SEQ ID NO: 4043 - DNA, 2523 bp, synthetic construct
  misc_feature 1..2523: note = Variant of DNA polymerase I from Thermus sp. strain 2.9
  source 1..2523: mol_type = other DNA
atgcaccatcatcatcatcatggcggtagcggcgtgttaccggtgttcgagcctaaaggtcgcgtgcttctggttgatggccatcatctcgcgtatcgtaacttctttgccctgaaaggattaaccaccagcagcggcgagccggtacagggtgtctacggctttgcaaagtcgctcctgaaagctctgaaagaagacggtgatgtggtgattgttgtctttgatgcgaaagcgccaagttttcgccacgaagcgtacgaagcttacaaagccgggcgtgctccaacgccggaagactttcctcgccaattggcgcttatgaaggaattagtggatttgcttggcctcgaacgcttggaagttcccggtttcgaggcagacgacgtattagcgactctcgcaaagaaagccgaacgtgagggctatgaagtccagatcttgacagcagatcgcgatcttttccagcttttatctccgcgcatctcggtgttacacccggaagggcatcgtatcaccccggaatggctctgggagaaatatggtttgcgtcccgaacaatgggtggattttcgcgccttagcaggcgatccgagcgacaatattccgggagttaaaggtatcggcgagaagacggcgctcaagctccttaaagaatgggggtcgttggagaacttgcttaagaatttagatcaggtcaaaccagagtcagtgcgtgagaagattcttgctcacctcgaagacctcaaattaagccgcgaattgtcccgtgtacgcaccgatttgccgctcgaagttgatttccaacgccgccgcgaacctgactgggagggtcttaaagcgtttttagagcgtcttgaatttggttcgctcttgcatgaattcggccttttagaaagcccgttaccagccgaagaagcaccttggccaccgcccgagggcgcgtttttaggttaccgtttgagtcgcccggaaccgatgtgggccgaattactggctcttgcagcgtctgcccagggacgtgtgtatcgcgcggaagaccctcatggtgcgctccgcggcctcttcgaagtccgtggactccttgccaaagacttagctgttgttgcattgcgcgaaggtcttgatttacctccgactgatgatccaatgcttcttgcgtacctcttggacccgtcaaacacgacgcccgaaggcgtagcccgtcgttacggcggcgagtggaccgaagatgcagcgaaacgcgcgttattggccgaacgtttgcacgccaatttattaggacgtttgcaaggcgaggaacgtctcctctggctttactgtgaagtggagaaaccattgagtcgcgtgctcgcgcatatggaagctaccggtgtcaaattagacgtggcgtatttggagaatctcagccttgaagttgctgcccacatgcgccgcttggaggaagaagtattccgtttagcaggccgttcctttcgccttaattctcgcgatcagttagaacgtgtgttgttcgatgaacttggtctccctcctatcggcaagacagagaagaccggtaaacgtagcacttcagcggcggttttagaagctcttcgcgaagtccatcccattgtggacaagatcttgcaataccgcgaactcgcgaaattgaaaggcacctatattgaccgtcttccggcattagtccacccgaaaacgggacgcctccatacccgcttcaaccaaacagccacggcgaccggtcgtttgtcctcctctgatccaaaccttcagaatattccagtacgtaccccattgggccagaagatccgccgtgcgtttgtagctgaggagggttggcgtttagtggccctcgattatagccaaattgaattacgtgtccttgcccatctttctggcgatgagaacctcatccgcgtgtttcaggaaggcaaagacattcacactcaaacggcaagctggatgtttggattatcagctgaagcgatcgatcctttgatgcgtcgtgcagcgaagaccatcaatttcggtgttctctacggtatgagtgcctttcgtttgtcgcaggaattaggcattccctatgaagaagctcaggcgttcattcagaaatactttcaaagctatcccaaagttaaagcatggatcgagaagactctcgaagaaggccgcacacgtggttacgtagagaccttatttggacgtcgccgctatgttcccgatttaaacgctcgcgtgaaaggcaagcgtgaagccgccgaacgcatggcgttcaacatgcctgtacagggcacggcagctgacctcatgaaacttgcaatggtgcgcctttttccacaattgcgtgaagttggtgcccgcatgctcttgcaggtccacgatgaactcttgttagaagcgccaaaagagcgtgcggaagaggtggcagccctcgcgaaagaagttatggaaggcgtgtggcccttagcggtgcctcttgaagtcgaagttggtattggcgaggattggctggctgccaaagga

SEQ ID NO: 4044 - protein, 841 aa, synthetic construct
  REGION 1..841: note = Variant of DNA polymerase I from Thermus sp. strain 2.9
MHHHHHHGGSGVLPVFEPKGRVLLVDGHHLAYRNFFALKGLTTSSGEPVQGVYGFAKSLLKALKEDGDVVIVVFDAKAPSFRHEAYEAYKAGRAPTPEDFPRQLALMKELVDLLGLERLEVPGFEADDVLATLAKKAEREGYEVQILTADRDLFQLLSPRISVLHPEGHRITPEWLWEKYGLRPEQWVDFRALAGDPSDNIPGVKGIGEKTALKLLKEWGSLENLLKNLDQVKPESVREKILAHLEDLKLSRELSRVRTDLPLEVDFQRRREPDWEGLKAFLERLEFGSLLHEFGLLESPLPAEEAPWPPPEGAFLGYRLSRPEPMWAELLALAASAQGRVYRAEDPHGALRGLFEVRGLLAKDLAVVALREGLDLPPTDDPMLLAYLLDPSNTTPEGVARRYGGEWTEDAAKRALLAERLHANLLGRLQGEERLLWLYCEVEKPLSRVLAHMEATGVKLDVAYLENLSLEVAAHMRRLEEEVFRLAGRSFRLNSRDQLERVLFDELGLPPIGKTEKTGKRSTSAAVLEALREVHPIVDKILQYRELAKLKGTYIDRLPALVHPKTGRLHTRFNQTATATGRLSSSDPNLQNIPVRTPLGQKIRRAFVAEEGWRLVALDYSQIELRVLAHLSGDENLIRVFQEGKDIHTQTASWMFGLSAEAIDPLMRRAAKTINFGVLYGMSAFRLSQELGIPYEEAQAFIQKYFQSYPKVKAWIEKTLEEGRTRGYVETLFGRRRYVPDLNARVKGKREAAERMAFNMPVQGTAADLMKLAMVRLFPQLREVGARMLLQVHDELLLEAPKERAEEVAALAKEVMEGVWPLAVPLEVEVGIGEDWLAAKG

SEQ ID NO: 4045 - DNA, 2523 bp, synthetic construct
  misc_feature 1..2523: note = Variant of DNA polymerase I from Thermus sp. strain 2.9
  source 1..2523: mol_type = other DNA
atgcaccatcatcatcatcatggcggtagcggcgtgttaccggtgttcgagcctaaaggtcgcgtgcttctggttgatggccatcatctcgcgtatcgtaacttctttgccctgaaaggattaaccaccagcagcggcgagccggtacagggtgtctacggctttgcaaagtcgctcctgaaagctctgaaagaagacggtgatgtggtgattgttgtctttgatgcgaaagcgccaagttttcgccacgaagcgtacgaagcttacaaagccgggcgtgctccaacgccggaagactttcctcgccaattggcgcttatgaaggaattagtggatttgcttggcctcgaacgcttggaagttcccggtttcgaggcagacgacgtattagcgactctcgcaaagaaagccgaacgtgagggctatgaagtccagatcttgacagcagatcgcgatcttttccagcttttatctccgcgcatctcggtgttacacccggaagggcatcgtatcaccccggaatggctctgggagaaatatggtttgcgtcccgaacaatgggtggattttcgcgccttagcaggcgatccgagcgacaatattccgggagttaaaggtatcggcgagaagacggcgctcaagctccttaaagaatgggggtcgttggagaacttgcttaagaatttagatcaggtcaaaccagagtcagtgcgttggaagattcttgctcacctcgaagacctcaaattaagccgcgaattgtcccgtgtacgcaccgatttgccgctcgaagttgatttccaacgccgccgcgaacctgactgggagggtcttaaagcgtttttagagcgtcttgaatttggttcgctcttgcatgaattcggccttttagaaagcccgttaccagccgaagaagcaccttggccaccgcccgagggcgcgtttttaggttaccgtttgagtcgcccggaaccgatgtgggccgaattactggctcttgcagcgtctgcccagggacgtgtgtatcgcgcggaagaccctcatggtgcgctccgcggcctcttcgaagtccgtggactccttgccaaagacttagctgttgttgcattgcgcgaaggtcttgatttacctccgactgatgatccaatgcttcttgcgtacctcttggacccgtcaaacacgacgcccgaaggcgtagcccgtcgttacggcggcgagtggaccgaagatgcagcgaaacgcgcgttattggccgaacgtttgcacgccaatttattaggacgtttgcaaggcgaggaacgtctcctctggctttacgaagaagtggagaaaccattgagtcgcgtgctcgcgcatatggaagctaccggtgtcaaattagacgtggcgtatttggagaatctcagccttgaagttgctgcccacatgcgccgcttggaggaagaagtattccgtttagcaggccgttcctttcgccttaattctcgcgatcagttagaacgtgtgttgttcgatgaacttggtctccctcctatcggcaagacagagaagaccggtaaacgtagcacttcagcggcggttttagaagctcttcgcgaagtccatcccattgtggacaagatcttgcaataccgcgaactcgcgaaattgaaaggcacctatattgaccgtcttccggcattagtccacccgaaaacgggacgcctccatacccgcttcaaccaaacagccacggcgaccggtcgtttgtcctcctctgatccaaaccttcagaatattccagtacgtaccccattgggccagaagatccgccgtgcgtttgtagctgaggagggttggcgtttagtggccctcgattatagccaaattgaattacgtgtccttgcccatctttctggcgatgagaacctcatccgcgtgtttcaggaaggcaaagacattcacactcaaacggcaagctggatgtttggattatcagctgaagcgatcgatcctttgatgcgtcgtgcagcgaagaccatcaatttcggtgttctctacggtatgagtgcctttcgtttgtcgcaggaattaggcattccctatgaagaagctcaggcgttcattcagaaatactttcaaagctatcccaaagttaaagcatggatcgagaagactctcgaagaaggccgcacacgtggttacgtagagaccttatttggacgtcgccgctatgttcccgatttaaacgctcgcgtgaaaggcaagcgtgaagccgccgaacgcatggcgttcaacatgcctgtacagggcacggcagctgacctcatgaaacttgcaatggtgcgcctttttccacaattgcgtgaagttggtgcccgcatgctcttgcaggtccacgatgaactcttgttagaagcgccaaaagagcgtgcggaagaggtggcagccctcgcgaaagaagttatggaaggcgtgtggcccttagcggtgcctcttgaagtcgaagttggtattggcgaggattggctggctgccaaagga

SEQ ID NO: 4046 - protein, 841 aa, synthetic construct
  REGION 1..841: note = Variant of DNA polymerase I from Thermus sp. strain 2.9
MHHHHHHGGSGVLPVFEPKGRVLLVDGHHLAYRNFFALKGLTTSSGEPVQGVYGFAKSLLKALKEDGDVVIVVFDAKAPSFRHEAYEAYKAGRAPTPEDFPRQLALMKELVDLLGLERLEVPGFEADDVLATLAKKAEREGYEVQILTADRDLFQLLSPRISVLHPEGHRITPEWLWEKYGLRPEQWVDFRALAGDPSDNIPGVKGIGEKTALKLLKEWGSLENLLKNLDQVKPESVRWKILAHLEDLKLSRELSRVRTDLPLEVDFQRRREPDWEGLKAFLERLEFGSLLHEFGLLESPLPAEEAPWPPPEGAFLGYRLSRPEPMWAELLALAASAQGRVYRAEDPHGALRGLFEVRGLLAKDLAVVALREGLDLPPTDDPMLLAYLLDPSNTTPEGVARRYGGEWTEDAAKRALLAERLHANLLGRLQGEERLLWLYEEVEKPLSRVLAHMEATGVKLDVAYLENLSLEVAAHMRRLEEEVFRLAGRSFRLNSRDQLERVLFDELGLPPIGKTEKTGKRSTSAAVLEALREVHPIVDKILQYRELAKLKGTYIDRLPALVHPKTGRLHTRFNQTATATGRLSSSDPNLQNIPVRTPLGQKIRRAFVAEEGWRLVALDYSQIELRVLAHLSGDENLIRVFQEGKDIHTQTASWMFGLSAEAIDPLMRRAAKTINFGVLYGMSAFRLSQELGIPYEEAQAFIQKYFQSYPKVKAWIEKTLEEGRTRGYVETLFGRRRYVPDLNARVKGKREAAERMAFNMPVQGTAADLMKLAMVRLFPQLREVGARMLLQVHDELLLEAPKERAEEVAALAKEVMEGVWPLAVPLEVEVGIGEDWLAAKG

SEQ ID NO: 4047 - DNA, 2523 bp, synthetic construct
  misc_feature 1..2523: note = Variant of DNA polymerase I from Thermus sp. strain 2.9
  source 1..2523: mol_type = other DNA
atgcaccatcatcatcatcatggcggtagcggcgtgttaccggtgttcgagcctaaaggtcgcgtgcttctggttgatggccatcatctcgcgtatcgtaacttctttgccctgaaaggattaaccaccagcagcggcgagccggtacagggtgtctacggctttgcaaagtcgctcctgaaagctctgaaagaagacggtgatgtggtgattgttgtctttgatgcgaaagcgccaagttttcgccacgaagcgtacgaagcttacaaagccgggcgtgctccaacgccggaagactttcctcgccaattggcgcttatgaaggaattagtggatttgcttggcctcgaacgcttggaagttcccggtttcgaggcagacgacgtattagcgactctcgcaaagaaagccgaacgtgagggctatgaagtccagatcttgacagcagatcgcgatcttttccagcttttatctccgcgcatctcggtgttacacccggaagggcatcgtatcaccccggaatggctctgggagaaatatggtttgcgtcccgaacaatgggtggattttcgcgccttagcaggcgatccgagcgacaatattccgggagttaaaggtatcggcgagaagacggcgctcaagctccttaaagaatgggggtcgttggagaacttgcttaagaatttagatcaggtcaaaccagagtcagtgcgtgagaagattcttgctcacctcgaagacctcaaattaagccgcgaattgtcccgtgtacgcaccgatttgccgctcgaagttgatttccaacgccgccgcgaacctgactgggagggtcttaaagcgtttttagagcgtcttgaatttggttcgctcttgcatgaattcggccttttagaaagcccgttaccagccgaagaagcaccttggccaccgcccgagggcgcgtttttaggttaccgtttgagtcgcccggaaccgatgtgggccgaattactggctcttgcagcgtctgcccagggacgtgtgtatcgcgcggaagaccctcatggtgcgctccgcggcctcttcgaagtccgtggactccttgccaaagacttagctgttgttgcattgcgcgaaggtcttgatttacctccgactgatgatccaatgcttcttgcgtacctcttggacccgtcaaacacgacgcccgaaggcgtagcccgtcgttacggcggcgagtggaccgaagatgcagcgaaacgcgcgttattggccgaacgtttgcacgccaatttattaggacgtttgcaaggcgaggaacgtctcctctggctttacgaagaagtggagaaaggtgtgagtcgcgtgctcgcgcatatggaagctaccggtgtcaaattagacgtggcgtatttggagaatctcagccttgaagttgctgcccacatgcgccgcttggaggaagaagtattccgtttagcaggccgttcctttcgccttaattctcgcgatcagttagaacgtgtgttgttcgatgaacttggtctccctcctatcggcaagacagagaagaccggtaaacgtagcacttcagcggcggttttagaagctcttcgcgaagtccatcccattgtggacaagatcttgcaataccgcgaactcgcgaaattgaaaggcacctatattgaccgtcttccggcattagtccacccgaaaacgggacgcctccatacccgcttcaaccaaacagccacggcgaccggtcgtttgtcctcctctgatccaaaccttcagaatattccagtacgtaccccattgggccagaagatccgccgtgcgtttgtagctgaggagggttggcgtttagtggccctcgattatagccaaattgaattacgtgtccttgcccatctttctggcgatgagaacctcatccgcgtgtttcaggaaggcaaagacattcacactcaaacggcaagctggatgtttggattatcagctgaagcgatcgatcctttgatgcgtcgtgcagcgaagaccatcaatttcggtgttctctacggtatgagtgcctttcgtttgtcgcaggaattaggcattccctatgaagaagctcaggcgttcattcagaaatactttcaaagctatcccaaagttaaagcatggatcgagaagactctcgaagaaggccgcacacgtggttacgtagagaccttatttggacgtcgccgctatgttcccgatttaaacgctcgcgtgaaaggcaagcgtgaagccgccgaacgcatggcgttcaacatgcctgtacagggcacggcagctgacctcatgaaacttgcaatggtgcgcctttttccacaattgcgtgaagttggtgcccgcatgctcttgcaggtccacgatgaactcttgttagaagcgccaaaagagcgtgcggaagaggtggcagccctcgcgaaagaagttatggaaggcgtgtggcccttagcggtgcctcttgaagtcgaagttggtattggcgaggattggctggctgccaaagga

SEQ ID NO: 4048 - protein, 841 aa, synthetic construct
  REGION 1..841: note = Variant of DNA polymerase I from Thermus sp. strain 2.9
MHHHHHHGGSGVLPVFEPKGRVLLVDGHHLAYRNFFALKGLTTSSGEPVQGVYGFAKSLLKALKEDGDVVIVVFDAKAPSFRHEAYEAYKAGRAPTPEDFPRQLALMKELVDLLGLERLEVPGFEADDVLATLAKKAEREGYEVQILTADRDLFQLLSPRISVLHPEGHRITPEWLWEKYGLRPEQWVDFRALAGDPSDNIPGVKGIGEKTALKLLKEWGSLENLLKNLDQVKPESVREKILAHLEDLKLSRELSRVRTDLPLEVDFQRRREPDWEGLKAFLERLEFGSLLHEFGLLESPLPAEEAPWPPPEGAFLGYRLSRPEPMWAELLALAASAQGRVYRAEDPHGALRGLFEVRGLLAKDLAVVALREGLDLPPTDDPMLLAYLLDPSNTTPEGVARRYGGEWTEDAAKRALLAERLHANLLGRLQGEERLLWLYEEVEKGVSRVLAHMEATGVKLDVAYLENLSLEVAAHMRRLEEEVFRLAGRSFRLNSRDQLERVLFDELGLPPIGKTEKTGKRSTSAAVLEALREVHPIVDKILQYRELAKLKGTYIDRLPALVHPKTGRLHTRFNQTATATGRLSSSDPNLQNIPVRTPLGQKIRRAFVAEEGWRLVALDYSQIELRVLAHLSGDENLIRVFQEGKDIHTQTASWMFGLSAEAIDPLMRRAAKTINFGVLYGMSAFRLSQELGIPYEEAQAFIQKYFQSYPKVKAWIEKTLEEGRTRGYVETLFGRRRYVPDLNARVKGKREAAERMAFNMPVQGTAADLMKLAMVRLFPQLREVGARMLLQVHDELLLEAPKERAEEVAALAKEVMEGVWPLAVPLEVEVGIGEDWLAAKG

SEQ ID NO: 4049 - DNA, 2523 bp, synthetic construct
  misc_feature 1..2523: note = Variant of DNA polymerase I from Thermus sp. strain 2.9
  source 1..2523: mol_type = other DNA
atgcaccatcatcatcatcatggcggtagcggcgtgttaccggtgttcgagcctaaaggtcgcgtgcttctggttgatggccatcatctcgcgtatcgtaacttctttgccctgaaaggattaaccaccagcagcggcgagccggtacagggtgtctacggctttgcaaagtcgctcctgaaagctctgaaagaagacggtgatgtggtgattgttgtctttgatgcgaaagcgccaagttttcgccacgaagcgtacgaagcttacaaagccgggcgtgctccaacgccggaagactttcctcgccaattggcgcttatgaaggaattagtggatttgcttggcctcgaacgcttggaagttcccggtttcgaggcagacgacgtattagcgactctcgcaaagaaagccgaacgtgagggctatgaagtccagatcttgacagcagatcgcgatcttttccagcttttatctccgcgcatctcggtgttacacccggaagggcatcgtatcaccccggaatggctctgggagaaatatggtttgcgtcccgaacaatgggtggattttcgcgccttagcaggcgatccgagcgacaatattccgggagttaaaggtatcggcgagaagacggcgctcaagctccttaaagaatgggggtcgttggagaacttgcttaagaatttagatcaggtcaaaccagagtcagtgcgtgagaagattcttgctcacctcgaagacctcaaattaagccgcgaattgtcccgtgtacgcaccgatttgccgctcgaagttgatttccaacgccgccgcgaacctgactgggagggtcttaaagcgtttttagagcgtcttgaatttggttcgctcttgcatgaattcggccttttagaaagcccgttaccagccgaagaagcaccttggccaccgcccgagggcgcgtttttaggttaccgtttgagtcgcccggaaccgatgtgggccgaattactggctcttgcagcgtctgcccagggacgtgtgtatcgcgcggaagaccctcatggtgcgctccgcggcctcttcgaagtccgtggactccttgccaaagacttagctgttgttgcattgcgcgaaggtcttgatttacctccgactgatgatccaatgcttcttgcgtacctcttggacccgtcaaacacgacgcccgaaggcgtagcccgtcgttacggcggcgagtggaccgaagatgcagcgaaacgcgcgttattggccgaacgtttgcacgccaatttattaggacgtttgcaaggcgaggaacgtctcctctggctttacgaagaagtggagaaaccattgagtcgcgtgctcgcgcatatggaagctaccggtgtcaaattagacgtggcgtatttggagaatctcagccttgaagttgctgcccacatgcgccgcttggaggaagaagtattccgtttagcaggccgttcctttcgccttaattctcgcgatcagttagaacgtgtgttgttcgatgaacttggtctccctcctatcggcaagacagagaagaccggtaaacgtagcacttcagcggcggttttagaagctcttcgcgaagtccatcccattgtggacaagatcttgcaataccgcgaactcgcgaaattgaaaggcacctatattgaccgtcttccggcattagtccacccgaaaacgggacgcctccatacccgcttcaaccaaacagccacggcgaccggtcgtttgtcctcctctgatccaaaccttcagaatattccagtagcgaccccattgggccagaagatccgccgtgcgtttgtagctgaggagggttggcgtttagtggccctcgattatagccaaattgaattacgtgtccttgcccatctttctggcgatgagaacctcatccgcgtgtttcaggaaggcaaagacattcacactcaaacggcaagctggatgtttggattatcagctgaagcgatcgatcctttgatgcgtcgtgcagcgaagaccatcaatttcggtgttctctacggtatgagtgcctttcgtttgtcgcaggaattaggcattccctatgaagaagctcaggcgttcattcagaaatactttcaaagctatcccaaagttaaagcatggatcgagaagactctcgaagaaggccgcacacgtggttacgtagagaccttatttggacgtcgccgctatgttcccgatttaaacgctcgcgtgaaaggcaagcgtgaagccgccgaacgcatggcgttcaacatgcctgtacagggcacggcagctgacctcatgaaacttgcaatggtgcgcctttttccacaattgcgtgaagttggtgcccgcatgctcttgcaggtccacgatgaactcttgttagaagcgccaaaagagcgtgcggaagaggtggcagccctcgcgaaagaagttatggaaggcgtgtggcccttagcggtgcctcttgaagtcgaagttggtattggcgaggattggctggctgccaaagga

SEQ ID NO: 4050 - protein, 841 aa, synthetic construct
  REGION 1..841: note = Variant of DNA polymerase I from Thermus sp. strain 2.9
MHHHHHHGGSGVLPVFEPKGRVLLVDGHHLAYRNFFALKGLTTSSGEPVQGVYGFAKSLLKALKEDGDVVIVVFDAKAPSFRHEAYEAYKAGRAPTPEDFPRQLALMKELVDLLGLERLEVPGFEADDVLATLAKKAEREGYEVQILTADRDLFQLLSPRISVLHPEGHRITPEWLWEKYGLRPEQWVDFRALAGDPSDNIPGVKGIGEKTALKLLKEWGSLENLLKNLDQVKPESVREKILAHLEDLKLSRELSRVRTDLPLEVDFQRRREPDWEGLKAFLERLEFGSLLHEFGLLESPLPAEEAPWPPPEGAFLGYRLSRPEPMWAELLALAASAQGRVYRAEDPHGALRGLFEVRGLLAKDLAVVALREGLDLPPTDDPMLLAYLLDPSNTTPEGVARRYGGEWTEDAAKRALLAERLHANLLGRLQGEERLLWLYEEVEKPLSRVLAHMEATGVKLDVAYLENLSLEVAAHMRRLEEEVFRLAGRSFRLNSRDQLERVLFDELGLPPIGKTEKTGKRSTSAAVLEALREVHPIVDKILQYRELAKLKGTYIDRLPALVHPKTGRLHTRFNQTATATGRLSSSDPNLQNIPVATPLGQKIRRAFVAEEGWRLVALDYSQIELRVLAHLSGDENLIRVFQEGKDIHTQTASWMFGLSAEAIDPLMRRAAKTINFGVLYGMSAFRLSQELGIPYEEAQAFIQKYFQSYPKVKAWIEKTLEEGRTRGYVETLFGRRRYVPDLNARVKGKREAAERMAFNMPVQGTAADLMKLAMVRLFPQLREVGARMLLQVHDELLLEAPKERAEEVAALAKEVMEGVWPLAVPLEVEVGIGEDWLAAKG

SEQ ID NO: 4051 - DNA, 2523 bp, synthetic construct
  misc_feature 1..2523: note = Variant of DNA polymerase I from Thermus sp. strain 2.9
  source 1..2523: mol_type = other DNA
atgcaccatcatcatcatcatggcggtagcggcgtgttacctgtgttcgagcctaaaggtcgcgtgcttctggttgatggccatcatctcgcgtatcgtaacttctttgccctgaaaggattaaccaccagcagcggcgagccggtacatggtgtctacggctttgcaaagtcgctcctgaaagctctgaaagaagacggtgatgtggtgattgttgtctttgatgcgaaagcgccaagttttcgccacgaagcgtacgaagcttacaaagccgggcgtgctccaacgccggaagactttcctcgccaattggcgcttatgaaggaattagtggatttgcttggcctcgaacgcttggaagttcccggtttcgaggcagacgacgtattagcgactctcgcaaagaaagccgaacgtgagggctatgaagtccagatcttgacagcagatcgcgatcttttccagcttttatctccgcgcatctcggtgttacacccggaagggcatcgtatcaccccggaatggctctgggagaaatatggtttgcgtcccgaacaatgggtggattttcgcgccttagcaggcgatccgagcgacaatattccgggagttaaaggtatcggcgagaagacggcgctcaagctccttaaagaatgggggtcgttggagaacttgcttaagaatttagatcaggtcaaaccagagtcagtgcgtgagaagattcttgctcacctcgaagacctcaaattaagccgcgaattgtcccgtgtacgcaccgatttgccgctcgaagttgatttccaacgccgccgcgaacctgactgggagggtcttaaagcgtttttagagcgtcttgaatttggttcgctcttgcatgaattcggccttttagaaagcccgttaccagccgaagaagcaccttggccaccgcccgagggcgcgtttttaggttaccgtttgagtcgcccggaaccgatgtgggccgaattactggctcttgcagcgtctgcccagggacgtgtgtatcgcgcggaagaccctcatggtgcgctccgcggcctcttcgaagtccgtggactccttgccaaagacttagctgttgttgcattgcgcgaaggtcttgatttacctccgactgatgatccaatgcttcttgcgtacctcttggacccgtcaaacacgacgcctgaaggcgtagcccgtcgttacggcggcgagtggaccgaagatgcagcgaaacgcgcgttattggccgaacgtttgcacgccaatttattaggacgtttgcaaggcgaggaacgtctcctctggctttacgaagaagtggagaaaccattgagtcgcgtgctcgcgcatatggaagctaccggtgtcaaattagacgtggcgtatttggagaatctcagccttgaagttgctgcccacatgcgccgcttggaggaagaagtattccgtttagcaggccgttcctttcgccttaattctcgcgatcagttagaacgtgtgttgttcgatgaacttggtctccctcctatcggcaagacagagaagaccggtaaacgtagcacttcagcggcggttttagaagctcttcgcgaagtccatcccattgtggacaagatcttgcaataccgcgaactcgcgaaattgaaaggcacctatattgaccgtcttccggcattagtccacccgaaaacgggacgcctccatacccgcttcaaccaaacagccacggcgaccggtcgtttgtcctcctctgatccaaaccttcagaatattccagtacgtaccaaattgggccagaagatccgccgtgcgtttgtagctgaggagggttggcgtttagtggccctcgattatagccaaattgaattacgtgtccttgcccatctttctggcgatgagaacctcatccgcgtgtttcaggaaggcaaagacattcacactcaaacggcaagctggatgtttggattatcagctgaagcgatcgatcctttgatgcgtcgtgcagcgaagaccatcaatttcggtgttctctacggtatgagtgcctttcgtttgtcgcaggaattaggcattcccaaagaagaagctcaggcgttcattcagaaatactttcaaagctatcccaaagttaaagcatggatcgagaagactctcgaagaaggccgcacacgtggttacgtagagaccttatttggacgtcgccgctatgttcccgatttaaacgctcgcgtgaaaggcaagcgtgaagccgccgaacgcatggcgttcaacatgcctgtacagggcacggcagctgacctcatgaaacttgcaatggtgcgcctttttccacaattgcgtgaagttggtgcccgcatgctcttgcaggtccacgatgaactcttgttagaagcgccaaaagagcgtgcggaagaggtggcagccctcgcgaaagaagttatggaaggcgtgtggcccttagcggtgcctcttgaagtcgaagttggtattggcgaggattggctggctgccaaagga

SEQ ID NO: 4052 - protein, 841 aa, synthetic construct
  REGION 1..841: note = Variant of DNA polymerase I from Thermus sp. strain 2.9
MHHHHHHGGSGVLPVFEPKGRVLLVDGHHLAYRNFFALKGLTTSSGEPVHGVYGFAKSLLKALKEDGDVVIVVFDAKAPSFRHEAYEAYKAGRAPTPEDFPRQLALMKELVDLLGLERLEVPGFEADDVLATLAKKAEREGYEVQILTADRDLFQLLSPRISVLHPEGHRITPEWLWEKYGLRPEQWVDFRALAGDPSDNIPGVKGIGEKTALKLLKEWGSLENLLKNLDQVKPESVREKILAHLEDLKLSRELSRVRTDLPLEVDFQRRREPDWEGLKAFLERLEFGSLLHEFGLLESPLPAEEAPWPPPEGAFLGYRLSRPEPMWAELLALAASAQGRVYRAEDPHGALRGLFEVRGLLAKDLAVVALREGLDLPPTDDPMLLAYLLDPSNTTPEGVARRYGGEWTEDAAKRALLAERLHANLLGRLQGEERLLWLYEEVEKPLSRVLAHMEATGVKLDVAYLENLSLEVAAHMRRLEEEVFRLAGRSFRLNSRDQLERVLFDELGLPPIGKTEKTGKRSTSAAVLEALREVHPIVDKILQYRELAKLKGTYIDRLPALVHPKTGRLHTRFNQTATATGRLSSSDPNLQNIPVRTKLGQKIRRAFVAEEGWRLVALDYSQIELRVLAHLSGDENLIRVFQEGKDIHTQTASWMFGLSAEAIDPLMRRAAKTINFGVLYGMSAFRLSQELGIPKEEAQAFIQKYFQSYPKVKAWIEKTLEEGRTRGYVETLFGRRRYVPDLNARVKGKREAAERMAFNMPVQGTAADLMKLAMVRLFPQLREVGARMLLQVHDELLLEAPKERAEEVAALAKEVMEGVWPLAVPLEVEVGIGEDWLAAKG

SEQ ID NO: 4053 - DNA, 2523 bp, synthetic construct
  misc_feature 1..2523: note = Variant of DNA polymerase I from Thermus sp. strain 2.9
  source 1..2523: mol_type = other DNA
atgcaccatcatcatcatcatggcggtagcggcgtgttaccggtgttcgagcctaaaggtcgcgtgcttctggttgatggccatcatctcgcgtatcgtaacttctttgccctgaaaggattaaccaccagcagcggcgagccggtacagggtgtctacggctttgcaaagtcgctcctgaaagctctgaaagaagacggtgatgtggtgattgttgtctttgatgcgaaagcgccaagttttcgccacgaagcgtacgaagcttacaaagccgggcgtgctccaacgccggaagactttcctcgccaattggcgcttatgaaggaattagtggatttgcttggcctcgaacgcttggaagttcccggtttcgaggcagacgacgtattagcgactctcgcaaagaaagccgaacgtgagggctatgaagtccagatcttgacagcagatcgcgatcttttccagcttttatctccgcgcatctcggtgttacacccggaagggcatcgtatcaccccggaatggctctgggagaaatatggtttgcgtcccgaacaatgggtggattttcgcgccttagcaggcgatccgagcgacaatattccgggagttaaaggtatcggcgagaagacggcgctcaagctccttaaagaatgggggtcgttggagaacttgcttaagaatttagatcaggtcaaaccagagtcagtgcgtgagaagattcttgctcacctcgaagacctcaaattaagccgcgaattgtcccgtgtacgcaccgatttgccgctcgaagttgatttccaacgccgccgcgaacctgactgggagggtcttaaagcgtttttagagcgtcttgaatttggttcgctcttgcatgaattcggccttttagaaagcccgttaccagccgaagaagcaccttggccaccgcccgagggcgcgtttttaggttaccgtttgagtcgcccggaaccgatgtgggccgaattactggctcttgcagcgtctgcccagggacgtgtgtatcgcgcggaagaccctcatggtgcgctccgcggcctcttcgaagtccgtggactccttgccaaagacttagctgttgttgcattgcgcgaaggtcttgatttacctccgactgatgatccaatgcttcttgcgtacctcttggacccgtcaaacacgacgcccgaaggcgtagcccgtcgttactgtggcgagtggaccgaagatgcagcgaaacgcgcgttattggccgaacgtttgcacgccaatttattaggacgtttgcaaggcgaggaacgtctcctctggctttacgaagaagtggagaaaccattgagtcgcgtgctcgcgcatatggaagctaccggtgtcaaattagacgtggcgtatttggagaatctcagccttgaagttgctgcccacatgcgccgcttggaggaagaagtattccgtttagcaggccgttcctttcgccttaattctcgcgatcagttagaacgtgtgttgttcgatgaacttggtctccctcctatcggcaagacagagaagaccggtaaacgtagcacttcagcggcggttttagaagctcttcgcgaagtccatcccattgtggacaagatcttgcaataccgcgaactcgcgaaattgaaaggcacctatattgaccgtcttccggcattagtccacccgaaaacgggacgcctccatacccgcttcaaccaaacagccacggcgaccggtcgtttgtcctcctctgatccaaaccttcagaatattccagtacgtaccccattgggccagaagatccgccgtgcgtttgtagctgaggagggttggcgtttagtggccctcgattatagccaaattgaattacgtgtccttgcccatctttctggcgatgagaacctcatccgcgtgtttcaggaaggcaaagacattcacactcaaacggcaagctggatgtttggattatcagctgaagcgatcgatcctttgatgcgtcgtgcagcgaagaccatcaatttcggtgttctctacggtatgagtgcctttcgtttgtcgcaggaattaggcattccctatgaagaagctcaggcgttcattcagaaatactttcaaagctatcccaaagttaaagcatggatcgagaagactctcgaagaaggccgcacacgtggttacgtagagaccttatttggacgtcgccgctatgttcccgatttaaacgctcgcgtgaaaggcaagcgtgaagccgccgaacgcatggcgttcaacatgcctgtacagggcacggcagctgacctcatgaaacttgcaatggtgcgcctttttccacaattgcgtgaagttggtgcccgcatgctcttgcaggtccacgatgaactcttgttagaagcgccaaaagagcgtgcggaagaggtggcagccctcgcgaaagaagttatggaaggcgtgtggcccttagcggtgcctcttgaagtcgaagttggtattggcgaggattggctggctgccaaagga

SEQ ID NO: 4054 - protein, 841 aa, synthetic construct
  REGION 1..841: note = Variant of DNA polymerase I from Thermus sp. strain 2.9
MHHHHHHGGSGVLPVFEPKGRVLLVDGHHLAYRNFFALKGLTTSSGEPVQGVYGFAKSLLKALKEDGDVVIVVFDAKAPSFRHEAYEAYKAGRAPTPEDFPRQLALMKELVDLLGLERLEVPGFEADDVLATLAKKAEREGYEVQILTADRDLFQLLSPRISVLHPEGHRITPEWLWEKYGLRPEQWVDFRALAGDPSDNIPGVKGIGEKTALKLLKEWGSLENLLKNLDQVKPESVREKILAHLEDLKLSRELSRVRTDLPLEVDFQRRREPDWEGLKAFLERLEFGSLLHEFGLLESPLPAEEAPWPPPEGAFLGYRLSRPEPMWAELLALAASAQGRVYRAEDPHGALRGLFEVRGLLAKDLAVVALREGLDLPPTDDPMLLAYLLDPSNTTPEGVARRYCGEWTEDAAKRALLAERLHANLLGRLQGEERLLWLYEEVEKPLSRVLAHMEATGVKLDVAYLENLSLEVAAHMRRLEEEVFRLAGRSFRLNSRDQLERVLFDELGLPPIGKTEKTGKRSTSAAVLEALREVHPIVDKILQYRELAKLKGTYIDRLPALVHPKTGRLHTRFNQTATATGRLSSSDPNLQNIPVRTPLGQKIRRAFVAEEGWRLVALDYSQIELRVLAHLSGDENLIRVFQEGKDIHTQTASWMFGLSAEAIDPLMRRAAKTINFGVLYGMSAFRLSQELGIPYEEAQAFIQKYFQSYPKVKAWIEKTLEEGRTRGYVETLFGRRRYVPDLNARVKGKREAAERMAFNMPVQGTAADLMKLAMVRLFPQLREVGARMLLQVHDELLLEAPKERAEEVAALAKEVMEGVWPLAVPLEVEVGIGEDWLAAKG

SEQ ID NO: 4055 - DNA, 2523 bp, synthetic construct
  misc_feature 1..2523: note = Variant of DNA polymerase I from Thermus sp. strain 2.9
  source 1..2523: mol_type = other DNA
atgcaccatcatcatcatcatggcggtagcggcgtgttaccggtgttcgagcctaaaggtcgcgtgcttctggttgatggccatcatctcgcgtatcgtaacttctttgccctgaaaggattaaccaccagcagcggcgagccggtacagggtgtctacggctttgcaaagtcgctcctgaaagctctgaaagaagacggtgatgtggtgattgttgtctttgatgcgaaagcgccaagttttcgccacgaagcgtacgaagcttacaaatgggggcgtgctccaacgccggaagactttcctcgccaattggcgcttatgaaggaattagtggatttgcttggcctcgaacgcttggaagttcccggtttcgaggcagacgacgtattagcgactctcgcaaagaaagccgaacgtgagggctatgaagtccagatcttgacagcagatcgcgatcttttccagcttttatctccgcgcatctcggtgttacacccggaagggcatcgtatcaccccggaatggctctgggagaaatatggtttgcgtcccgaacaatgggtggattttcgcgccttagcaggcgatccgagcgacaatattccgggagttaaaggtatcggcgagaagacggcgctcaagctccttaaagaatgggggtcgttggagaacttgcttaagaatttagatcaggtcaaaccagagtcagtgcgtgagaagattcttgctcacctcgaagacctcaaattaagccgcgaattgtcccgtgtacgcaccgatttgccgctcgaagttgatttccaacgccgccgcgaacctgactgggagggtcttaaagcgtttttagagcgtcttgaatttggttcgctcttgcatgaattcggccttttagaaagcccgttaccagccgaagaagcaccttggccaccgcccgagggcgcgtttttaggttaccgtttgagtcgcccggaaccgatgtgggccgaattactggctcttgcagcgtctgcccagggacgtgtgtatcgcgcggaagaccctcatggtgcgctccgcggcctcttcgaagtccgtggactccttgccaaagacttagctgttgttgcattgcgcgaaggtcttgatttacctccgactgatgatccaatgcttcttgcgtacctcttggacccgtcaaacacgacgcccgaaggcgtagcccgtcgttacggcggcgagtggaccgaagatgcagcgaaacgcgcgttattggccgaacgtttgcacgccaatttattaggacgtttgcaaggcgaggaacgtctcctctggctttacgaagaagtggagaaaccattgagtcgcgtgctcgcgcatatggaagctaccggtgtcaaattagacgtggcgtatttggagaatctcagccttgaagttgctgcccacatgcgccgcttggaggaagaagtattccgtttagcaggccgttcctttcgccttaattctcgcgatcagttagaacgtgtgttgttcgatgaacttggtctccctcctatcggcaagacagagaagaccggtaaacgtagcacttcagcggcggttttagaagctcttcgcgaagtccatcccattgtggacaagatcttgcaataccgcgaactcgcgaaattgaaaggcacctatattgaccgtcttccggcattagtccacccgaaaacgggacgcctccatacccgcttcaaccaaacagccacggcgaccggtcgtttgtcctcctctgatccaaaccttcagaatattccagtacgtaccccattgggccagaagatccgccgtgcgtttgtagctgaggagggttggcgtttagtggccctcgattatagccaaattgaattacgtgtccttgcccatctttctggcgatgagaacctcatccgcgtgtttcaggaaggcaaagacattcacactcaaacggcaagctggatgtttggattatcagctgaagcgatcgatcctttgatgcgtcgtgcagcgaagaccatcaatttcggtgttctctacggtatgagtgcctttcgtttgtcgcaggaattaggcattccctatgaagaagctcaggcgttcattcagaaatactttcaaagctatcccaaagttaaagcatggatcgagaagactctcgaagaaggccgcacacgtggttacgtagagaccttatttggacgtcgccgctatgttcccgatttaaacgctcgcgtgaaaggcaagcgtgaagccgccgaacgcatggcgttcaacatgcctgtacagggcacggcagctgacctcatgaaacttgcaatggtgcgcctttttccacaattgcgtgaagttggtgcccgcatgctcttgcaggtccacgatgaactcttgttagaagcgccaaaagagcgtgcggaagaggtggcagccctcgcgaaagaagttatggaaggcgtgtggcccttagcggtgcctcttgaagtcgaagttggtattggcgaggattggctggctgccaaagga

SEQ ID NO: 4056 - protein, 841 aa, synthetic construct
  REGION 1..841: note = Variant of DNA polymerase I from Thermus sp. strain 2.9
MHHHHHHGGSGVLPVFEPKGRVLLVDGHHLAYRNFFALKGLTTSSGEPVQGVYGFAKSLLKALKEDGDVVIVVFDAKAPSFRHEAYEAYKWGRAPTPEDFPRQLALMKELVDLLGLERLEVPGFEADDVLATLAKKAEREGYEVQILTADRDLFQLLSPRISVLHPEGHRITPEWLWEKYGLRPEQWVDFRALAGDPSDNIPGVKGIGEKTALKLLKEWGSLENLLKNLDQVKPESVREKILAHLEDLKLSRELSRVRTDLPLEVDFQRRREPDWEGLKAFLERLEFGSLLHEFGLLESPLPAEEAPWPPPEGAFLGYRLSRPEPMWAELLALAASAQGRVYRAEDPHGALRGLFEVRGLLAKDLAVVALREGLDLPPTDDPMLLAYLLDPSNTTPEGVARRYGGEWTEDAAKRALLAERLHANLLGRLQGEERLLWLYEEVEKPLSRVLAHMEATGVKLDVAYLENLSLEVAAHMRRLEEEVFRLAGRSFRLNSRDQLERVLFDELGLPPIGKTEKTGKRSTSAAVLEALREVHPIVDKILQYRELAKLKGTYIDRLPALVHPKTGRLHTRFNQTATATGRLSSSDPNLQNIPVRTPLGQKIRRAFVAEEGWRLVALDYSQIELRVLAHLSGDENLIRVFQEGKDIHTQTASWMFGLSAEAIDPLMRRAAKTINFGVLYGMSAFRLSQELGIPYEEAQAFIQKYFQSYPKVKAWIEKTLEEGRTRGYVETLFGRRRYVPDLNARVKGKREAAERMAFNMPVQGTAADLMKLAMVRLFPQLREVGARMLLQVHDELLLEAPKERAEEVAALAKEVMEGVWPLAVPLEVEVGIGEDWLAAKG

SEQ ID NO: 4057 - DNA, 2523 bp, synthetic construct
  misc_feature 1..2523: note = Variant of DNA polymerase I from Thermus sp. strain 2.9
  source 1..2523: mol_type = other DNA
atgcaccatcatcatcatcatggcggtagcggcgtgttaccggtgttcgagcctaaaggtcgcgtgcttctggttgatggccatcatctcgcgtatcgtaacttctttgccctgaaaggattaaccaccagcagcggcgagccggtacagggtgtctacggctttgcaaagtcgctcctgaaagctctgaaagaagacggtgatgtggtgattgttgtctttgatgcgaaagcgccaagttttcgccacgaagcgtacgaagcttacaaagccgggcgtgctccaacgccggaagactttcctcgccaattggcgcttatgaaggaattagtggatttgcttggcctcgaacgcttggaagttcccggtttcgaggcagacgacgtattagcgactctcgcaaagaaagccgaacgtgagggctatgaagtccagatcttgacagcagatcgcgatcttttccagcttttatctccgcgcatctcggtgttacacccggaagggcatcgtatcaccccggaatggctctgggagaaatatggtttgcgtcccgaacaatgggtggattttcgcgccttagcaggcgatccgagcgacaatattccgggagttaaaggtatcggcgagaagacggcgctcaagctccttaaagaatgggggtcgttggagaacttgcttaagaatttagatcaggtcaaaccagagtcagtgcgtgagaagattcttgctcacctcgaagacctcaaattaagccgcgaattgtcccgtgtacgcaccgatttgccgctcgaagttgatttccaacgccgccgcgaacctgactgggagggtcttaaagcgtttttagagcgtcttgaatttggttcgctcttgcatgaattcggccttttagaaagcccgttaccagccgaagaagcaccttggccaccgcccgagggcgcgtttttaggttaccgtttgagtcgcccggaaccgatgtgggccgaattactggctcttgcagcgtctgcccagggacgtgtgtatcgcgcggaagaccctcatggtgcgctccgcggcctcttcattgtccgtggactccttgccaaagacttagctgttgttgcattgcgcgaaggtcttgatttacctccgactgatgatccaatgcttcttgcgtacctcttggacccgtcaaacacgacgcccgaaggcgtagcccgtcgttacggcggcgagtggaccgaagatgcagcgaaacgcgcgttattggccgaacgtttgcacgccaatttattaggacgtttgcaaggcgaggaacgtctcctctggctttacgaagaagtggagaaaccattgagtcgcgtgctcgcgcatatggaagctaccggtgtcaaattagacgtggcgtatttggagaatctcagccttgaagttgctgcccacatgcgccgcttggaggaagaagtattccgtttagcaggccgttcctttcgccttaattctcgcgatcagttagaacgtgtgttgttcgatgaacttggtctccctcctatcggcaagacagagaagaccggtaaacgtagcacttcagcggcggttttagaagctcttcgcgaagtccatcccattgtggacaagatcttgcaataccgcgaactcgcgaaattgaaaggcacctatattgaccgtcttccggcattagtccacccgaaaacgggacgcctccatacccgcttcaaccaaacagccacggcgaccggtcgtttgtcctcctctgatccaaaccttcagaatattccagtacgtaccccattgggccagaagatccgccgtgcgtttgtagctgaggagggttggcgtttagtggccctcgattatagccaaattgaattacgtgtccttgcccatctttctggcgatgagaacctcatccgcgtgtttcaggaaggcaaagacattcacactcaaacggcaagctggatgtttggattatcagctgaagcgatcgatcctttgatgcgtcgtgcagcgaagaccatcaatttcggtgttctctacggtatgagtgcctttcgtttgtcgcaggaattaggcattccctatgaagaagctcaggcgttcattcagaaatactttcaaagctatcccaaagttaaagcatggatcgagaagactctcgaagaaggccgcacacgtggttacgtagagaccttatttggacgtcgccgctatgttcccgatttaaacgctcgcgtgaaaggcaagcgtgaagccgccgaacgcatggcgttcaacatgcctgtacagggcacggcagctgacctcatgaaacttgcaatggtgcgcctttttccacaattgcgtgaagttggtgcccgcatgctcttgcaggtccacgatgaactcttgttagaagcgccaaaagagcgtgcggaagaggtggcagccctcgcgaaagaagttatggaaggcgtgtggcccttagcggtgcctcttgaagtcgaagttggtattggcgaggattggctggctgccaaagga

SEQ ID NO: 4058 - protein, 841 aa, synthetic construct
  REGION 1..841: note = Variant of DNA polymerase I from Thermus sp. strain 2.9
MHHHHHHGGSGVLPVFEPKGRVLLVDGHHLAYRNFFALKGLTTSSGEPVQGVYGFAKSLLKALKEDGDVVIVVFDAKAPSFRHEAYEAYKAGRAPTPEDFPRQLALMKELVDLLGLERLEVPGFEADDVLATLAKKAEREGYEVQILTADRDLFQLLSPRISVLHPEGHRITPEWLWEKYGLRPEQWVDFRALAGDPSDNIPGVKGIGEKTALKLLKEWGSLENLLKNLDQVKPESVREKILAHLEDLKLSRELSRVRTDLPLEVDFQRRREPDWEGLKAFLERLEFGSLLHEFGLLESPLPAEEAPWPPPEGAFLGYRLSRPEPMWAELLALAASAQGRVYRAEDPHGALRGLFIVRGLLAKDLAVVALREGLDLPPTDDPMLLAYLLDPSNTTPEGVARRYGGEWTEDAAKRALLAERLHANLLGRLQGEERLLWLYEEVEKPLSRVLAHMEATGVKLDVAYLENLSLEVAAHMRRLEEEVFRLAGRSFRLNSRDQLERVLFDELGLPPIGKTEKTGKRSTSAAVLEALREVHPIVDKILQYRELAKLKGTYIDRLPALVHPKTGRLHTRFNQTATATGRLSSSDPNLQNIPVRTPLGQKIRRAFVAEEGWRLVALDYSQIELRVLAHLSGDENLIRVFQEGKDIHTQTASWMFGLSAEAIDPLMRRAAKTINFGVLYGMSAFRLSQELGIPYEEAQAFIQKYFQSYPKVKAWIEKTLEEGRTRGYVETLFGRRRYVPDLNARVKGKREAAERMAFNMPVQGTAADLMKLAMVRLFPQLREVGARMLLQVHDELLLEAPKERAEEVAALAKEVMEGVWPLAVPLEVEVGIGEDWLAAKG

SEQ ID NO: 4059 - DNA, 2523 bp, synthetic construct
  misc_feature 1..2523: note = Variant of DNA polymerase I from Thermus sp. strain 2.9
  source 1..2523: mol_type = other DNA
atgcaccatcatcatcatcatggcggtagcggcgtgttagaggtgttcgagcctaaaggtcgcgtgcttctggttgatggccatcatctcgcgtatcgtaacttctttgccctgaaaggattaaccaccagcagcggcgagccggtacagggtgtctacggctttgcaaagtcgctcctgaaagctctgaaagaagacggtgatgtggtgattgttgtctttgatgcgaaagcgccaagttttcgccacgaagcgtacgaagcttacaaagccgggcgtgctccaacgccggaagactttcctcgccaattggcgcttatgaaggaattagtggatttgcttggcctcgaacgcttggaagttcccggtttcgaggcagacgacgtattagcgactctcgcaaagaaagccgaacgtgagggctatgaagtccagatcttgacagcagatcgcgatcttttccagcttttatctccgcgcatctcggtgttacacccggaagggcatcgtatcaccccggaatggctctgggagaaatatggtttgcgtcccgaacaatgggtggattttcgcgccttagcaggcgatccgagcgacaatattccgggagttaaaggtatcggcgagaagacggcgctcaagctccttaaagaatgggggtcgttggagaacttgcttaagaatttagatcaggtcaaaccagagtcagtgcgtgagaagattcttgctcacctcgaagacctcaaattaagccgcgaattgtcccgtgtacgcaccgatttgccgctcgaagttgatttccaacgccgccgcgaacctgactgggagggtcttaaagcgtttttagagcgtcttgaatttggttcgctcttgcatgaattcggccttttagaaagcccgttaccagccgaagaagcaccttggccaccgcccgagggcgcgtttttaggttaccgtttgagtcgcccggaaccgatgtgggccgaattactggctcttgcagcgtctgcccagggacgtgtgtatcgcgcggaagaccctcatggtgcgctccgcggcctcttcgaagtccgtggactccttgccaaagacttagctgttgttgcattgcgcgaaggtcttgatttacctccgactgatgatccaatgcttcttgcgtacctcttggacccgtcaaacacgacgcccgaaggcgtagcccgtcgttacggcggcgagtggaccgaagatgcagcgaaacgcgcgttattggccgaacgtttgcacgccaatttattaggacgtttgcaaggcgaggaacgtctcctctggctttacgaagaagtggagaaaccattgagtcgcgtgctcgcgcatatggaagctaccggtgtcaaattagacgtggcgtatttggagaatctcagccttgaagttgctgcccacatgcgccgcttggaggaagaagtattccgtttagcaggccgttcctttcgccttaattctcgcgatcagttagaacgtgtgttgttcgatgaacttggtctccctcctatcggcaagacagagaagaccggtaaacgtagcacttcagcggcggttttagaagctcttcgcgaagtccatcccattgtggacaagatcttgcaataccgcgaactcgcgaaattgaaaggcacctatattgaccgtcttccggcattagtccacccgaaaacgggacgcctccatacccgcttcaaccaaacagccacggcgaccggtcgtttgtcctcctctgatccaaaccttcagaatattccagtacgtaccccattgggccagaagatccgccgtgcgtttgtagctgaggagggttggcgtttagtggccctcgattatagccaaattgaattacgtgtccttgcccatctttctggcgatgagaacctcatccgcgtgtttcaggaaggcaaagacattcacactcaaacggcaagctggatgtttggattatcagctgaagcgatcgatcctttgatgcgtcgtgcagcgaagaccatcaatttcggtgttctctacggtatgagtgcctttcgtttgtcgcaggaattaggcattccctatgaagaagctcaggcgttcattcagaaatactttcaaagctatcccaaagttaaagcatggatcgagaagactctcgaagaaggccgcacccgtggttacgtagagaccttatttggacgtcgccgctatgttcccgatttaaacgctcgcgtgaaaggcaagcgtgaagccgccgaacgcatggcgttcaacatgcctgtacagggcacggcagctgacctcatgaaacttgcaatggtgcgcctttttccacaattgcgtgaagttggtgcccgcatgctcttgcaggtccacgatgaactcttgttagaagcgccaaaagagcgtgcggaagaggtggcagccctcgcgaaagaagttatggaaggcgtgtggcccttagcggtgcctcttgaagtcgaagttggtattggcgaggattggctggctgccaaagga

SEQ ID NO: 4060 - protein, 841 aa, synthetic construct; identical to SEQ ID NO: 3508
  REGION 1..841: note = Variant of DNA polymerase I from Thermus sp. strain 2.9

SEQ ID NO: 4061 - DNA, 2523 bp, synthetic construct
  misc_feature 1..2523: note = Variant of DNA polymerase I from Thermus sp. strain 2.9
  source 1..2523: mol_type = other DNA
atgcaccatcatcatcatcatggcggtagcggcgtgttagaggtgttcgagcctaaaggtcgcgtgcttctggttgatggccatcatctcgcgtatcgtaacttctttgccctgaaaggattaaccaccagcagcggcgagccggtacagggtgtctacggctttgcaaagtcgctcctgaaagctctgaaagaagacggtgatgtggtgattgttgtctttgatgcgaaagcgccaagttttcgccacgaagcgtacgaagcttacaaagccgggcgtgctccaacgccggaagactttcctcgccaattggcgcttatgaaggaattagtggatttgcttggcctcgaacgcttggaagttcccggtttcgaggcagacgacgtattagcgactctcgcaaagaaagccgaacgtgagggctatgaagtccagatcttgacagcagatcgcgatcttttccagcttttatctccgcgcatctcggtgttacacccggaagggcatcgtatcaccccggaatggctctgggagaaatatggtttgcgtcccgaacaatgggtggattttcgcgccttagcaggcgataaaagcgacaatattccgggagttaaaggtatcggcgagaagacggcgctcaagctccttaaagaatgggggtcgttggagaacttgcttaagaatttagatcaggtcaaaccagagtcagtgcgtgagaagattcttgctcacctcgaagacctcaaattaagccgcgaattgtcccgtgtacgcaccgatttgccgctcgaagttgatttccaacgccgccgcgaacctgactgggagggtcttaaagcgtttttagagcgtcttgaatttggttcgctcttgcatgaattcggccttttagaaagcccgttaccagccgaagaagcaccttggccaccgcccgagggcgcgtttttaggttaccgtttgagtcgcccggaaccgatgtgggccgaattactggctcttgcagcgtctgcccagggacgtgtgtatcgcgcggaagaccctcatggtgcgctccgcggcctcttcgaagtccgtggactccttgccaaagacttagctgttgttgcattgcgcgaaggtcttgatttacctccgactgatgatccaatgcttcttgcgtacctcttggacccgtcaaacacgacgcccgaaggcgtagcccgtcgttacggcggcgagtggaccgaagatgcagcgaaacgcgcgttattggccgaacgtttgcacgccaatttattaggacgtttgcaaggcgaggaacgtctcctctggctttacgaagaagtggagaaaccattgagtcgcgtgctcgcgcatatggaagctaccggtgtcaaattagacgtggcgtatttggagaatctcagccttgaagttgctgcccacatgcgccgcttggaggaagaagtattccgtttagcaggccgttcctttcgccttaattctcgcgatcagttagaacgtgtgttgttcgatgaacttggtctccctcctatcggcaagacagagaagaccggtaaacgtagcacttcagcggcggttttagaagctcttcgcgaagtccatcccattgtggacaagatcttgcaataccgcgaactcgcgaaattgaaaggcacctatattgaccgtcttccggcattagtccacccgaaaacgggacgcctccatacccgcttcaaccaaacagccacggcgaccggtcgtttgtcctcctctgatccaaaccttcagaatattccagtacgtaccccattgggccagaagatccgccgtgcgtttgtagctgaggagggttggcgtttagtggccctcgattatagccaaattgaattacgtgtccttgcccatctttctggcgatgagaacctcatccgcgtgtttgaggaaggcaaagacattcacactcaaacggcaagctggatgtttggattatcagctgaagcgatcgatcctttgatgcgtcgtgcagcgaagaccatcaatttcggtgttctctacggtatgagtgcctttcgtttgtcgcaggaattaggcattccctatgaagaagctcaggcgttcattcagaaatactttcaaagctatcccaaagttaaagcatggatcgagaagactctcgaagaaggccgcacacgtggttacgtagagaccttatttggacgtcgccgctatgttcccgatttaaacgctcgcgtgaaaggcaagcgtgaagccgccgaacgcatggcgttcaacatgcctgtacagggcacggcagctgacctcatgaaacttgcaatggtgcgcctttttccacaattgcgtgaagttggtgcccgcatgctcttgcaggtccacgatgaactcttgttagaagcgccaaaagagcgtgcggaagaggtggcagccctcgcgaaagaagttatggaaggcgtgtggcccttagcggtgcctcttgaagtcgaagttggtattggcgaggattggctggctgccaaagga

SEQ ID NO: 4062 - protein, 841 aa, synthetic construct
  REGION 1..841: note = Variant of DNA polymerase I from Thermus sp. strain 2.9
MHHHHHHGGSGVLEVFEPKGRVLLVDGHHLAYRNFFALKGLTTSSGEPVQGVYGFAKSLLKALKEDGDVVIVVFDAKAPSFRHEAYEAYKAGRAPTPEDFPRQLALMKELVDLLGLERLEVPGFEADDVLATLAKKAEREGYEVQILTADRDLFQLLSPRISVLHPEGHRITPEWLWEKYGLRPEQWVDFRALAGDKSDNIPGVKGIGEKTALKLLKEWGSLENLLKNLDQVKPESVREKILAHLEDLKLSRELSRVRTDLPLEVDFQRRREPDWEGLKAFLERLEFGSLLHEFGLLESPLPAEEAPWPPPEGAFLGYRLSRPEPMWAELLALAASAQGRVYRAEDPHGALRGLFEVRGLLAKDLAVVALREGLDLPPTDDPMLLAYLLDPSNTTPEGVARRYGGEWTEDAAKRALLAERLHANLLGRLQGEERLLWLYEEVEKPLSRVLAHMEATGVKLDVAYLENLSLEVAAHMRRLEEEVFRLAGRSFRLNSRDQLERVLFDELGLPPIGKTEKTGKRSTSAAVLEALREVHPIVDKILQYRELAKLKGTYIDRLPALVHPKTGRLHTRFNQTATATGRLSSSDPNLQNIPVRTPLGQKIRRAFVAEEGWRLVALDYSQIELRVLAHLSGDENLIRVFEEGKDIHTQTASWMFGLSAEAIDPLMRRAAKTINFGVLYGMSAFRLSQELGIPYEEAQAFIQKYFQSYPKVKAWIEKTLEEGRTRGYVETLFGRRRYVPDLNARVKGKREAAERMAFNMPVQGTAADLMKLAMVRLFPQLREVGARMLLQVHDELLLEAPKERAEEVAALAKEVMEGVWPLAVPLEVEVGIGEDWLAAKG

SEQ ID NO: 4063 - DNA, 2523 bp, synthetic construct
  misc_feature 1..2523: note = Variant of DNA polymerase I from Thermus sp. strain 2.9
  source 1..2523: mol_type = other DNA
atgcaccatcatcatcatcatggcggtagcggcgtgttaccggtgttcgagcctaaaggtcgcgtgcttctggttgatggccatcatctcgcgtatcgtaacttctttgccctgaaaggattaaccaccagcagcggcgagccggtacagggtgtctacggctttgcaaagtcgctcctgaaagctctgaaagaagacggtgatgtggtgattgttgtctttgatgcgaaagcgccaagttttcgccacgaagcgtacgaagcttacaaagccgggcgtgctgatacgccggaagactttcctcgccaattggcgcttatgaaggaattagtggatttgcttggcctcgaacgcttggaagttcccggtttcgaggcagacgacgtattagcgactctcgcaaagaaagccgaacgcgagggctatgaagtccagatcttgacagcagatcgcgatcttttccagcttttatctccgcgcatctcggtgttacacccggaagggcatcgtatcaccccggaatggctctgggagaaatatggtttgcgtcccgaacaatgggtggattttcgcgccttagcaggcgatccgagcgacaatattccgggagttaaaggtatcggcgagaagacggcgctcaagctccttaaagaatgggggtcgttggagaacttgcttaagaatttagatcaggtcaaaccagagtcagtgcgtgagaagattcttgctcacctcgaagacctcaaattaagccgcgaattgtcccgtgtacgcaccgatttgccgctcgaagttgatttccaacgccgccgcgaacctgactgggagggtcttaaagcgtttttagagcgtcttgaatttggttcgctcttgcatgaattcggccttttagaaagcccgttaccagccgaagaagcaccttggccaccgcccgagggcgcgtttttaggttaccgtttgagtcgcccggaaccgatgtgggccgaattactggctcttgcagcgtctgcccagggacgtgtgtatcgcgcggaagaccctcatggtgcgctccgcggcctcttcgaagtccgtggactccttgccaaagacttagctgttgttgcattgcgcgaaggtcttgatttacctccgactgatgatccaatgcttcttgcgtacctcttggacccgtcaaacacgacgcccgaaggcgtagcccgtcgttacggcggcgagtggaccgaagatgcagcgaaacgcgcgttattggccgaacgtttgcacgccaatttattaggacgtttgcaaggcgaggaacgtctcctctggctttacgaagaagtggagaaaccattgagtcgcgtgctcgcgcatatggaagctaccggtgtcaaattagacgtggcgtatttggagaatctcagccttgaagttgctgcccacatgcgccgcttggaggaagaagtattccgtttagcaggccgttcctttcgccttaattctcgcgatcagttagaacgtgtgttgttcgatgaacttggtctccctcctatcggcaagacagagaagaccggtaaacgtagcacttcagcggcggttttagaagctcttcgcgaagtccatcccattgtggacaagatcttgcaataccgcgaactcgcgaaattgaaaggcacctatattgaccgtcttccggcattagtccacccgaaaacgggacgcctccatacccgcttcaaccaaacagccacggcgaccggtcgtttgtcctcctctgatccaaaccttcagaatattccagtacgtaccaaattgggccagaagatccgccgtgcgtttgtagctgaggagggttggcgtttagtggccctcgattatagccaaattgaattacgtgtccttgcccatctttctggcgatgagaacctcatccgcgtgtttcaggaaggcaaagacattcacactcaaacggcaagctggatgtttggattatcagctgaagcgatcgatcctttgatgcgtcgtgcagcgaagaccatcaatttcggtgttctctacggtatgagtgcctttcgtttgtcgcaggaattaggcattccctacgaagaagctcaggcgttcattcagaaatactttcaaagctatcccaaagttaaagcatggatcgagaagactctcgaagaaggccgcacacgtggttacgtagagaccttatttggacgtcgccgctatgttcccgatttaaacgctcgcgtgaaaggcaagcgtgaagccgccgaacgcatggcgttcaacatgcctgtacagggcacggcagctgacctcatgaaacttgcaatggtgcgcctttttccacaattgcgtgaagttggtgcccgcatgctcttgcaggtccacgatgaactcttgttagaagcgccaaaagagcgtgcggaagaggtggcagccctcgcgaaagaagttatggaaggcgtgtggcccttagcggtgcctcttgaagtcgaagttggtattggcgaggattggctggctgccaaagga

SEQ ID NO: 4064 - protein, 841 aa, synthetic construct
  REGION 1..841: note = Variant of DNA polymerase I from Thermus sp. strain 2.9
MHHHHHHGGSGVLPVFEPKGRVLLVDGHHLAYRNFFALKGLTTSSGEPVQGVYGFAKSLLKALKEDGDVVIVVFDAKAPSFRHEAYEAYKAGRADTPEDFPRQLALMKELVDLLGLERLEVPGFEADDVLATLAKKAEREGYEVQILTADRDLFQLLSPRISVLHPEGHRITPEWLWEKYGLRPEQWVDFRALAGDPSDNIPGVKGIGEKTALKLLKEWGSLENLLKNLDQVKPESVREKILAHLEDLKLSRELSRVRTDLPLEVDFQRRREPDWEGLKAFLERLEFGSLLHEFGLLESPLPAEEAPWPPPEGAFLGYRLSRPEPMWAELLALAASAQGRVYRAEDPHGALRGLFEVRGLLAKDLAVVALREGLDLPPTDDPMLLAYLLDPSNTTPEGVARRYGGEWTEDAAKRALLAERLHANLLGRLQGEERLLWLYEEVEKPLSRVLAHMEATGVKLDVAYLENLSLEVAAHMRRLEEEVFRLAGRSFRLNSRDQLERVLFDELGLPPIGKTEKTGKRSTSAAVLEALREVHPIVDKILQYRELAKLKGTYIDRLPALVHPKTGRLHTRFNQTATATGRLSSSDPNLQNIPVRTKLGQKIRRAFVAEEGWRLVALDYSQIELRVLAHLSGDENLIRVFQEGKDIHTQTASWMFGLSAEAIDPLMRRAAKTINFGVLYGMSAFRLSQELGIPYEEAQAFIQKYFQSYPKVKAWIEKTLEEGRTRGYVETLFGRRRYVPDLNARVKGKREAAERMAFNMPVQGTAADLMKLAMVRLFPQLREVGARMLLQVHDELLLEAPKERAEEVAALAKEVMEGVWPLAVPLEVEVGIGEDWLAAKG

SEQ ID NO: 4065 - DNA, 2523 bp, synthetic construct
  misc_feature 1..2523: note = Variant of DNA polymerase I from Thermus sp. strain 2.9
  source 1..2523: mol_type = other DNA
atgcaccatcatcatcatcatggcggtagcggcgtgttaccggtgttcgagcctaaaggtcgcgtgcttctggttgatggccatcatctcgcgtatcgtaacttctttgccctgaaaggattaaccaccagcagcggcgagccggtacagggtgtctacggctttgcaaagtcgctcctgaaagctctgaaagaagacggtgatgtggtgattgttgtctttgatgcgaaagcgccaagttttcgccacgaagcgtacgaagcttacaaatgtgggcgtgctccaacgccggaagactttcctcgccaattggcgcttatgaaggaattagtggatttgcttggcctcgaacgcttggaagttcccggtttcgaggcagacgacgtattagcgactctcgcaaagaaagccgaacgtgagggctatgaagtccagatcttgacagcagatcgcgatcttttccagcttttatctccgcgcatctcggtgttacacccggaagggcatcgtatcaccccggaatggctctgggagaaatatggtttgcgtcccgaacaatgggtggattttcgcgccttagcaggcgatccgagcgacaatattccgggagttaaaggtatcggcgagaagacggcgctcaagctccttaaagaatgggggtcgttggagaacttgcttaagaatttagatcaggtcaaaccagagtcagtgcgtgagaagattcttgctcacctcgaagacctcaaattaagccgcgaattgtcccgtgtacgcaccgatttgccgctcgaagttgatttccaacgccgccgcgaacctgactgggagggtcttaaagcgtttttagagcgtcttgaatttggttcgctcttgcatgaattcggccttttagaaagcccgttaccagccgaagaagcaccttggccaccgcccgagggcgcgtttttaggttaccgtttgagtcgcccggaaccgatgtgggccgaattactggctcttgcagcgtctgcccagggacgtgtgtatcgcgcggaagaccctcatggtgcgctccgcggcctcttcgaagtccgtggactccttgccaaagacttagctgttgttgcattgcgcgaaggtcttgatttacctccgactgatgatccaatgcttcttgcgtacctcttggacccgtcaaacacgacgcccgaaggcgtagcccgtcgttacggcggcgagtggaccgaagatgcagcgaaacgcgcgttattggccgaacgtttgcacgccaatttattaggacgtttgcaaggcgaggaacgtctcctctggctttacgaagaagtggagaaaccattgagtcgcgtgctcgcgcatatggaagctaccggtgtcaaattagacgtggcgtatttggagaatctcagccttgaagttgctgcccacatgcgccgcttggaggaagaagtattccgtttagcaggccgttcctttcgccttaattctcgcgatcagttagaacgtgtgttgttcgatgaacttggtctccctcctatcggcaagacagagaagaccggtaaacgtagcacttcagcggcggttttagaagctcttcgcgaagtccatcccattgtggacaagatcttgcaataccgcgaactcgcgaaattgaaaggcacctatattgaccgtcttccggcattagtccacccgaaaacgggacgcctccatacccgcttcaaccaaacagccacggcgaccggtcgtttgtcctcctctgatccaaaccttcagaatattccagtacgtaccccattgggccagaagatccgccgtgcgtttgtagctgaggagggttggcgtttagtggccctcgattatagccaaattgaattacgtgtccttgcccatctttctggcgatgagaacctcatccgcgtgtttcaggaaggcaaagacattcacactcaaacggcaagctggatgtttggattatcagctgaagcgatcgatcctttgatgcgtcgtgcagcgaagaccatcaatttcggtgttctctacggtatgagtgcctttcgtttgtcgcaggaattaggcattccctatgaagaagctcaggcgttcattcagaaatactttcaaagctatcccaaagttaaagcatggatcgagaagactctcgaagaaggccgcacacgtggttacgtagagaccttatttggacgtcgccgctatgttcccgatttaaacgctcgcgtgaaaggcaagcgtgaagccgccgaacgcatggcgttcaacatgcctgtacagggcacggcagctgacctcatgaaacttgcaatggtgcgcctttttccacaattgcgtgaagttggtgcccgcatgctcttgcaggtccacgatgaactcttgttagaagcgccaaaagagcgtgcggaagaggtggcagccctcgcgaaagaagttatggaaggcgtgtggcccttagcggtgcctcttgaagtcgaagttggtattggcgaggattggctggctgccaaagga

SEQ ID NO: 4066 - protein, 841 aa, synthetic construct
  REGION 1..841: note = Variant of DNA polymerase I from Thermus sp. strain 2.9
MHHHHHHGGSGVLPVFEPKGRVLLVDGHHLAYRNFFALKGLTTSSGEPVQGVYGFAKSLLKALKEDGDVVIVVFDAKAPSFRHEAYEAYKCGRAPTPEDFPRQLALMKELVDLLGLERLEVPGFEADDVLATLAKKAEREGYEVQILTADRDLFQLLSPRISVLHPEGHRITPEWLWEKYGLRPEQWVDFRALAGDPSDNIPGVKGIGEKTALKLLKEWGSLENLLKNLDQVKPESVREKILAHLEDLKLSRELSRVRTDLPLEVDFQRRREPDWEGLKAFLERLEFGSLLHEFGLLESPLPAEEAPWPPPEGAFLGYRLSRPEPMWAELLALAASAQGRVYRAEDPHGALRGLFEVRGLLAKDLAVVALREGLDLPPTDDPMLLAYLLDPSNTTPEGVARRYGGEWTEDAAKRALLAERLHANLLGRLQGEERLLWLYEEVEKPLSRVLAHMEATGVKLDVAYLENLSLEVAAHMRRLEEEVFRLAGRSFRLNSRDQLERVLFDELGLPPIGKTEKTGKRSTSAAVLEALREVHPIVDKILQYRELAKLKGTYIDRLPALVHPKTGRLHTRFNQTATATGRLSSSDPNLQNIPVRTPLGQKIRRAFVAEEGWRLVALDYSQIELRVLAHLSGDENLIRVFQEGKDIHTQTASWMFGLSAEAIDPLMRRAAKTINFGVLYGMSAFRLSQELGIPYEEAQAFIQKYFQSYPKVKAWIEKTLEEGRTRGYVETLFGRRRYVPDLNARVKGKREAAERMAFNMPVQGTAADLMKLAMVRLFPQLREVGARMLLQVHDELLLEAPKERAEEVAALAKEVMEGVWPLAVPLEVEVGIGEDWLAAKG

SEQ ID NO: 4067 - DNA, 2523 bp, synthetic construct
  misc_feature 1..2523: note = Variant of DNA polymerase I from Thermus sp. strain 2.9
  source 1..2523: mol_type = other DNA
atgcaccatcatcatcatcatggcggtagcggcgtgttagaggtgttcgagcctaaaggtcgcgtgcttctggttgatggccatcatctcgcgtatcgtaacttctttgccctgaaaggattaaccaccagcagcggcgagccggtacatggtgtctacggctttgtaaagtcgctcctgaaagctctgaaagaagacggtgatgtggtgattgttgtctttgatgcgaaagcgccaagttttcgccacgaagcgtacgaagcttacaaagccgggcgtgctcctacgccggaagactttcctcgccaattggcgcttatgaaggaattagtggatttgcttggcctcgaacgcttggaagttcccggtttcgaggcagacgacgtattagcgactctcgcaaagaaagccgaacgtgagggctatgaagtccagatcttgacagcagatcgcgatcttttccagcttttatctccgcgcatctcggtgttacacccggaagggcatcgtatcaccccggaatggctctgggagaaatatggtttgcgtcccgaacaatgggtggattttcgcgccttagcaggcgatccgagcgacaatattccgggagttaaaggtatcggcgagaagacggcgctcaagctccttaaagaatgggggtcgttggagaacttgcttaagaatttagatcaggtcaaaccagagtcagtgcgtgagaagattcttgctcacctcgaagacctcaagttaagccgcgaattgtcccgtgtacgcaccgatttgccgctcgaagttgatttccaacgccgccgcgaacctgactgggagggtcttaaagcgtttttagagcgtcttgaatttggttcgctcttgcatgaattcggccttttagaaagcccgttaccagccgaagaagcaccttggccaccgcccgagggcgcgtttttaggttaccgtttgagtcgcccggaaccgatgtgggccgaattactggctcttgcagcgtctgcccagggacgtgtgtatcgcgcggaagaccctcatggtgcgctccgcggcctcttcgaagtccgtggactccttgccaaagacttagctgttgttgcattgcgcgaaggtcttgatttacctccgactgatgatccaatgcttcttgcgtacctcttggacccgtcaaacacgacgcctgaaggcgtagcccgtcgttacggcggcgagtggaccgaagatgcagcgaaacgcgcgttattggccgaacgtttgcacgccaatttattaggacgtttgcaaggcgaggagcgtctcctctggctttacgaagaagtggagaaaccattgagtcgcgtgctcgcgcatatggaagctaccggtgtcaaattagacgtggcgtatttggagaatctcagccttgaagttgctgcccacatgcgccgcttggaggaagaagtattccgtttagcaggccgttcctttcgccttaattctcgcgatcagttagaacgtgtgttgttcgatgaacttggtctccctcctatcggcaagacagagaagaccggtaaacgtagcacttcagcggcggttttagaagctcttcgcgaagtccatcccattgtggacaagatcttgcaataccgcgaactcgcgaaattgaaaggcacctatattgaccgtcttccggcattagtccacccgaaaacgggacgcctccatacccgcttcaaccaaacagccacggcgaccggtcgtttgtcctcctctgatccaaaccttcagaatattccagtacgtaccaaattgggccagaagatccgccgtgcgtttgtagctgaggagggttggcgtttagtggccctcgattatagccaaattgaattacgtgtccttgcccatctttctggcgatgagaacctcatccgcgtgtttcaggaaggcaaagacattcacactcaaacggcaagctggatgtttggattatcagctgaagcgatcgatcctttgatgcgtcgtgcagcgaagaccatcaatttcggtgttctctacggtatgagtgcctttcgtttgtcgcaggaattaggcattccctatgaagaagctcaggcgttcattcagaaatactttcaaagctatcccaaagttaaagcatggatcgagaagactctcgaagaaggccgccaccgtggttacgtagagaccttatttggacgtcgccgctatgttcccgatttaaacgctcgcgtgaaaggcaagcgtgaagccgccgaacgcatggcgttcaacatgcctgtacagggcacggcagctgacctcatgaaacttgcaatggtgcgcctttttccacaattgcgtgaagttggtgcccgcatgctcttgcaggtccacgatgaactcttgttagaagcgccaaaagagcgtgcggaagaggtggcagccctcgcgaaagaagttatggaaggcgtgtggcccttagcggtgcctcttgaagtcgaagttggtattggcgaggattggctggctgccaaagga

SEQ ID NO: 4068 - protein, 841 aa, synthetic construct
  REGION 1..841: note = Variant of DNA polymerase I from Thermus sp. strain 2.9
MHHHHHHGGSGVLEVFEPKGRVLLVDGHHLAYRNFFALKGLTTSSGEPVHGVYGFVKSLLKALKEDGDVVIVVFDAKAPSFRHEAYEAYKAGRAPTPEDFPRQLALMKELVDLLGLERLEVPGFEADDVLATLAKKAEREGYEVQILTADRDLFQLLSPRISVLHPEGHRITPEWLWEKYGLRPEQWVDFRALAGDPSDNIPGVKGIGEKTALKLLKEWGSLENLLKNLDQVKPESVREKILAHLEDLKLSRELSRVRTDLPLEVDFQRRREPDWEGLKAFLERLEFGSLLHEFGLLESPLPAEEAPWPPPEGAFLGYRLSRPEPMWAELLALAASAQGRVYRAEDPHGALRGLFEVRGLLAKDLAVVALREGLDLPPTDDPMLLAYLLDPSNTTPEGVARRYGGEWTEDAAKRALLAERLHANLLGRLQGEERLLWLYEEVEKPLSRVLAHMEATGVKLDVAYLENLSLEVAAHMRRLEEEVFRLAGRSFRLNSRDQLERVLFDELGLPPIGKTEKTGKRSTSAAVLEALREVHPIVDKILQYRELAKLKGTYIDRLPALVHPKTGRLHTRFNQTATATGRLSSSDPNLQNIPVRTKLGQKIRRAFVAEEGWRLVALDYSQIELRVLAHLSGDENLIRVFQEGKDIHTQTASWMFGLSAEAIDPLMRRAAKTINFGVLYGMSAFRLSQELGIPYEEAQAFIQKYFQSYPKVKAWIEKTLEEGRHRGYVETLFGRRRYVPDLNARVKGKREAAERMAFNMPVQGTAADLMKLAMVRLFPQLREVGARMLLQVHDELLLEAPKERAEEVAALAKEVMEGVWPLAVPLEVEVGIGEDWLAAKG

SEQ ID NO: 4069 - DNA, 2523 bp, synthetic construct
  misc_feature 1..2523: note = Variant of DNA polymerase I from Thermus sp. strain 2.9
  source 1..2523: mol_type = other DNA
atgcaccatcatcatcatcatggcggtagcggcgtgttaccggtgttcgagcctaaaggtcgcgtgcttctggttgatggccatcatctcgcgtatcgtaacttctttgccctgaaaggattaaccaccagcagcggcgagccggtacagggtgtctacggctttgcaaagtcgctcctgaaagctctgaaagaagacggtgatgtggtgattgttgtctttgatgcgaaagcgccaagttttcgccacgaagcgtacgaagcttacaaagccgggcgtgctccaacgccggaagactttcctcgccaattggcgcttatgaaggaattagtggatttgcttggcctcgaacgcttggaagttcccggtttcgaggcagacgacgtattagcgactctcgcaaagaaagccgaacgtgagggctatgaagtccagatcttgacagcagatcgcgatcttttccagcttttatctccgcgcatctcggtgttacacccggaagggcatcgtatcaccccggaatggctctgggagaaatatggtttgcgtcccgaacaatgggtggattttcgcgccttagcaggcgatccgagcgacaatattccgggagttaaaggtatcggcgagaagacggcgctcaagctccttaaagaatgggggtcgttggagaacttgcttaagaatttagatcaggtcaaaccagagtcagtgcgtgagaagattcttgctcacctcgaagacctcaaattaagccgcgaattgtcccgtgtacgcaccgatttgccgctcgaagttgatttccaacgccgccgcgaacctgactgggagggtcttaaagcgtttttagagcgtcttgaatttggttcgctcttgcatgaattcggccttttagaaagcccgttaccagccgaagaagcaccttggccaccgcccgagggcgcgtttttaggttaccgtttgagtcgcccggaaccgatgtgggccgaattactggctcttgcagcgtctgcccagggacgtgtgtatcgcgcggaagaccctcatggtgcgctccgcggcctcttcgaagtccgtggactccttgccaaagacttagctgttgttgcattgcgcgaaggtcttgatttacctccgactgatgatccaatgcttcttgcgtacctcttggacccgtcaaacacgacgcccgaaggcgtagcccgtcgttacggcggcgagtggaccgaagatgcagcgaaacgcgcgttattggccgaacgtttgcacgccaatttattaggacgtttgcaaggcgaggaacgtctcctctggctttacgaagaagtggagaaaccattgagtcgcgtgctcgcgcatatggaagctaccggtgtcaaattagacgtggcgtatttggagaatctcagccttgaagttgctgcccacatgcgccgcttggaggaagaagtattccgtttagcaggccgttcctttcgccttaattctcgcgatcagttagaacgtgtgttgttcgatgaacttggtctccctcctatcggcaagacagagaagaccggtaaacgtagcacttcagcggcggttttagaagctcttcgcgaagtccatcccattgtggacaagatcttgcaataccgcgaactcgcgaaattgaaaggcacctatattgaccgtcttccggcattagtccacccgaaaacgggacgcctccatacccgcttcaaccaaacagccacggcgaccggtcgtttgtcctcctctgatccaaaccttcagaatattccagtacgtaccccattgggccagaagatccgccgtgcgtttgtagctgctgagggttggcgtttagtggccctcgattatagccaaattgaattacgtgtccttgcccatctttctggcgatgagaacctcatccgcgtgtttcaggaaggcaaagacattcacactcaaacggcaagctggatgtttggattatcagctgaagcgatcgatcctttgatgcgtcgtgcagcgaagaccatcaatttcggtgttctctacggtatgagtgcctttcgtttgtcgcaggaattaggcattccctatgaagaagctcaggcgttcattcagaaatactttcaaagctatcccaaagttaaagcatggatcgagaagactctcgaagaaggccgcacacgtggttacgtagagaccttatttggacgtcgccgctatgttcccgatttaaacgctcgcgtgaaaggcaagcgtgaagccgccgaacgcatggcgttcaacatgcctgtacagggcacggcagctgacctcatgaaacttgcaatggtgcgcctttttccacaattgcgtgaagttggtgcccgcatgctcttgcaggtccacgatgaactcttgttagaagcgccaaaagagcgtgcggaagaggtggcagccctcgcgaaagaagttatggaaggcgtgtggcccttagcggtgcctcttgaagtcgaagttggtattggcgaggattggctggctgccaaagga

SEQ ID NO: 4070 - protein, 841 aa, synthetic construct
  REGION 1..841: note = Variant of DNA polymerase I from Thermus sp. strain 2.9
MHHHHHHGGSGVLPVFEPKGRVLLVDGHHLAYRNFFALKGLTTSSGEPVQGVYGFAKSLLKALKEDGDVVIVVFDAKAPSFRHEAYEAYKAGRAPTPEDFPRQLALMKELVDLLGLERLEVPGFEADDVLATLAKKAEREGYEVQILTADRDLFQLLSPRISVLHPEGHRITPEWLWEKYGLRPEQWVDFRALAGDPSDNIPGVKGIGEKTALKLLKEWGSLENLLKNLDQVKPESVREKILAHLEDLKLSRELSRVRTDLPLEVDFQRRREPDWEGLKAFLERLEFGSLLHEFGLLESPLPAEEAPWPPPEGAFLGYRLSRPEPMWAELLALAASAQGRVYRAEDPHGALRGLFEVRGLLAKDLAVVALREGLDLPPTDDPMLLAYLLDPSNTTPEGVARRYGGEWTEDAAKRALLAERLHANLLGRLQGEERLLWLYEEVEKPLSRVLAHMEATGVKLDVAYLENLSLEVAAHMRRLEEEVFRLAGRSFRLNSRDQLERVLFDELGLPPIGKTEKTGKRSTSAAVLEALREVHPIVDKILQYRELAKLKGTYIDRLPALVHPKTGRLHTRFNQTATATGRLSSSDPNLQNIPVRTPLGQKIRRAFVAAEGWRLVALDYSQIELRVLAHLSGDENLIRVFQEGKDIHTQTASWMFGLSAEAIDPLMRRAAKTINFGVLYGMSAFRLSQELGIPYEEAQAFIQKYFQSYPKVKAWIEKTLEEGRTRGYVETLFGRRRYVPDLNARVKGKREAAERMAFNMPVQGTAADLMKLAMVRLFPQLREVGARMLLQVHDELLLEAPKERAEEVAALAKEVMEGVWPLAVPLEVEVGIGEDWLAAKG

SEQ ID NO: 4071 - DNA, 2523 bp, synthetic construct; identical to SEQ ID NO: 3777
  misc_feature 1..2523: note = Variant of DNA polymerase I from Thermus sp. strain 2.9
  source 1..2523: mol_type = other DNA

SEQ ID NO: 4072 - protein, 841 aa, synthetic construct; identical to SEQ ID NO: 3778
  REGION 1..841: note = Variant of DNA polymerase I from Thermus sp. strain 2.9

SEQ ID NO: 4073 - DNA, 2523 bp, synthetic construct; identical to SEQ ID NO: 4053
  misc_feature 1..2523: note = Variant of DNA polymerase I from Thermus sp. strain 2.9
  source 1..2523: mol_type = other DNA

SEQ ID NO: 4074 - protein, 841 aa, synthetic construct; identical to SEQ ID NO: 4054
  REGION 1..841: note = Variant of DNA polymerase I from Thermus sp. strain 2.9

SEQ ID NO: 4075 - DNA, 2523 bp, synthetic construct
  misc_feature 1..2523: note = Variant of DNA polymerase I from Thermus sp. strain 2.9
  source 1..2523: mol_type = other DNA
atgcaccatcatcatcatcatggcggtagcggcgtgttaccggtgttcgagcctaaaggtcgcgtgcttctggttgatggccatcatctcgcgtatcgtaacttctttgccctgaaaggattaaccaccagcagcggcgagccggtacagggtgtctacggctttgcaaagtcgctcctgaaagctctgaaagaagacggtgatgtggtgattgttgtctttgatgcgaaagcgccaagttttcgccacgaagcgtacgaagcttacaaagccgggcgtgctccaacgccggaagactttcctcgccaattggcgcttatgaaggaattagtggatttgcttggcctcgaacgcttggaagttcccggtttcgaggcagacgacgtattagcgactctcgcaaagaaagccgaacgtgagggctatgaagtccagatcttgacagcagatcgcgatcttttccagcttttatctccgcgcatctcggtgttacacccggaagggcatcgtatcaccccggaatggctctgggagaaatatggtttgcgtcccgaacaatgggtggattttcgcgccttagcaggcgatccgagcgacaatattccgggagttaaaggtatcggcgagaagacggcgctcaagctccttaaagaatgggggtcgttggagaacttgcttaagaatttagatcaggtcaaaccagagtcagtgcgtgagaagattcttgctcacctcgaagacctcaaattaagccgcgaattgtcccgtgtacgcaccgatttgccgctcgaagttgatttccaacgccgccgcgaacctgactgggagggtcttaaagcgtttttagagcgtcttgaatttggttcgctcttgcatgaattcggccttttagaaagcccgttaccagccgaagaagcaccttggccaccgcccgagggcgcgtttttaggttaccgtttgagtcgcccggaaccgatgtgggccgaattactggctcttgcagcgtctgcccagggacgtgtgtatcgcgcggaagaccctcatggtgcgctccgcggcctcttcgaagtccgtggactccttgccaaagacttagctgttgttgcattgcgcgaaggtcttgatttacctccgactgatgatccaatgcttcttgcgtacctcttggacccgtcaaacacgacgcccgaaggcgtagcccgtcgttacggcggcgagtggaccgaagatgcagcgaaacgcgcgttattggccgaacgtttgcacgcaaatttattaggacgtttgcaaggcgaggaacgtctcctctggctttacgaagaagtggagaaaccattgagtcgcgtgctcgcgcatatggaagctaccggtgtcaaattagacgtggcgtatttggagaatctcagccttgaagttgctgcccacatgcgccgcttggaggaagaagtattccgtttagcaggccgttcctttcgccttgtttctcgcgatcagttagaacgtgtgttgttcgatgaacttggtctccctcctatcggcaagacagagaagaccggtaaacgtagcacttcagcggcggttttagaagctcttcgcgaagtccatcccattgtggacaagatcttgcaataccgcgaactcgcgaaattgaaaggcacctatattgaccgtcttccggcattagtccacccgaaaacgggacgcctccatacccgcttcaaccaaacagccacggcgaccggtcgtttgtcctcctctgatccaaaccttcagaatattccagtacgtaccccattgggccagaagatccgccgtgcgtttgtagctgaggagggttggcgtttagtggccctcgattatagtcaaattgaattacgtgtccttgcccatctttctggcgatgagaacctcatccgcgtgtttcaggaaggcaaagacattcacactcaaacggcaagctggatgtttggattatcagctgaagcgatcgatcctttgatgcgtcgtgcagcgaagaccatcaatttcggtgttctctacggtatgagtgcctttcgtttgtcgcaggaattaggcattccctatgaagaagctcaggcgttcattcagaaatactttcaaagctatcccaaagttaaagcatggatcgagaagactctcgaagaaggccgcacacgtggttacgtagagaccttatttggacgtcgccgctatgttcccgatttaaacgctcgcgtgaaaggcaagcgtgaagccgccgaacgcatggcgttcaacatgcctgtacagggcacggcagctgacctcatgaaacttgcaatggtgcgcctttttccacaattgcgtgaagttggtgcccgcatgctcttgcaggtccacgatgaactcttgttagaagcgccaaaagagcgtgcggaagaggtggcagccctcgcgaaagaagttatggaaggcgtgtggcccttagcggtgcctcttgaagtcgaagttggtattggcgaggattggctggctgccaaagga

SEQ ID NO: 4076 - protein, 841 aa, synthetic construct
  REGION 1..841: note = Variant of DNA polymerase I from Thermus sp. strain 2.9
MHHHHHHGGSGVLPVFEPKGRVLLVDGHHLAYRNFFALKGLTTSSGEPVQGVYGFAKSLLKALKEDGDVVIVVFDAKAPSFRHEAYEAYKAGRAPTPEDFPRQLALMKELVDLLGLERLEVPGFEADDVLATLAKKAEREGYEVQILTADRDLFQLLSPRISVLHPEGHRITPEWLWEKYGLRPEQWVDFRALAGDPSDNIPGVKGIGEKTALKLLKEWGSLENLLKNLDQVKPESVREKILAHLEDLKLSRELSRVRTDLPLEVDFQRRREPDWEGLKAFLERLEFGSLLHEFGLLESPLPAEEAPWPPPEGAFLGYRLSRPEPMWAELLALAASAQGRVYRAEDPHGALRGLFEVRGLLAKDLAVVALREGLDLPPTDDPMLLAYLLDPSNTTPEGVARRYGGEWTEDAAKRALLAERLHANLLGRLQGEERLLWLYEEVEKPLSRVLAHMEATGVKLDVAYLENLSLEVAAHMRRLEEEVFRLAGRSFRLVSRDQLERVLFDELGLPPIGKTEKTGKRSTSAAVLEALREVHPIVDKILQYRELAKLKGTYIDRLPALVHPKTGRLHTRFNQTATATGRLSSSDPNLQNIPVRTPLGQKIRRAFVAEEGWRLVALDYSQIELRVLAHLSGDENLIRVFQEGKDIHTQTASWMFGLSAEAIDPLMRRAAKTINFGVLYGMSAFRLSQELGIPYEEAQAFIQKYFQSYPKVKAWIEKTLEEGRTRGYVETLFGRRRYVPDLNARVKGKREAAERMAFNMPVQGTAADLMKLAMVRLFPQLREVGARMLLQVHDELLLEAPKERAEEVAALAKEVMEGVWPLAVPLEVEVGIGEDWLAAKG

SEQ ID NO: 4077 - DNA, 2523 bp, synthetic construct
  misc_feature 1..2523: note = Variant of DNA polymerase I from Thermus sp. strain 2.9
  source 1..2523: mol_type = other DNA
atgcaccatcatcatcatcatggcggtagcggcgtgttaccggtgttcgagcctaaaggtcgcgtgcttctggttgatggccatcatctcgcgtatcgtaacttctttgccctgaaaggattaaccaccagcagcggcgagccggtacagggtgtctacggctttgcaaagtcgctcctgaaagctctgaaagaagacggtgatgtggtgattgttgtctttgatgcgaaagcgccaagttttcgccacgaagcgtacgaagcttacaaagccgggcgtgctccaacgccggaagactttcctcgccaattggcgcttatgaaggaattagtggatttgcttggcctcgaacgcttggaagttcccggtttcgaggcagacgacgtattagcgactctcgcaaagaaagccgaacgtgagggctatgaagtccagatcttgacagcagatcgcgatcttttccagcttttatctccgcgcatctcggtgttacacccggaagggcatcgtatcaccccggaatggctctgggagaaatatggtttgcgtcccgaacaatgggtggattttcgcgccttagcaggcgatccgagcgacaatattccgggagttaaaggtatcggcggtaagacggcgctcaagctccttaaagaatgggggtcgttggagaacttgcttaagaatttagatcaggtcaaaccagagtcagtgcgtgagaagattcttgctcacctcgaagacctcaaattaagccgcgaattgtcccgtgtacgcaccgatttgccgctcgaagttgatttccaacgccgccgcgaacctgactgggagggtcttaaagcgtttttagagcgtcttgaatttggttcgctcttgcatgaattcggccttttagaaagcccgttaccagccgaagaagcaccttggccaccgcccgagggcgcgtttttaggttaccgtttgagtcgcccggaaccgatgtgggccgaattactggctcttgcagcgtctgcccagggacgtgtgtatcgcgcggaagaccctcatggtgcgctccgcggcctcttcgaagtccgtggactccttgccaaagacttagctgttgttgcattgcgcgaaggtcttgatttacctccgactgatgatccaatgcttcttgcgtacctcttggacccgtcaaacacgacgcccgaaggcgtagcccgtcgttacggcggcgagtggaccgaagatgcagcgaaacgcgcgttattggccgaacgtttgcacgccaatttattaggacgtttgcaaggcgaggaacgtctcctctggctttacgaagaagtggagaaaccattgagtcgcgtgctcgcgcatatggaagctaccggtgtcaaattagacgtggcgtatttggagaatctcagccttgaagttgctgcccacatgcgccgcttggaggaagaagtattccgtttagcaggccgttcctttcgccttaattctcgcgatcagttagaacgtgtgttgttcgatgaacttggtctccctcctatcggcaagacagagaagaccggtaaacgtagcacttcagcggcggttttagaagctcttcgcgaagtccatcccattgtggacaagatcttgcaataccgcgaactcgcgaaattgaaaggcacctatattgaccgtcttccggcattagtccacccgaaaacgggacgcctccatacccgcttcaaccaaacagccacggcgaccggtcgtttgtcctcctctgatccaaaccttcagaatattccagtacgtaccccattgggccagaagatccgccgtgcgtttgtagctgaggagggttggcgtttagtggccctcgattatagccaaattgaattacgtgtccttgcccatctttctggcgatgagaacctcatccgcgtgtttcaggaaggcaaagacattcacactcaaacggcaagctggatgtttggattatcagctgaagcgatcgatcctttgatgcgtcgtgcagcgaagaccatcaatttcggtgttctctacggtatgagtgcctttcgtttgtcgcaggaattaggcattccctatgaagaagctcaggcgttcattcagaaatactttcaaagctatcccaaagttaaagcatggatcgagaagactctcgaagaaggccgcacacgtggttacgtagagaccttatttggacgtcgccgctatgttcccgatttaaacgctcgcgtgaaaggcaagcgtgaagccgccgaacgcatggcgttcaacatgcctgtacagggcacggcagctgacctcatgaaacttgcaatggtgcgcctttttccacaattgcgtgaagttggtgcccgcatgctcttgcaggtccacgatgaactcttgttagaagcgccaaaagagcgtgcggaagaggtggcagccctcgcgaaagaagttatggaaggcgtgtggcccttagcggtgcctcttgaagtcgaagttggtattggcgaggattggctggctgccaaagga

SEQ ID NO: 4078 - protein, 841 aa, synthetic construct
  REGION 1..841: note = Variant of DNA polymerase I from Thermus sp. strain 2.9
MHHHHHHGGSGVLPVFEPKGRVLLVDGHHLAYRNFFALKGLTTSSGEPVQGVYGFAKSLLKALKEDGDVVIVVFDAKAPSFRHEAYEAYKAGRAPTPEDFPRQLALMKELVDLLGLERLEVPGFEADDVLATLAKKAEREGYEVQILTADRDLFQLLSPRISVLHPEGHRITPEWLWEKYGLRPEQWVDFRALAGDPSDNIPGVKGIGGKTALKLLKEWGSLENLLKNLDQVKPESVREKILAHLEDLKLSRELSRVRTDLPLEVDFQRRREPDWEGLKAFLERLEFGSLLHEFGLLESPLPAEEAPWPPPEGAFLGYRLSRPEPMWAELLALAASAQGRVYRAEDPHGALRGLFEVRGLLAKDLAVVALREGLDLPPTDDPMLLAYLLDPSNTTPEGVARRYGGEWTEDAAKRALLAERLHANLLGRLQGEERLLWLYEEVEKPLSRVLAHMEATGVKLDVAYLENLSLEVAAHMRRLEEEVFRLAGRSFRLNSRDQLERVLFDELGLPPIGKTEKTGKRSTSAAVLEALREVHPIVDKILQYRELAKLKGTYIDRLPALVHPKTGRLHTRFNQTATATGRLSSSDPNLQNIPVRTPLGQKIRRAFVAEEGWRLVALDYSQIELRVLAHLSGDENLIRVFQEGKDIHTQTASWMFGLSAEAIDPLMRRAAKTINFGVLYGMSAFRLSQELGIPYEEAQAFIQKYFQSYPKVKAWIEKTLEEGRTRGYVETLFGRRRYVPDLNARVKGKREAAERMAFNMPVQGTAADLMKLAMVRLFPQLREVGARMLLQVHDELLLEAPKERAEEVAALAKEVMEGVWPLAVPLEVEVGIGEDWLAAKG

SEQ ID NO: 4079 - DNA, 2523 bp, synthetic construct
  misc_feature 1..2523: note = Variant of DNA polymerase I from Thermus sp. strain 2.9
  source 1..2523: mol_type = other DNA
atgcaccatcatcatcatcatggcggtagcggcgtgttaccggtgttcgagcctaaaggtcgcgtgcttctggttgatggccatcatctcgcgtatcgtaacttctttgccctgaaaggattaaccaccagcagtggcgagccggtacagggtgtctacggctttgcaaagtcgctcctgaaagctctgaaagaagacggtgatgtggtgattgttgtctttgatgcgaaagcgccaagttttcgccacgaagcgtacgaagcttacaaagccgggcgtgctccaacgccggaagactttcctcgccaattggcgcttatgaaggaattagtggatttgcttggcctcgaacgcttggaagttcccggtttcgaggcagacgacgtattagcgactctcgcaaagaaagccgaacgtgagggctatgaagtccagatcttgacagcagatcgcgatcttttccagcttttatctccgcgcatctcggtgttacacccggaagggcatcgtatcaccccggaatggctctgggagaaatatggtttgcgtcccgaacaatgggtggattttcgcgccttagcaggcgatccgagcgacaatattccgggagttaaaggtatcggcgagaagacggcgctcaagctccttaaagaatgggggtcgttggagaacttgcttaagaatttagatcaggtcaaaccagagtcagtgcgtgagaagattcttgctcacctcgaagacctcaaattaagccgcgaattgtcccgtgtacgcaccgatttgccgctcgaagttgatttccaacgccgccgcgaacctgactgggagggtcttaaagcgtttttagagcgtcttgaatttggttcgctcttgcatgaattcggccttttagaaagcccgttaccagccgaagaagcaccttggccaccgcccgagggcgcgtttttaggttaccgtttgagtcgcccggaaccgatgtgggccgaattactggctcttgcagcgtctgcccagggacgtgtgtatcgcgcggaagaccctcatggtgcgctccgcggcctcttcgaagtccgtggactccttgccaaagacttagctgttgttgcattgcgcgaaggtcttgatttacctccgactgatgatccaatgcttcttgcgtacctcttggacccgtcaaacacgacgcccgaaggcgtagcccgtcgttacggcggcgagtggaccgaagatgcagcgaaacgcgcgttattggccgaacgtttgcacgcaaatttattaggacgtttgcaaggcgaggaacgtctcctctggctttacgaagaagtggagaaaccattgagtcgcgtgctcgcgcatatggaagctaccggtgtcaaattagacgtggcgtatttggagaatctcagccttgaagttgctgcccacatgcgccgcttggaggaagaagtattccgtttagcaggccgttcctttcgccttaattctcgcgatcagttagaacgtgtgttgttcgatgaacttggtctccctcctatcggcaagacagagaagaccggtaaacgtagcacttcagcggcggttttagaagctcttcgcgaagtccatcccattgtggacaagatcttgcaataccgcgaactcgcgaaattgaaaggcacctatattgaccgtcttccggcattagtccacccgaaaacgggacgcctccatacccgcttcaaccaaacagccacggcgaccggtcgtttgtcctcctctgatccaaaccttcagaatattccagtacgtaccccattgggccagaagatccgccgtgcgtttgtagctgaggagggttggcgtttagtggccctcgattatcgtcaaattgaattacgtgtccttgcccatctttctggcgatgagaacctcatccgcgtgtttcaggaaggcaaagacattcacactcaaacggcaagctggatgtttggattatcagctgaagcgatcgatcctttgatgcgtcgtgcagcgaagaccatcaatttcggtgttctctacggtatgagtgcctttcgtttgtcgcaggaattaggcattccctatgaagaagctcaggcgttcattcagaaatactttcaaagctatcccaaagttaaagcatggatcgagaagactctcgaagaaggccgcacacgtggttacgtagagaccttatttggacgtcgccgctatgttcccgatttaaacgctcgcgtgaaaggcaagcgtgaagccgccgaacgcatggcgttcaacatgcctgtacagggcacggcagctgacctcatgaaacttgcaatggtgcgcctttttccacaattgcgtgaagttggtgcccgcatgctcttgcaggtccacgatgaactcttgttagaagcgccaaaagagcgtgcggaagaggtggcagccctcgcgaaagaagttatggaaggcgtgtggcccttagcggtgcctcttgaagtcgaagttggtattggcgaggattggctggctgccaaagga

SEQ ID NO: 4080 - protein, 841 aa, synthetic construct; identical to SEQ ID NO: 3862
  REGION 1..841: note = Variant of DNA polymerase I from Thermus sp. strain 2.9

SEQ ID NO: 4081 - DNA, 2523 bp, synthetic construct
  misc_feature 1..2523: note = Variant of DNA polymerase I from Thermus sp. strain 2.9
  source 1..2523: mol_type = other DNA
atgcaccatcatcatcatcatggcggtagcggcgtgttaccggtgttcgagcctaaaggtcgcgtgcttctggttgatggccatcatctcgcgtatcgtaacttctttgccctgaaaggattaaccaccagcagcggcgagccggtacagggtgtctacggctttgcaaagtcgctcctgaaagctctgaaagaagacggtgatgtggtgattgttgtctttgatgcgaaagcgccaagttttcgccacgaagcgtacgaagcttacaaagccgggcgtgctccaacgccggaagactttcctcgccaattggcgcttatgaaggaattagtggatttgcttggcctcgaacgcttggaagttcccggtttcgaggcagacgacgtattagcgactctcgcaaagaaagccgaacgtgagggctatgaagtccagatcttgacagcagatcgcgatcttttccagcttttatctccgcgcatctcggtgttacacccggaagggcatcgtatcaccccggaatggctctgggagaaatatggtttgcgtcccgaacaatgggtggattttcgcgccttagcaggcgatccgagcgacaatattccgggagttaaaggtatcggcgagaagacggcgctcaagctccttaaagaatgggggtcgttggagaacttgcttaagaatttagatcaggtcaaaccagagtcagtgcgtgagaagattcttgctcacctcgaagacctcaaattaagccgcgaattgtcccgtgtacgcaccgatttgccgctcgaagttgagttccaacgccgccgcgaacctgactgggagggtcttaaagcgtttttagagcgtcttgaatttggttcgctcttgcatgaattcggccttttagaaagcccgttaccagccgaagaagcaccttggccaccgcccgagggcgcgtttttaggttaccgtttgagtcgcccggaaccgatgtgggccgaattactggctcttgcagcgtctgcccagggacgtgtgtatcgcgcggaagaccctcatggtgcgctccgcggcctcttcgaagtccgtggactccttgccaaagacttagctgttgttgcattgcgcgaaggtcttgatttacctccgactgatgatccaatgcttcttgcgtacctcttggacccgtcaaacacgacgcccgaaggcgtagcccgtcgttacggcggcgagtggaccgaagatgcagcgaaacgcgcgttattggccgaacgtttgcacgccaatttattaggacgtttgcaaggcgaggaacgtctcctctggctttacgaagaagtggagaaaccattgagtcgcgtgctcgcgcatatggaagctaccggtgtcaaattagacgtggcgtatttggagaatctcagccttgaagttgctgcccacatgcgccgcttggaggaagaagtattccgtttagcaggccgttcctttcgccttaattctcgcgatcagttagaacgtgtgttgttcgatgaacttggtctccctcctatcggcaagacagagaagaccggtaaacgtagcacttcagcggcggttttagaagctcttcgcgaagtccatcccattgtggacaagatcttgcaataccgcgaactcgcgaaattgaaaggcacctatattgaccgtcttccggcattagtccacccgaaaacgggacgcctccatacccgcttcaaccaaacagccacggcgaccggtcgtttgtcctcctctgatccaaaccttcagaatattccagtacgtaccccattgggccagaagatccgccgtgcgtttgtagctgaggagggttggcgtttagtggccctcgattatagccaaattgaattacgtgtccttgcccatctttctggcgatgagaacctcatccgcgtgtttcaggaaggcaaagacattcacactcaaacggcaagctggatgtttggattatcagctgaagcgatcgatcctttgatgcgtcgtgcagcgaagaccatcaatttcggtgttctctacggtatgagtgcctttcgtttgtcgcaggaattaggcattccctatgaagaagctcaggcgttcattcagaaatactttcaaagctatcccaaagttaaagcatggatcgagaagactctcgaagaaggccgcacacgtggttacgtagagaccttatttggacgtcgccgctatgttcccgatttaaacgctcgcgtgaaaggcaagcgtgaagccgccgaacgcatggcgttcaacatgcctgtacagggcacggcagctgacctcatgaaacttgcaatggtgcgcctttttccacaattgcgtgaagttggtgcccgcatgctcttgcaggtccacgatgaactcttgttagaagcgccaaaagagcgtgcggaagaggtggcagccctcgcgaaagaagttatggaaggcgtgtggcccttagcggtgcctcttgaagtcgaagttggtattggcgaggattggctggctgccaaagga

SEQ ID NO: 4082 - protein, 841 aa, synthetic construct
  REGION 1..841: note = Variant of DNA polymerase I from Thermus sp. strain 2.9
MHHHHHHGGSGVLPVFEPKGRVLLVDGHHLAYRNFFALKGLTTSSGEPVQGVYGFAKSLLKALKEDGDVVIVVFDAKAPSFRHEAYEAYKAGRAPTPEDFPRQLALMKELVDLLGLERLEVPGFEADDVLATLAKKAEREGYEVQILTADRDLFQLLSPRISVLHPEGHRITPEWLWEKYGLRPEQWVDFRALAGDPSDNIPGVKGIGEKTALKLLKEWGSLENLLKNLDQVKPESVREKILAHLEDLKLSRELSRVRTDLPLEVEFQRRREPDWEGLKAFLERLEFGSLLHEFGLLESPLPAEEAPWPPPEGAFLGYRLSRPEPMWAELLALAASAQGRVYRAEDPHGALRGLFEVRGLLAKDLAVVALREGLDLPPTDDPMLLAYLLDPSNTTPEGVARRYGGEWTEDAAKRALLAERLHANLLGRLQGEERLLWLYEEVEKPLSRVLAHMEATGVKLDVAYLENLSLEVAAHMRRLEEEVFRLAGRSFRLNSRDQLERVLFDELGLPPIGKTEKTGKRSTSAAVLEALREVHPIVDKILQYRELAKLKGTYIDRLPALVHPKTGRLHTRFNQTATATGRLSSSDPNLQNIPVRTPLGQKIRRAFVAEEGWRLVALDYSQIELRVLAHLSGDENLIRVFQEGKDIHTQTASWMFGLSAEAIDPLMRRAAKTINFGVLYGMSAFRLSQELGIPYEEAQAFIQKYFQSYPKVKAWIEKTLEEGRTRGYVETLFGRRRYVPDLNARVKGKREAAERMAFNMPVQGTAADLMKLAMVRLFPQLREVGARMLLQVHDELLLEAPKERAEEVAALAKEVMEGVWPLAVPLEVEVGIGEDWLAAKG

SEQ ID NO: 4083 - DNA, 2523 bp, synthetic construct
  misc_feature 1..2523: note = Variant of DNA polymerase I from Thermus sp. strain 2.9
  source 1..2523: mol_type = other DNA
atgcaccatcatcatcatcatggcggtagcggcgtgttaccggtgttcgagcctaaaggtcgcgtgcttctggttgatggccatcatctcgcgtatcgtaacttctttgccctgaaaggattaaccaccagcagcggcgagccggtacagggtgtctacggctttgcaaagtcgctcctgaaagctctgaaagaagacggtgatgtggtgattgttgtctttgatgcgaaagcgccaagttttcgccacgaagcgtacgaagcttacaaagccgggcgtgctccaacgccggaagactttcctcgccaattggcgcttatgaaggaattagtggatttgcttggcctcgaacgcttggaagttcccggtttcgaggcagacgacgtattagcgactctcgcaaagaaagccgaacgtgagggctatgaagtccagatcttgacagcagatcgcgatcttttccagcttttatctccgcgcatctcggtgttacacccggaagggcatcgtatcaccccggaatggctctgggagaaatatggtttgcgtcccgaacaatgggtggattttcgcgccttagcaggcgatccgagcgacaatattccgggagttaaaggtatcggcgagaagacggcgctcaagctccttaaagaatgggggtcgttggagaacttgcttaagaatttagatcaggtcaaaccagagtcagtgcgtgagaagattcttgctcacctcgaagacctcaaattaagccgcgaattgtcccgtgtacgcaccgatttgccgctcgaagttgatttccaacgccgccgcgaacctgactgggagggtcttaaagcgtttttagagcgtcttgaatttggttcgctcttgcatgaattcggccttttagaaagcccgttaccagccgaagaagcaccttggccaccgcccgagggcgcgtttttaggttaccgtttgagtcgcccggaaccgatgtgggccgaattactggctcttgcagcgtctgcccagggacgtgtgtatcgcgcggaagaccctcatggtgcgctccgcggcctcttcgaagtccgtggactccttgccaaagacttagctgttgttgcattgcgcgaaggtcttgatttacctccgactgatgatccaatgcttcttgcgtacctcttggacccgtcaaacacgacgcccgaaggcgtagcccgtcgttacggcggcgagtggaccgaagatgcagcgaaacgcgcgttattggccgaacgtttgcacgccaatttattaggacgtttgcaaggcgaggaacgtctcctctggctttacgaagaagtggagaaaccattgagtcgcgtgctcgcgcatatggaagctaccggtgtcaaattagacgtggcgtatttggagaatctcagccttgaagttgctgcccacatgcgccgcttggaggaagaagtattccgtttagcaggccgttcctttcgccttaattctcgcgatcagttagaacgtgtgttgttcgatgaacttggtgcgcctcctatcggcaagacagagaagaccggtaaacgtagcacttcagcggcggttttagaagctcttcgcgaagtccatcccattgtggacaagatcttgcaataccgcgaactcgcgaaattgaaaggcacctatattgaccgtcttccggcattagtccacccgaaaacgggacgcctccatacccgcttcaaccaaacagccacggcgaccggtcgtttgtcctcctctgatccaaaccttcagaatattccagtacgtaccccattgggccagaagatccgccgtgcgtttgtagctgaggagggttggcgtttagtggccctcgattatagccaaattgaattacgtgtccttgcccatctttctggcgatgagaacctcatccgcgtgtttcaggaaggcaaagacattcacactcaaacggcaagctggatgtttggattatcagctgaagcgatcgatcctttgatgcgtcgtgcagcgaagaccatcaatttcggtgttctctacggtatgagtgcctttcgtttgtcgcaggaattaggcattccctatgaagaagctcaggcgttcattcagaaatactttcaaagctatcccaaagttaaagcatggatcgagaagactctcgaagaaggccgcacacgtggttacgtagagaccttatttggacgtcgccgctatgttcccgatttaaacgctcgcgtgaaaggcaagcgtgaagccgccgaacgcatggcgttcaacatgcctgtacagggcacggcagctgacctcatgaaacttgcaatggtgcgcctttttccacaattgcgtgaagttggtgcccgcatgctcttgcaggtccacgatgaactcttgttagaagcgccaaaagagcgtgcggaagaggtggcagccctcgcgaaagaagttatggaaggcgtgtggcccttagcggtgcctcttgaagtcgaagttggtattggcgaggattggctggctgccaaagga

SEQ ID NO: 4084 - protein, 841 aa, synthetic construct
  REGION 1..841: note = Variant of DNA polymerase I from Thermus sp. strain 2.9
MHHHHHHGGSGVLPVFEPKGRVLLVDGHHLAYRNFFALKGLTTSSGEPVQGVYGFAKSLLKALKEDGDVVIVVFDAKAPSFRHEAYEAYKAGRAPTPEDFPRQLALMKELVDLLGLERLEVPGFEADDVLATLAKKAEREGYEVQILTADRDLFQLLSPRISVLHPEGHRITPEWLWEKYGLRPEQWVDFRALAGDPSDNIPGVKGIGEKTALKLLKEWGSLENLLKNLDQVKPESVREKILAHLEDLKLSRELSRVRTDLPLEVDFQRRREPDWEGLKAFLERLEFGSLLHEFGLLESPLPAEEAPWPPPEGAFLGYRLSRPEPMWAELLALAASAQGRVYRAEDPHGALRGLFEVRGLLAKDLAVVALREGLDLPPTDDPMLLAYLLDPSNTTPEGVARRYGGEWTEDAAKRALLAERLHANLLGRLQGEERLLWLYEEVEKPLSRVLAHMEATGVKLDVAYLENLSLEVAAHMRRLEEEVFRLAGRSFRLNSRDQLERVLFDELGAPPIGKTEKTGKRSTSAAVLEALREVHPIVDKILQYRELAKLKGTYIDRLPALVHPKTGRLHTRFNQTATATGRLSSSDPNLQNIPVRTPLGQKIRRAFVAEEGWRLVALDYSQIELRVLAHLSGDENLIRVFQEGKDIHTQTASWMFGLSAEAIDPLMRRAAKTINFGVLYGMSAFRLSQELGIPYEEAQAFIQKYFQSYPKVKAWIEKTLEEGRTRGYVETLFGRRRYVPDLNARVKGKREAAERMAFNMPVQGTAADLMKLAMVRLFPQLREVGARMLLQVHDELLLEAPKERAEEVAALAKEVMEGVWPLAVPLEVEVGIGEDWLAAKG

SEQ ID NO: 4085 - DNA, 2523 bp, synthetic construct
  misc_feature 1..2523: note = Variant of DNA polymerase I from Thermus sp. strain 2.9
  source 1..2523: mol_type = other DNA
atgcaccatcatcatcatcatggcggtagcggcgtgttaccggtgttcgagcctaaaggtcgcgtgcttctggttgatggccatcatctcgcgtatcgtaacttctttgccctgaaaggattaaccaccagcagcggcgagccggtacagggtgtctacggctttgcaaagtcgctcctgaaagctctgaaagaagacggtgatgtggtgattgttgtctttgatgcgaaagcgccaagttttcgccacgaagcgtacgaagcttacaaagccgggcgtgctccaacgccggaagactttcctcgccaattgtcgcttatgaaggaattagtggatttgcttggcctcgaacgcttggaagttcccggtttcgaggcagacgacgtattagcgactctcgcaaagaaagccgaacgtgagggctatgaagtccagatcttgacagcagatcgcgatcttttccagcttttatctccgcgcatctcggtgttacacccggaagggcatcgtatcaccccggaatggctctgggagaaatatggtttgcgtcccgaacaatgggtggattttcgcgccttagcaggcgatccgagcgacaatattccgggagttaaaggtatcggcgagaagacggcgctcaagctccttaaagaatgggggtcgttggagaacttgcttaagaatttagatcaggtcaaaccagagtcagtgcgtgagaagattcttgctcacctcgaagacctcaaattaagccgcgaattgtcccgtgtacgcaccgatttgccgctcgaagttgatttccaacgccgccgcgaacctgactgggagggtcttaaagcgtttttagagcgtcttgaatttggttcgctcttgcatgaattcggccttttagaaagcccgttaccagccgaagaagcaccttggccaccgcccgagggcgcgtttttaggttaccgtttgagtcgcccggaaccgatgtgggccgaattactggctcttgcagcgtctgcccagggacgtgtgtatcgcgcggaagaccctcatggtgcgctccgcggcctcttcgaagtccgtggactccttgccaaagacttagctgttgttgcattgcgcgaaggtcttgatttacctccgactgatgatccaatgcttcttgcgtacctcttggacccgtcaaacacgacgcccgaaggcgtagcccgtcgttacggcggcgagtggaccgaagatgcagcgaaacgcgcgttattggccgaacgtttgcacgccaatttattaggacgtttgcaaggcgaggaacgtctcctctggctttacgaagaagtggagaaaccattgagtcgcgtgctcgcgcatatggaagctaccggtgtcaaattagacgtggcgtatttggagaatctcagccttgaagttgctgcccacatgcgccgcttggaggaagaagtattccgtttagcaggccgttcctttcgccttaattctcgcgatcagttagaacgtgtgttgttcgatgaacttggtctccctcctatcggcaagacagagaagaccggtaaacgtagcacttcagcggcggttttagaagctcttcgcgaagtccatcccattgtggacaagatcttgcaataccgcgaactcgcgaaattgaaaggcacctatattgaccgtcttccggcattagtccacccgaaaacgggacgcctccatacccgcttcaaccaaacagccacggcgaccggtcgtttgtcctcctctgatccaaaccttcagaatattccagtacgtaccccattgggccagaagatccgccgtgcgtttgtagctgaggagggttggcgtttagtggccctcgattatagccaaattgaattacgtgtccttgcccatctttctggcgatgagaacctcatccgcgtgtttcaggaaggcaaagacattcacactcaaacggcaagctggatgtttggattatcagctgaagcgatcgatcctttgatgcgtcgtgcagcgaagaccatcaatttcggtgttctctacggtatgagtgcctttcgtttgtcgcaggaattaggcattccctatgaagaagctcaggcgttcattcagaaatactttcaaagctatcccaaagttaaagcatggatcgagaagactctcgaagaaggccgcacacgtggttacgtagagaccttatttggacgtcgccgctatgttcccgatttaaacgctcgcgtgaaaggcaagcgtgaagccgccgaacgcatggcgttcaacatgcctgtacagggcacggcagctgacctcatgaaacttgcaatggtgcgcctttttccacaattgcgtgaagttggtgcccgcatgctcttgcaggtccacgatgaactcttgttagaagcgccaaaagagcgtgcggaagaggtggcagccctcgcgaaagaagttatggaaggcgtgtggcccttagcggtgcctcttgaagtcgaagttggtattggcgaggattggctggctgccaaagga

SEQ ID NO: 4086 - protein, 841 aa, synthetic construct
  REGION 1..841: note = Variant of DNA polymerase I from Thermus sp. strain 2.9
MHHHHHHGGSGVLPVFEPKGRVLLVDGHHLAYRNFFALKGLTTSSGEPVQGVYGFAKSLLKALKEDGDVVIVVFDAKAPSFRHEAYEAYKAGRAPTPEDFPRQLSLMKELVDLLGLERLEVPGFEADDVLATLAKKAEREGYEVQILTADRDLFQLLSPRISVLHPEGHRITPEWLWEKYGLRPEQWVDFRALAGDPSDNIPGVKGIGEKTALKLLKEWGSLENLLKNLDQVKPESVREKILAHLEDLKLSRELSRVRTDLPLEVDFQRRREPDWEGLKAFLERLEFGSLLHEFGLLESPLPAEEAPWPPPEGAFLGYRLSRPEPMWAELLALAASAQGRVYRAEDPHGALRGLFEVRGLLAKDLAVVALREGLDLPPTDDPMLLAYLLDPSNTTPEGVARRYGGEWTEDAAKRALLAERLHANLLGRLQGEERLLWLYEEVEKPLSRVLAHMEATGVKLDVAYLENLSLEVAAHMRRLEEEVFRLAGRSFRLNSRDQLERVLFDELGLPPIGKTEKTGKRSTSAAVLEALREVHPIVDKILQYRELAKLKGTYIDRLPALVHPKTGRLHTRFNQTATATGRLSSSDPNLQNIPVRTPLGQKIRRAFVAEEGWRLVALDYSQIELRVLAHLSGDENLIRVFQEGKDIHTQTASWMFGLSAEAIDPLMRRAAKTINFGVLYGMSAFRLSQELGIPYEEAQAFIQKYFQSYPKVKAWIEKTLEEGRTRGYVETLFGRRRYVPDLNARVKGKREAAERMAFNMPVQGTAADLMKLAMVRLFPQLREVGARMLLQVHDELLLEAPKERAEEVAALAKEVMEGVWPLAVPLEVEVGIGEDWLAAKG

SEQ ID NO: 4087 - DNA, 2523 bp, synthetic construct
  misc_feature 1..2523: note = Variant of DNA polymerase I from Thermus sp. strain 2.9
  source 1..2523: mol_type = other DNA
atgcaccatcatcatcatcatggcggtagcggcgtgttacctgtgttcgagcctaaaggtcgcgtgcttctggttgatggccatcatctcgcgtatcgtaacttctttgccctgaaaggattaaccaccagcagcggcgagccggtacagggtgtctacggctttgcaaagtcgctcctgaaagctctgaaagaagacggtgatgtggtgattgttgtctttgatgcgaaagcgccaagttttcgccacgaagcgtacgaagcttacaaagccgggcgtgctccaacgccggaagactttcctcgccaattggcgcttatgaaggaattagtggatttgcttggcctcgaacgcttggaagttcccggtttcgaggcagacgacgtattagcgactctcgcaaagaaagccgaacgtgagggctatgaagtccagatcttgacagcagatcgcgatcttttccagcttttatctccgcgcatctcggtgttacacccggaagggcatcgtatcaccccggaatggctctgggagaaatatggtttgcgtcccgaacaatgggtggattttcgcgccttagcaggcgatcctagcgacaatattccgggagttaaaggtatcggcgagaagacggcgctcaagctccttaaagaatgggggtcgttggagaacttgcttaagaatttagatcaggtcaaaccagagtcagtgcgtgagaagattcttgctcacctcgaagacctcaagttaagccgcgaattgtcccgtgtacgcaccgatttgccgctcgaagttgatttccaacgccgccgcgaacctgactgggagggtcttaaagcgtttttagagcgtcttgaatttggttcgctcttgcatgaattcggccttttagaaagcccgttaccagccgaagaagcaccttggccaccgcccgagggcgcgtttttaggttaccgtttgagtcgcccggaaccgatgtgggccgaattactggctcttgcagcgtctgcccagggacgtgtgtatcgcgcggaagaccctcatggtgcgctccgcggcctcttcgaagtccgtggactccttgccaaagacttagctgttgttgcattgcgcgaaggtcttgatttacctccgactgatgatccaatgcttcttgcgtacctcttggacccgtcaaacacgacgcctgaaggcgtagcccgtcgttacggcggcgagtggaccgaagatgcagcgaaacgcgcgttattggccgaacgtttgcacgccaatttattaggacgtttgcaaggcgaggaacgtctcctctggctttacgaagaagtggagaaaccattgagtcgcgtgctcgcgcatatggaagctaccggtgtcaaattagacgtggcgtatttggagaatctcagccttgaagttgctgcccacatgcgccgcttggaggaagaagtattccgtttagcaggccgttcctttcgccttaattctcgcgatcagttagaacgtgtgttgttcgatgaacttggtctccctcctatcggcaagacagagaagaccggtaaacgtagcacttcagcggcggttttagaagctcttcgcgaagtccatcccattgtggacaagatcttgcaataccgcgaactcgcgaaattgaaaggcacctatattgaccgtcttccggcattagtccacccgaaaacgggacgcctccatacccgcttcaaccaaacagccacggcgaccggtcgtttgtcctcctctgatccaaaccttcagaatattccagtacgtaccccattgggccagaagatccgccgtgcgtttgtagctgaggagggttggcgtttagtggccctcgattatagccaaattgaattacgtgtccttgcccatctttctggcgatgagaacctcatccgcgtgtttcaggaaggcaaagacattcacactcaaacggcaagctggatgtttggattatcagctgaagcgatcgatcctttgatgcgtcgtgcagcgaagaccatcaatttcggtgttctctacggtatgagtgcctttcgtttgtcgcaggaattaggcattcccaaagaagaagctcaggcgttcattcagaaatactttcaaagctatcccaaagttaaagcatggatcgagaagactctcgaagaaggccgcacacgtggttacgtagagaccttatttggacgtcgccgctatgttcccgatttaaacgctcgcgtgaaaggcaagcgtgaagccgccgaacgcatggcgttcaacatgcctgtacagggcacggcagctgacctcatgaaacttgcaatggtgcgcctttttccacaattgcgtgaagttggtgcccgcatgctcttgcaggtccacgatgaactcttgttagaagcgccaaaagagcgtgcggaagaggtggcagccctcgcgaaagaagttatggaaggcgtgtggcccttagcggtgcctcttgaagtcgaagttggtattggcgaggattggctggctgccaaagga

SEQ ID NO: 4088 - protein, 841 aa, synthetic construct; identical to SEQ ID NO: 3464
  REGION 1..841: note = Variant of DNA polymerase I from Thermus sp. strain 2.9

SEQ ID NO: 4089 - DNA, 2523 bp, synthetic construct
  misc_feature 1..2523: note = Variant of DNA polymerase I from Thermus sp. strain 2.9
  source 1..2523: mol_type = other DNA
atgcaccatcatcatcatcatggcggtagcggcgtgttaccggtgttcgagcctaaaggtcgcgtgcttctggttgatggccatcatctcgcgtatcgtaacttctttgccctgaaaggattaaccaccagcagtggcgagccggtacagggtgtctacggctttgcaaagtcgctcctgaaagctctgaaagaagacggtgatgtggtgattgttgtctttgatgcgaaagcgccaagttttcgccacgaagcgtacgaagcttacaaagccgggcgtgctccaacgccggaagactttcctcgccaattggcgcttatgaaggaattagtggatttgcttggcctcgaacgcttggaagttcccggtttcgaggcagacgacgtattagcgactctcgcaaagaaagccgaacgtgagggctatgaagtccagatcttgacagcagatcgcgatcttttccagcttttatctccgcgcatctcggtgttacacccggaagggcatcgtatcaccccggaatggctctgggagaaatatggtttgcgtcccgaacaatgggtggattttcgcgccttagcaggcgatccgagcgacaatattccgggagttaaaggtatcggcgagaagacggcgctcaagctccttaaagaatgggggtcgttggagaacttgcttaagaatttagatcaggtcaaaccagagtcagtgcgtgagaagattcttgctcacctcgaagacctcaaattaagccgcgaattgtcccgtgtacgcaccgatttgccgctcgaagttgatttccaacgccgccgcgaacctgactgggagggtcttaaagcgtttttagagcgtcttgaatttggttcgctcttgcatgaattcggccttttagaaagcccgttaccagccgaagaagcaccttggccaccgcccgagggcgcgtttttaggttaccgtttgagtcgcccggaaccgatgtgggccgaattactggctcttgcagcgtctgcccagggacgtgtgtatcgcgcggaagaccctcatggtgcgctccgcggcctcttcgaagtccgtggactccttgccaaagacttagctgttgttgcattgcgcgaaggtcttgatttacctccgactgatgatccaatgcttcttgcgtacctcttggacccgtcaaacacgacgcccgaaggcgtagcccgtcgttacggcggcgagtggaccgaagatgcagcgaaacgcgcgttattggccgaacgtttgcacgcaaatttattaggacgtttgcaaggcgaggaacgtctcctctggctttacgaagaagtggagaaaccattgagtcgcgtgctcgcgcatatggaagctaccggtgtcaaattagacgtggcgtatttggagaatctcagccttgaagttgctgcccacatgcgccgcttggaggaagaagtattccgtttagcaggccgttcctttcgccttaattctcgcgatcagttagaacgtgtgttgttcgatgaacttggtctccctcctatcggcaagacagagaagaccggtaaacgtagcacttcagcggcggttttagaagctcttcgcgaagtccatcccattgtggacaagatcttgcaataccgcgaactcgcgaaattgaaaggcacctatattgaccgtcttccggcattagtccacccgaaaacgggacgcctccatacccgcttcaaccaaacagccacggcgaccggtcgtttgtcctcctctgatccaaaccttcagaatattccagtacgtaccccattgggccagaagatccgccgtgcgtttgtagctgaggagggttggcgtttagtggccctcgattatcgtcaaattgaattacgtgtccttgcccatctttctggcgatgagaacctcatccgcgtgtttcaggaaggcaaagacattcacactcaaacggcaagctggatgtttggattaagcgctgaagcgatcgatcctttgatgcgtcgtgcagcgaagaccatcaatttcggtgttctctacggtatgagtgcctttcgtttgtcgcaggaattaggcattccctatgaagaagctcaggcgttcattcagaaatactttcaaagctatcccaaagttaaagcatggatcgagaagactctcgaagaaggccgcacacgtggttacgtagagaccttatttggacgtcgccgctatgttcccgatttaaacgctcgcgtgaaaggcaagcgtgaagccgccgaacgcatggcgttcaacatgcctgtacagggcacggcagctgacctcatgaaacttgcaatggtgcgcctttttccacaattgcgtgaagttggtgcccgcatgctcttgcaggtccacgatgaactcttgttagaagcgccaaaagagcgtgcggaagaggtggcagccctcgcgaaagaagttatggaaggcgtgtggcccttagcggtgcctcttgaagtcgaagttggtattggcgaggattggctggctgccaaagga

SEQ ID NO: 4090 - protein, 841 aa, synthetic construct; identical to SEQ ID NO: 3862
  REGION 1..841: note = Variant of DNA polymerase I from Thermus sp. strain 2.9

SEQ ID NO: 4091 - DNA, 2523 bp, synthetic construct
  misc_feature 1..2523: note = Variant of DNA polymerase I from Thermus sp. strain 2.9
  source 1..2523: mol_type = other DNA
atgcaccatcatcatcatcatggcggtagcggcgtgttaccggtgttcgagcctaaaggtcgcgtgcttctggttgatggccatcatctcgcgtatcgtaacttctttgccctgaaaggattaaccaccagcagcggcgagccggtacagggtgtctacggctttgcaaagtcgctcctgaaagctctgaaagaagacggtgatgtggtgattgttgtctttgatgcgaaagcgccaagttttcgccacgaagcgtacgaagcttacaaagccgggcgtgctccaacgccggaagactttcctcgccaattggcgcttatgaaggaattagtggatttgcttggcctcgaacgcttggaagttcccggtttcgaggcagacgacgtattagcgactctcgcaaagaaagccgaacgtgagggctatgaagtccagatcttgacagcagatcgcgatcttttccagcttttatctccgcgcatctcggtgttacacccggaagggcatcgtatcaccccggaatggctctgggagaaatatggtttgcgtcccgaacaatgggtggattttcgcgccttagcaggcgatccgagcgacaatattccgggagttaaaggtatcggcgagaagacggcgctcaagctccttaaagaatgggggtcgttggagaacttgcttaagaatttagatcaggtcaaaccagagtcagtgcgtgagaagattcttgctcacctcgaagacctcaaattaagccgcgaattgtcccgtgtacgcaccgatttgccgctcgaagttgatttccaacgccgccgcgaacctgactgggagggtcttaaagcgtttttagagcgtcttgaatttggttcgctcttgcatgaattcggccttttagaaagcccgttaccagccgaagaagcaccttggccaccgcccgagggcgcgtttttaggttaccgtttgagtcgcccggaaccgatgtgggccgaattactggctcttgcagcgtctgcccagggacgtgtgtatcgcgcggaagaccctcatggtgcgctccgcggcctcttcgaagtccgtggactccttgccaaagacttagctgttgttgcattgcgcgaaggtcttgatttacctccgactgatgatccaatgcttcttgcgtacctcttggacccgtcaaacacgacgcccgaaggcgtagcccgtcgttacggcggcgagtggaccgaagatgcagcgaaacgcgcgttattggccgaacgtttgcacgccaatttattaggacgtttgcaaggcgaggaacgtctcctctggctttacgaagaagtggagaaaccattgagtcgcgtgctcgcgcatatggaagctaccggtgtcaaattagacgtggcgtatttggagaatctcagccttgaagttgctgcccacatgcgccgcttggaggaagaagtagtccgtttagcaggccgttcctttcgccttaattctcgcgatcagttagaacgtgtgttgttcgatgaacttggtctccctcctatcggcaagacagagaagaccggtaaacgtagcacttcagcggcggttttagaagctcttcgcgaagtccatcccattgtggacaagatcttgcaataccgcgaactggcgaaattgaaaggcacctatattgaccgtcttccggcattagtccacccgaaaacgggacgcctccatacccgcttcaaccaaacagccacggcgaccggtcgtttgtcctcctctgatccaaaccttcagaatattccagtacgtaccccattgggccagaagatccgccgtgcgtttgtagctgaggagggttggcgtttagtggccctcgattatagccaaattgaattacgtgtccttgcccatctttctggcgatgagaacctcatccgcgtgtttcaggaaggcaaagacattcacactcaaacggcaagctggatgtttggattatcagctgaagcgatcgatcctttgatgcgtcgtgcagcgaagaccatcaatttcggtgttctctacggtatgagtgcctttcgtttgtcgcaggaattaggcattccctatgaagaagctcaggcgttcattcagaaatactttcaaagctatcccaaagttaaagcatggatcgagaagactctcgaagaaggccgcacacgtggttacgtagagaccttatttggacgtcgccgctatgttcccgatttaaacgctcgcgtgaaaggcaagcgtgaagccgccgaacgcatggcgttcaacatgcctgtacagggcacggcagctgacctcatgaaacttgcaatggtgcgcctttttccacaattgcgtgaagttggtgcccgcatgctcttgcaggtccacgatgaactcttgttagaagcgccaaaagagcgtgcggaagaggtggcagccctcgcgaaagaagttatggaaggcgtgtggcccttagcggtgcctcttgaagtcgaagttggtattggcgaggattggctggctgccaaagga

SEQ ID NO: 4092 - protein, 841 aa, synthetic construct; identical to SEQ ID NO: 3736
  REGION 1..841: note = Variant of DNA polymerase I from Thermus sp. strain 2.9

SEQ ID NO: 4093 - DNA, 2523 bp, synthetic construct
  misc_feature 1..2523: note = Variant of DNA polymerase I from Thermus sp. strain 2.9
  source 1..2523: mol_type = other DNA
atgcaccatcatcatcatcatggcggtagcggcgtgttaccggtgttcgagcataaaggtcgcgtgcttctggttgatggccatcatctcgcgtatcgtaacttctttgccctgaaaggattaaccaccagcagcggcgagccggtacagggtgtctacggctttgcaaagtcgctcctgaaagctctgaaagaagacggtgatgtggtgattgttgtctttgatgcgaaagcgccaagttttcgccacgaagcgtacgaagcttacaaagccgggcgtgctccaacgccggaagactttcctcgccaattggcgcttatgaaggaattagtggatttgcttggcctcgaacgcttggaagttcccggtttcgaggcagacgacgtattagcgactctcgcaaagaaagccgaacgtgagggctatgaagtccagatcttgacagcagatcgcgatcttttccagcttttatctccgcgcatctcggtgttacacccggaagggcatcgtatcaccccggaatggctctgggagaaatatggtttgcgtcccgaacaatgggtggattttcgcgccttagcaggcgatccgagcgacaatattccgggagttaaaggtatcggcgagaagacggcgctcaagctccttaaagaatgggggtcgttggagaacttgcttaagaatttagatcaggtcaaaccagagtcagtgcgtgagaagattcttgctcacctcgaagacctcaaattaagccgcgaattgtcccgtgtacgcaccgatttgccgctcgaagttgatttccaacgccgccgcgaacctgactgggagggtcttaaagcgtttttagagcgtcttgaatttggttcgctcttgcatgaattcggccttttagaaagcccgttaccagccgaagaagcaccttggccaccgcccgagggcgcgtttttaggttaccgtttgagtcgcccggaaccgatgtgggccgaattactggctcttgcagcgtctgcccagggacgtgtgtatcgcgcggaagaccctcatggtgcgctccgcggcctcttcgaagtccgtggactccttgccaaagacttagctgttgttgcattgcgcgaaggtcttgatttacctccgactgatgatccaatgcttcttgcgtacctcttggacccgtcaaacacgacgcccgaaggcgtagcccgtcgttacggcggcgagtggaccgaagatgcagcgaaacgcgcgttattggccgaacgtttgcacgccaatttattaggacgtttgcaaggcgaggaacgtctcctctggctttacgaagaagtggagaaaccattgagtcgcgtgctcgcgcatatggaagctaccggtgtcaaattagacgtggcgtatttggagaatctcagccttgaagttgctgcccacatgcgccgcttggaggaagaagtattccgtttagcaggccgttcctttcgccttaattctcgcgatcagttagaacgtgtgttgttcgatgaacttggtctccctcctatcggcaagacagagaagaccggtaaacgtagcacttcagcggcggttttagaagctcttcgcgaagtccatcccattgtggacaagatcttgcaataccgcgaactggcgaaattgaaaggcacctatattgaccgtcttccggcattagtccacccgaaaacgggacgcctccatacccgcttcaaccaaacagccacggcgaccggtcgtttgtcctcctctgatccaaaccttcagaatattccagtacgtaccccattgggccagaagatccgccgtgcgtttgtagctgaggagggttggcgtttagtggccctcgattatagccaaattgaattacgtgtccttgcccatctttctggcgatgagaacctcatccgcgtgtttcaggaaggcaaagacattcacactcaaacggcaagctggatgtttggattatcagctgaagcgatcgatcctttgatgcgtcgtgcagcgaagacgatcaatttcggtgttctctacggtatgagtgcctttcgtttgtcgcaggaattaggcattccctatgaagaagctcaggcgttcattcagaaatactttcaaagctatcccaaagttaaagcatggatcgagaagactctcgaagaaggccgcacacgtggttacgtagagaccttatttggacgtcgccgctatgttcccgatttaaacgctcgcgtgaaaggcaagcgtgaagccgccgaacgcatggcgttcaacatgcctgtacagggcacggcagctgacctcatgaaacttgcaatggtgcgcctttttccacaattgcgtgaagttggtgcccgcatgctcttgcaggtccacgatgaactcttgttagaagcgccaaaagagcgtgcggaagaggtggcagccctcgcgaaagaagttatggaaggcgtgtggcccttagcggtgcctcttgaagtcgaagttggtattggcgaggattggctggctgccaaagga

SEQ ID NO: 4094 - protein, 841 aa, synthetic construct; identical to SEQ ID NO: 3822
  REGION 1..841: note = Variant of DNA polymerase I from Thermus sp. strain 2.9

SEQ ID NO: 4095 - DNA, 2523 bp, synthetic construct
  misc_feature 1..2523: note = Variant of DNA polymerase I from Thermus sp. strain 2.9
  source 1..2523: mol_type = other DNA
atgcaccatcatcatcatcatggcggtagcggcgtgttaccggtgttcgagcctaaaggtcgcgtgcttctggttgatggccatcatctcgcgtatcgtaacttctttgccctgaaaggattaaccaccagcagcggcgagccggtacagggtgtctacggctttgcaaagtcgctcctgaaagctctgaaagaagacggtgatgtggtgattgttgtctttgatgcgaaagcgccaagttttcgccacgaagcgtacgaagcttacaaagccgggcgtgctccaacgccggaagactttcctcgccaattggcgcttatgaaggaattagtggatttgcttggcctcgaacgcttggaagttcccggtttcgaggcagacgacgtattagcgactctcgcaaagaaagccgaacgtgagggctatgaagtccagatcttgacagcagatcgcgatcttttccagcttttatctccgcgcatctcggtgttacacccggaagggcatcgtatcaccccggaatggctctgggagaaatatggtttgcgtcccgaacaatgggtggattttcgcgccttagcaggcgatccgagcgacaatattccgggagttaaaggtatcggcgagaagacggcgctcaagctccttaaagaatgggggtcgttggagaacttgcttaagaatttagatcaggtcaaaccagagtcagtgcgtgagaagattcttgctcacctcgaagacctcaaattaagccgcgaattgtcccgtgtacgcaccgatttgccgctcgaagttgatttccaacgccgccgcgaacctgactgggagggtcttaaagcgtttttagagcgtcttgaatttggttcgctcttgcatgaattcggccttttagaaagcccgttaccagccgaagaagcaccttggccaccgcccgagggcgcgtttttaggttaccgtttgagtcgcccggaaccgatgtgggccgaattactggctcttgcagcgtctgcccagggacgtgtgtatcgcgcggaagaccctcatggtgcgctccgcggcctcttcgaagtccgtggactccttgccaaagacttagctgttgttgcattgcgcgaaggtcttgatttacctccgactgatgatccaatgcttcttgcgtacctcttggacccgtcaaacacgacgcccgaaggcgtagcccgtcgttacggcggcgagtggaccgaagatgcagcgaaacgcgcgttattggccgaacgtttgcacgccaatttattaggacgtttgcaaggcgaggaacgtctcctctggctttacgaagaagtggagaaaccattgagtcgcgtgctcgcgcatatggaagctaccggtgtcaaattagacgtggcgtatttggagaatctcagccttgaagttgctgcccacatgcgccgcttggaggaagaagtattccgtttagcaggccgttcctttcgccttaattctcgcgatcagttagaacgtgtgttgttcgatgaacttggtctccctcctatcggcaagacagagaagaccggtaaacgtagcacttcagcggcggttttagaagctcttcgcgaagtccatcccattgtggacaagatcttgcaataccgcgaactcgcgaaattgaaaggcacctatattgaccgtcttccggcattagtccacccgaaaacgggacgcctccatacccgcttcaaccaaacagccacggcgaccggtcgtttgtcctcctctgatccaaaccttcagaatattccagtacgtaccccattgggccagaagatccgccgtgcgtttgtagctgaggagggttggcgtttagtggccctcgattatagccaaattgaattacgtgtccttgcccatctttctggcgatgagaacctcatccgcgtgtttcaggaaggcaaagacattcacactcaaacggcaagctggatgtttggattatcagctgaagcgatcgatcctttgatgcgtcgtgcagcgaagaccatcaatttcggtgttctctacggtatgagtgcctttcgtttgtcgggtgaattaggcattccctatgaagaagctcaggcgttcattcagaaatactttcaaagctatcccaaagttaaagcatggatcgagaagactctcgaagaaggccgcacacgtggttacgtagagaccttatttggacgtcgccgctatgttcccgatttaaacgctcgcgtgaaaggcaagcgtgaagccgccgaacgcatggcgttcaacatgcctgtacagggcacggcagctgacctcatgaaacttgcaatggtgcgcctttttccacaattgcgtgaagttggtgcccgcatgctcttgcaggtccacgatgaactcttgttagaagcgccaaaagagcgtgcggaagaggtggcagccctcgcgaaagaagttatggaaggcgtgtggcccttagcggtgcctcttgaagtcgaagttggtattggcgaggattggctggctgccaaagga

SEQ ID NO: 4096 - protein, 841 aa, synthetic construct
  REGION 1..841: note = Variant of DNA polymerase I from Thermus sp. strain 2.9
MHHHHHHGGSGVLPVFEPKGRVLLVDGHHLAYRNFFALKGLTTSSGEPVQGVYGFAKSLLKALKEDGDVVIVVFDAKAPSFRHEAYEAYKAGRAPTPEDFPRQLALMKELVDLLGLERLEVPGFEADDVLATLAKKAEREGYEVQILTADRDLFQLLSPRISVLHPEGHRITPEWLWEKYGLRPEQWVDFRALAGDPSDNIPGVKGIGEKTALKLLKEWGSLENLLKNLDQVKPESVREKILAHLEDLKLSRELSRVRTDLPLEVDFQRRREPDWEGLKAFLERLEFGSLLHEFGLLESPLPAEEAPWPPPEGAFLGYRLSRPEPMWAELLALAASAQGRVYRAEDPHGALRGLFEVRGLLAKDLAVVALREGLDLPPTDDPMLLAYLLDPSNTTPEGVARRYGGEWTEDAAKRALLAERLHANLLGRLQGEERLLWLYEEVEKPLSRVLAHMEATGVKLDVAYLENLSLEVAAHMRRLEEEVFRLAGRSFRLNSRDQLERVLFDELGLPPIGKTEKTGKRSTSAAVLEALREVHPIVDKILQYRELAKLKGTYIDRLPALVHPKTGRLHTRFNQTATATGRLSSSDPNLQNIPVRTPLGQKIRRAFVAEEGWRLVALDYSQIELRVLAHLSGDENLIRVFQEGKDIHTQTASWMFGLSAEAIDPLMRRAAKTINFGVLYGMSAFRLSGELGIPYEEAQAFIQKYFQSYPKVKAWIEKTLEEGRTRGYVETLFGRRRYVPDLNARVKGKREAAERMAFNMPVQGTAADLMKLAMVRLFPQLREVGARMLLQVHDELLLEAPKERAEEVAALAKEVMEGVWPLAVPLEVEVGIGEDWLAAKG

SEQ ID NO: 4097 - DNA, 2523 bp, synthetic construct
  misc_feature 1..2523: note = Variant of DNA polymerase I from Thermus sp. strain 2.9
  source 1..2523: mol_type = other DNA
atgcaccatcatcatcatcatggcggtagcggcgtgttaccggtgttcgagcctaaaggtcgcgtgcttctggttgatggccatcatctcgcgtatcgtaacttctttgccctgaaaggattaaccaccagcagcggcgagccggtacatggtgtctacggctttgcaaagtcgctcctgaaagctctgaaagaagacggtgatgtggtgattgttgtctttgatgcgaaagcgccaagttttcgccacgaagcgtacgaagcttacaaagccgggcgtgctccaacgccggaagactttcctcgccaattggcgcttatgaaggaattagtggatttgcttggcctcgaacgcttggaagttcccggtttcgaggcagacgacgtattagcgactctcgcaaagaaagccgaacgtgagggctatgaagtccagatcttgacagcagatcgcgatcttttccagcttttatctccgcgcatctcggtgttacacccggaagggcatcgtatcaccccggaatggctctgggagaaatatggtttgcgtcccgaacaatgggtggattttcgcgccttagcaggcgatccgagcgacaatattccgggagttaaaggtatcggcgagaagacggcgctcaagctccttaaagaatgggggtcgttggagaacttgcttaagaatttagatcaggtcaaaccagagtcagtgcgtgagaagattcttgctcacctcgaagacctcaaattaagccgcgaattgtcccgtgtacgcaccgatttgccgctcgaagttgatttccaacgccgccgcgaacctgactgggagggtcttaaagcgtttttagagcgtcttgaatttggttcgctcttgcatgaattcggccttttagaaagcccgttaccagccgaagaagcaccttggccaccgcccgagggcgcgtttttaggttaccgtttgagtcgcccggaaccgatgtgggccgaattactggctcttgcagcgtctgcccagggacgtgtgtatcgcgcggaagaccctcatggtgcgctccgcggcctcttcgaagtccgtggactccttgccaaagacttagctgttgttgcattgcgcgaaggtcttgatttacctccgactgatgatccaatgcttcttgcgtacctcttggacccgtcaaacacgacgcccgaaggcgtagcccgtcgttacggcggcgagtggaccgaagatgcagcgaaacgcgcgttattggccgaacgtttgcacgccaatttattaggacgtttgcaaggcgaggaacgtctcctctggctttacgaagaagtggagaaaccattgagtcgcgtgctcgcgcatatggaagctaccggtgtcaaattagacgtggcgtatttggagaatctcagccttgaagttgctgcccacatgcgccgcttggaggaagaagtattccgtttagcaggccgttcctttcgccttaattctcgcgatcagttagaaaaggtgttgttcgatgaacttggtctccctcctatcggcaagacagagaagaccggtaaacgtagcacttcagcggcggttttagaagctcttcgcgaagtccatcccattgtggacaagatcttgcaataccgcgaactcgcgaaattgaaaggcacctatattgaccgtcttccggcattagtccacccgaaaacgggacgcctccatacccgcttcaaccaaacagccacggcgaccggtcgtttgtcctcctctgatccaaaccttcagaatattccagtacgtaccccgttgggccagaagatccgccgtgcgtttgtagctgaggagggttggcgtttagtggccctcgattatagccaaattgaattacgtgtccttgcccatctttctggcgatgagaacctcatccgcgtgtttcaggaaggcaaagacattcacactcaaacggcaagctggatgtttggattatcagctgaagcgatcgatcctttgatgcgtcgtgcagcgaagaccatcaatttcggtgttctctacggtatgagtgcctttcgtttgtcgcaggaattaggcattccctatgaagaagctcaggcgttcattcagaaatactttcaaagctatcccaaagttaaagcatggatcgagaagactctcgaagaaggccgcacacgtggttacgtagagaccttatttggacgtcgccgctatgttcccgatttaaacgctcgcgtgaaaggcaagcgtgaagccgccgaacgcatggcgttcaacatgcctgtacagggcacggcagctgacctcatgaaacttgcaatggtgcgcctttttccacaattgcgtgaagttggtgcccgcatgctcttgcaggtccacgatgaactcttgttagaagcgccaaaagagcgtgcggaagaggtggcagccctcgcgaaagaagttatggaaggcgtgtggcccttagcggtgcctcttgaagtcgaagttggtattggcgaggattggctggctgccaaagga

SEQ ID NO: 4098 - protein, 841 aa, synthetic construct
  REGION 1..841: note = Variant of DNA polymerase I from Thermus sp. strain 2.9
MHHHHHHGGSGVLPVFEPKGRVLLVDGHHLAYRNFFALKGLTTSSGEPVHGVYGFAKSLLKALKEDGDVVIVVFDAKAPSFRHEAYEAYKAGRAPTPEDFPRQLALMKELVDLLGLERLEVPGFEADDVLATLAKKAEREGYEVQILTADRDLFQLLSPRISVLHPEGHRITPEWLWEKYGLRPEQWVDFRALAGDPSDNIPGVKGIGEKTALKLLKEWGSLENLLKNLDQVKPESVREKILAHLEDLKLSRELSRVRTDLPLEVDFQRRREPDWEGLKAFLERLEFGSLLHEFGLLESPLPAEEAPWPPPEGAFLGYRLSRPEPMWAELLALAASAQGRVYRAEDPHGALRGLFEVRGLLAKDLAVVALREGLDLPPTDDPMLLAYLLDPSNTTPEGVARRYGGEWTEDAAKRALLAERLHANLLGRLQGEERLLWLYEEVEKPLSRVLAHMEATGVKLDVAYLENLSLEVAAHMRRLEEEVFRLAGRSFRLNSRDQLEKVLFDELGLPPIGKTEKTGKRSTSAAVLEALREVHPIVDKILQYRELAKLKGTYIDRLPALVHPKTGRLHTRFNQTATATGRLSSSDPNLQNIPVRTPLGQKIRRAFVAEEGWRLVALDYSQIELRVLAHLSGDENLIRVFQEGKDIHTQTASWMFGLSAEAIDPLMRRAAKTINFGVLYGMSAFRLSQELGIPYEEAQAFIQKYFQSYPKVKAWIEKTLEEGRTRGYVETLFGRRRYVPDLNARVKGKREAAERMAFNMPVQGTAADLMKLAMVRLFPQLREVGARMLLQVHDELLLEAPKERAEEVAALAKEVMEGVWPLAVPLEVEVGIGEDWLAAKG

SEQ ID NO: 4099 - DNA, 2523 bp, synthetic construct
  misc_feature 1..2523: note = Variant of DNA polymerase I from Thermus sp. strain 2.9
  source 1..2523: mol_type = other DNA
atgcaccatcatcatcatcatggcggtagcggcgtgttaccggtgttcgagcataaaggtcgcgtgcttctggttgatggccatcatctcgcgtatcgtaacttctttgccctgaaaggattaaccaccagcagcggcgagccggtacagggtgtctacggctttgcaaagtcgctcctgaaagctctgaaagaagacggtgatgtggtgattgttgtctttgatgcgaaagcgccaagttttcgccacgaagcgtacgaagcttacaaagccgggcgtgctccaacgccggaagactttcctcgccaattggcgcttatgaaggaattagtggatttgcttggcctcgaacgcttggaagttcccggtttcgaggcagacgacgtattagcgactctcgcaaagaaagccgaacgtgagggctatgaagtccagatcttgacagcagatcgcgatcttttccagcttttatctccgcgcatctcggtgttacacccggaagggcatcgtatcaccccggaatggctctgggagaaatatggtttgcgtcccgaacaatgggtggattttcgcgccttagcaggcgatccgagcgacaatattccgggagttaaaggtatcggcgagaagacggcgctcaagctccttaaagaatgggggtcgttggagaacttgcttaagaatttagatcaggtcaaaccagagtcagtgcgtgagaagattcttgctcacctcgaagacctcaaattaagccgcgaattgtcccgtgtacgcaccgatttgccgctcgaagttgatttccaacgccgccgcgaacctgactgggagggtcttaaagcgtttttagagcgtcttgaatttggttcgctcctgcatgaattcggccttttagaaagcccgttaccagccgaagaagcaccttggccaccgcccgagggcgcgtttttaggttaccgtttgagtcgcccggaaccgatgtgggccgaattactggctcttgcagcgtctgcccagggacgtgtgtatcgcgcggaagaccctcatggtgcgctccgcggcctcttcgaagtccgtggactccttgccaaagacttagctgttgttgcattgcgcgaaggtcttgatttacctccgactgatgatccaatgcttcttgcgtacctcttggacccgtcaaacacgacgcccgaaggcgtagcccgtcgttacggcggcgagtggaccgaagatgcagcgaaacgcgcgttattggccgaacgtttgcacgccaatttattaggacgtttgcaaggcgaggaacgtctcctctggctttacgaagaagtggagaaaccattgagtcgcgtgctcgcgcatatggaagctaccggtgtcaaattagacgtggcgtatttggagaatctcagccttgaagttgctgcccacatgcgccgcttggaggaagaagtattccgtttagcaggccgttcctttcgccttaattctcgcgatcagttagaacgtgtgttgttcgatgaacttggtctccctcctatcggcaagacagagaagaccggtaaacgtagcacttcagcggcggttttagaagctctgcgcgaagtccatcccattgtggacaagatcttgcaataccgcgaaatggcgaaattgaaaggcacctatattgaccgtcttccggcattagtccacccgaaaacgggacgcctccatacccgcttcaaccaaacagccacggcgaccggtcgtttgtcctcctctgatccaaaccttcagaatattccagtacgtaccccattgggccagaagatccgccgtgcgtttgtagctgaggagggttggcgtttagtggccctcgattatagccaaattgaattacgtgtccttgcccatctttctggcgatgagaacctcatccgcgtgtttcaggaaggcaaagacattcacactcaaacggcaagctggatgtttggattatcagctgaagcgatcgatcctttgatgcgtcgtgcagcgaagaccatcaatttcggtgttctctacggtatgagtgcgtttcgtttgtcgcaggaattaggcattccctatgaagaagctcaggcgttcattcagaaatactttcaaagctatcccaaagttaaagcatggatcgagaagactctcgaagaaggccgcacacgtggttacgtagagaccttatttggacgtcgccgctatgttcccgatttaaacgctcgcgtgaaaggcaagcgtgaagccgccgaacgcatggcgttcaacatgcctgtacagggcacggcagctgacctcatgaaacttgcaatggtgcgcctttttccacaattgcgtgaagttggtgcccgcatgctcttgcaggtccacgatgaactcttgttagaagcgccaaaagagcgtgcggaagaggtggcagccctcgcgaaagaagttatggaaggcgtgtggcccttagcggtgcctcttgaagtcgaagttggtattggcgaggattggctggctgccaaagga

SEQ ID NO: 4100 - protein, 841 aa, synthetic construct; identical to SEQ ID NO: 4040
  REGION 1..841: note = Variant of DNA polymerase I from Thermus sp. strain 2.9

SEQ ID NO: 4101 - DNA, 2523 bp, synthetic construct
  misc_feature 1..2523: note = Variant of DNA polymerase I from Thermus sp. strain 2.9
  source 1..2523: mol_type = other DNA
atgcaccatcatcatcatcatggcggtagcggcgtgttaccggtgttcgagcctaaaggtcgcgtgcttctggttgatggccatcatctcgcgtatcgtaacttctttgccctgaaaggattaaccaccagcagcggcgagccggtacagggtgtctacggctttgcaaagtcgctcctgaaagctctgaaagaagacggtgatgtggtgattgttgtctttgatgcgaaagcgccaagttttcgccacgaagcgtacgaagcttacaaagccgggcgtgctccaacgccggaagactttcctcgccaattggcgcttatgaaggaattagtggatttgcttggcctcgaacgcttggaagttcccggtttcgaggcagacgacgtattagcgactctcgcaaagaaagccgaacgtgagggctatgaagtccagatcttgacagcagatcgcgatcttttccagcttttatctccgcgcatctcggtgttacacccggaagggcatcgtatcaccccggaatggctctgggagaaatatggtttgcgtcccgaacaatgggtggattttcgcgccttagcaggcgatccgagcgacaatattccgggagttaaaggtatcggcgagaagacggcgctcaagctccttaaagaatgggggtcgttggagaacttgcttaagaatttagatcaggtcaaaccagagtcagtgcgtgagaagattcttgctcacctcgaagacctcaaattaagccgcgaattgtcccgtgtacgcaccgatttgccgctcgaagttgatttccaacgccgccgcgaacctgactgggagggtcttaaagcgtttttagagcgtcttgaatttggttcgctcttgcatgaattcggccttttagaaagcccgttaccagccgaagaagcaccttggccaccgcccgaggtggcgtttttaggttaccgtttgagtcgcccggaaccgatgtgggccgaattactggctcttgcagcgtctgcccagggacgtgtgtatcgcgcggaagaccctcatggtgcgctccgcggcctcttcgaagtccgtggactccttgccaaagacttagctgttgttgcattgcgcgaaggtcttgatttacctccgactgatgatccaatgcttcttgcgtacctcttggacccgtcaaacacgacgcccgaaggcgtagcccgtcgttacggcggcgagtggaccgaagatgcagcgaaacgcgcgttattggccgaacgtttgcacgccaatttattaggacgtttgcaaggcgaggaacgtctcctctggctttacgaagaagtggagaaaccattgagtcgcgtgctcgcgcatatggaagctaccggtgtcaaattagacgtggcgtatttggagaatctcagccttgaagttgctgcccacatgcgccgcttggaggaagaagtattccgtttagcaggccgttcctttcgccttaattctcgcgatcagttagaacgtgtgttgttcgatgaacttggtctccctcctatcggcaagacagagaagaccggtaaacgtagcacttcagcggcggttttagaagctcttcgcgaagtccatcccattgtggacaagatcttgcaataccgcgaactcgcgaaattgaaaggcacctatattgaccgtcttccggcattagtccacccgaaaacgggacgcctccatacccgcttcaaccaaacagccacggcgaccggtcgtttgtcctcctctgatccaaaccttcagaatattccagtacgtaccccattgggccagaagatccgccgtgcgtttgtagctgaggagggttggcgtttagtggccctcgattatagccaaattgaattacgtgtccttgcccatctttctggcgatgagaacctcatccgcgtgtttcaggaaggcaaagacattcacactcaaacggcaagctggatgtttggattatcagctgaagcgatcgatcctttgatgcgtcgtgcagcgaagaccatcaatttcggtgttctctacggtatgagtgcctttcgtttgtcgcaggaattaggcattccctatgaagaagctcaggcgttcattcagaaatactttcaaagctatcccaaagttaaagcatggatcgagaagactctcgaagaaggccgcacacgtggttacgtagagaccttatttggacgtcgccgctatgttcccgatttaaacgctcgcgtgaaaggcaagcgtgaagccgccgaacgcatggcgttcaacatgcctgtacagggcacggcagctgacctcatgaaacttgcaatggtgcgcctttttccacaattgcgtgaagttggtgcccgcatgctcttgcaggtccacgatgaactcttgttagaagcgccaaaagagcgtgcggaagaggtggcagccctcgcgaaagaagttatggaaggcgtgtggcccttagcggtgcctcttgaagtcgaagttggtattggcgaggattggctggctgccaaagga

SEQ ID NO: 4102 - protein, 841 aa, synthetic construct
  REGION 1..841: note = Variant of DNA polymerase I from Thermus sp. strain 2.9
MHHHHHHGGSGVLPVFEPKGRVLLVDGHHLAYRNFFALKGLTTSSGEPVQGVYGFAKSLLKALKEDGDVVIVVFDAKAPSFRHEAYEAYKAGRAPTPEDFPRQLALMKELVDLLGLERLEVPGFEADDVLATLAKKAEREGYEVQILTADRDLFQLLSPRISVLHPEGHRITPEWLWEKYGLRPEQWVDFRALAGDPSDNIPGVKGIGEKTALKLLKEWGSLENLLKNLDQVKPESVREKILAHLEDLKLSRELSRVRTDLPLEVDFQRRREPDWEGLKAFLERLEFGSLLHEFGLLESPLPAEEAPWPPPEVAFLGYRLSRPEPMWAELLALAASAQGRVYRAEDPHGALRGLFEVRGLLAKDLAVVALREGLDLPPTDDPMLLAYLLDPSNTTPEGVARRYGGEWTEDAAKRALLAERLHANLLGRLQGEERLLWLYEEVEKPLSRVLAHMEATGVKLDVAYLENLSLEVAAHMRRLEEEVFRLAGRSFRLNSRDQLERVLFDELGLPPIGKTEKTGKRSTSAAVLEALREVHPIVDKILQYRELAKLKGTYIDRLPALVHPKTGRLHTRFNQTATATGRLSSSDPNLQNIPVRTPLGQKIRRAFVAEEGWRLVALDYSQIELRVLAHLSGDENLIRVFQEGKDIHTQTASWMFGLSAEAIDPLMRRAAKTINFGVLYGMSAFRLSQELGIPYEEAQAFIQKYFQSYPKVKAWIEKTLEEGRTRGYVETLFGRRRYVPDLNARVKGKREAAERMAFNMPVQGTAADLMKLAMVRLFPQLREVGARMLLQVHDELLLEAPKERAEEVAALAKEVMEGVWPLAVPLEVEVGIGEDWLAAKG

SEQ ID NO: 4103 - DNA, 2523 bp, synthetic construct
  misc_feature 1..2523: note = Variant of DNA polymerase I from Thermus sp. strain 2.9
  source 1..2523: mol_type = other DNA
atgcaccatcatcatcatcatggcggtagcggcgtgttaccggtgttcgagcataaaggtcgcgtgcttctggttgatggccatcatctcgcgtatcgtaacttctttgccctgaaaggattaaccaccagcagcggcgagccggtacagggtgtctacggctttgcaaagtcgctcctgaaagctctgaaagaagacggtgatgtggtgattgttgtctttgatgcgaaagcgccaagttttcgccacgaagcgtacgaagcttacaaagccgggcgtgctccaacgccggaagactttcctcgccaattggcgcttatgaaggaattagtggatttgcttggcctcgaacgcttggaagttcccggtttcgaggcagacgacgtattagcgactctcgcaaagaaagccgaacgtgagggctatgaagtccagatcttgacagcagatcgcgatcttttccagcttttatctccgcgcatctcggtgttacacccggaagggcatcgtatcaccccggaatggctctgggagaaatatggtttgcgtcccgaacaatgggtggattttcgcgccttagcaggcgatccgagcgacaatattccgggagttaaaggtatcggcgagaagacggcgctcaagctccttaaagaatgggggtcgttggagaacttgcttaagaatttagatcaggtcaaaccagagtcagtgcgtgagaagattcttgctcacctcgaagacctcaaattaagccgcgaattgtcccgtgtacgcaccgatttgccgctcgaagttgatttccaacgccgccgcgaacctgactgggagggtcttaaagcgtttttagagcgtcttgaatttggttcgctcttgcatgaattcggccttttagaaagcccgttagtggccgaagaagcaccttggccaccgcccgagggcgcgtttttaggttaccgtttgagtcgcccggaaccgatgtgggccgaattactggctcttgcagcgtctgcccagggacgtgtgtatcgcgcggaagaccctcatggtgcgctccgcggcctcttcgaagtccgtggactccttgccaaagacttagctgttgttgcattgcgcgaaggtcttgatttacctccgactgatgatccaatgcttcttgcgtacctcttggacccgtcaaacacgacgcccgaaggcgtagcccgtcgttacggcggcgagtggaccgaagatgcagcgaaacgcgcgttattggccgaacgtttgcacgccaatttattaggacgtttgcaaggcgaggaacgtctcctctggctttacgaagaagtggagaaaccattgagtcgcgtgctcgcgcatatggaagctaccggtgtcaaattagacgtggcgtatttggagaatctcagccttgaagttgctgcccacatgcgccgcttggaggaagaagtattccgtttagcaggccgttcctttcgccttaattctcgcgatcagttagaacgtgtgctgttcgatgaacttggtctccctcctatcggcaagacagagaagaccggtaaacgtagcacttcagcggcggttttagaagctgtgcgcgaagtccatcccattgtggacaagatcttgcaataccgcgaactggcgaaattgaaaggcacctatattgaccgtcttccggcattagtccacccgaaaacgggacgcctccatacccgcttcaaccaaacagccacggcgaccggtcgtttgtcctcctctgatccaaaccttcagaatattccagtacgtaccccattgggccagaagatccgccgtgcgtttgtagctgaggagggttggcgtttagtggccctcgattatagccaaattgaattacgtgtccttgcccatctttctggcgatgagaacctcatccgcgtgtttcaggaaggcaaagacattcacactcaaacggcaagctggatgtttggattatcagctgaagcgatcgatcctttgatgcgtcgtgcagcgaagaagatcaatttcggtgttctctacggtatgagtccgtttcgtttgtcgcaggaattaggcattccctatgaagaagctcaggcgttcattcagaaatactttcaaagctatcccaaagttaaagcatggatcgagaagactctcgaagaaggccgcacacgtggttacgtagagaccttatttggacgtcgccgctatgttcccgatttaaacgctcgcgtgaaaggcaagcgtgaagccgccgaacgcatggcgttcaacatgcctgtacagggcacggcagctgacctcatgaaacttgcaatggtgcgcctttttccacaattgcgtgaagttggtgcccgcatgctcttgcaggtccacgatgaactcttgttagaagcgccaaaagagcgtgcggaagaggtggcagccctcgcgaaagaagttatggaaggcgtgtggcccttagcggtgcctcttgaagtcgaagttggtattggcgaggattggctggctgccaaagga

SEQ ID NO: 4104 - protein, 841 aa, synthetic construct
  REGION 1..841: note = Variant of DNA polymerase I from Thermus sp. strain 2.9
MHHHHHHGGSGVLPVFEHKGRVLLVDGHHLAYRNFFALKGLTTSSGEPVQGVYGFAKSLLKALKEDGDVVIVVFDAKAPSFRHEAYEAYKAGRAPTPEDFPRQLALMKELVDLLGLERLEVPGFEADDVLATLAKKAEREGYEVQILTADRDLFQLLSPRISVLHPEGHRITPEWLWEKYGLRPEQWVDFRALAGDPSDNIPGVKGIGEKTALKLLKEWGSLENLLKNLDQVKPESVREKILAHLEDLKLSRELSRVRTDLPLEVDFQRRREPDWEGLKAFLERLEFGSLLHEFGLLESPLVAEEAPWPPPEGAFLGYRLSRPEPMWAELLALAASAQGRVYRAEDPHGALRGLFEVRGLLAKDLAVVALREGLDLPPTDDPMLLAYLLDPSNTTPEGVARRYGGEWTEDAAKRALLAERLHANLLGRLQGEERLLWLYEEVEKPLSRVLAHMEATGVKLDVAYLENLSLEVAAHMRRLEEEVFRLAGRSFRLNSRDQLERVLFDELGLPPIGKTEKTGKRSTSAAVLEAVREVHPIVDKILQYRELAKLKGTYIDRLPALVHPKTGRLHTRFNQTATATGRLSSSDPNLQNIPVRTPLGQKIRRAFVAEEGWRLVALDYSQIELRVLAHLSGDENLIRVFQEGKDIHTQTASWMFGLSAEAIDPLMRRAAKKINFGVLYGMSPFRLSQELGIPYEEAQAFIQKYFQSYPKVKAWIEKTLEEGRTRGYVETLFGRRRYVPDLNARVKGKREAAERMAFNMPVQGTAADLMKLAMVRLFPQLREVGARMLLQVHDELLLEAPKERAEEVAALAKEVMEGVWPLAVPLEVEVGIGEDWLAAKG

SEQ ID NO: 4105 - DNA, 2523 bp, synthetic construct
  misc_feature 1..2523: note = Variant of DNA polymerase I from Thermus sp. strain 2.9
  source 1..2523: mol_type = other DNA
atgcaccatcatcatcatcatggcggtagcggcgtgttaccggtgttcgagcctaaaggtcgcgtgcttctggttgatggccatcatctcgcgtatcgtaacttctttgccctgaaaggattaaccaccagcagcggcgagccggtacagggtgtctacggctttgcaaagtcgctcctgaaagctctgaaagaagacggtgatgtggtgattgttgtctttgatgcgaaagcgccaagttttcgccacgaagcgtacgaagcttacaaagccgggcgtgctccaacgccggaagactttcctcgccaattggcgcttatgaaggaattagtggatttgcttggcctcgaacgcttggaagttcccggtttcgaggcagacgacgtattagcgactctcgcaaagaaagccgaacgtgagggctatgaagtccagatcttgacagcagatcgcgatcttttccagcttttatctccgcgcatctcggtgttacacccggaagggcatcgtatcaccccggaatggctctgggagaaatatggtttgcgtcccgaacaatgggtggattttcgcgccttagcaggcgatccgagcgacaatattccgggagttaaaggtatcggcgagaagacggcgctcaagctccttaaagaatgggggtcgttggagaacttgcttaagaatttagatcaggtcaaaccagagtcagtgcgtgagaagattcttgctcacctcgaagacctcaaattaagccgcgaattgtcccgtgtacgcaccgatttgccgctcgaagttgatttccaacgccgccgcgaacctgactgggagggtcttaaagcgtttttagagcgtcttgaatttggttcgctcttgcatgaattcggccttttagaaatgccgttaccagccgaagaagcaccttggccaccgcccgagggcgcgtttttaggttaccgtttgagtcgcccggaaccgatgtgggccgaattactggctcttgcagcgtctgcccagggacgtgtgtatcgcgcggaagaccctcatggtgcgctccgcggcctcttcgaagtccgtggactccttgccaaagacttagctgttgttgcattgcgcgaaggtcttgatttacctccgactgatgatccaatgcttcttgcgtacctcttggacccgtcaaacacgacgcccgaaggcgtagcccgtcgttacggcggcgagtggaccgaagatgcagcgaaacgcgcgttattggccgaacgtttgcacgccaatttattaggacgtttgcaaggcgaggaacgtctcctctggctttacgaagaagtggagaaaccattgagtcgcgtgctcgcgcatatggaagctaccggtgtcaaattagacgtggcgtatttggagaatctcagccttgaagttgctgcccacatgcgccgcttggaggaagaagtattccgtttagcaggccgttcctttcgccttaattctcgcgatcagttagaacgtgtgttgttcgatgaacttggtctccctcctatcggcaagacagagaagaccggtaaacgtagcacttcagcggcggttttagaagctcttcgcgaagtccatcccattgtggacaagatcttgcaataccgcgaactcgcgaaattgaaaggcacctatattgaccgtcttccggcattagtccacccgaaaacgggacgcctccatacccgcttcaaccaaacagccacggcgaccggtcgtttgtcctcctctgatccaaaccttcagaatattccagtacgtaccccattgggccagaagatccgccgtgcgtttgtagctgaggagggttggcgtttagtggccctcgattatagccaaattgaattacgtgtccttgcccatctttctggcgatgagaacctcatccgcgtgtttcaggaaggcaaagacattcacactcaaacggcaagctggatgtttggattatcagctgaagcgatcgatcctttgatgcgtcgtgcagcgaagaccatcaatttcggtgttctctacggtatgagtgcctttcgtttgtcgcaggaattaggcattccctatgaagaagctcaggcgttcattcagaaatactttcaaagctatcccaaagttaaagcatggatcgagaagactctcgaagaaggccgcacacgtggttacgtagagaccttatttggacgtcgccgctatgttcccgatttaaacgctcgcgtgaaaggcaagcgtgaagccgccgaacgcatggcgttcaacatgcctgtacagggcacggcagctgacctcatgaaacttgcaatggtgcgcctttttccacaattgcgtgaagttggtgcccgcatgctcttgcaggtccacgatgaactcttgttagaagcgccaaaagagcgtgcggaagaggtggcagccctcgcgaaagaagttatggaaggcgtgtggcccttagcggtgcctcttgaagtcgaagttggtattggcgaggattggctggctgccaaagga

SEQ ID NO: 4106 - protein, 841 aa, synthetic construct
  REGION 1..841: note = Variant of DNA polymerase I from Thermus sp. strain 2.9
MHHHHHHGGSGVLPVFEPKGRVLLVDGHHLAYRNFFALKGLTTSSGEPVQGVYGFAKSLLKALKEDGDVVIVVFDAKAPSFRHEAYEAYKAGRAPTPEDFPRQLALMKELVDLLGLERLEVPGFEADDVLATLAKKAEREGYEVQILTADRDLFQLLSPRISVLHPEGHRITPEWLWEKYGLRPEQWVDFRALAGDPSDNIPGVKGIGEKTALKLLKEWGSLENLLKNLDQVKPESVREKILAHLEDLKLSRELSRVRTDLPLEVDFQRRREPDWEGLKAFLERLEFGSLLHEFGLLEMPLPAEEAPWPPPEGAFLGYRLSRPEPMWAELLALAASAQGRVYRAEDPHGALRGLFEVRGLLAKDLAVVALREGLDLPPTDDPMLLAYLLDPSNTTPEGVARRYGGEWTEDAAKRALLAERLHANLLGRLQGEERLLWLYEEVEKPLSRVLAHMEATGVKLDVAYLENLSLEVAAHMRRLEEEVFRLAGRSFRLNSRDQLERVLFDELGLPPIGKTEKTGKRSTSAAVLEALREVHPIVDKILQYRELAKLKGTYIDRLPALVHPKTGRLHTRFNQTATATGRLSSSDPNLQNIPVRTPLGQKIRRAFVAEEGWRLVALDYSQIELRVLAHLSGDENLIRVFQEGKDIHTQTASWMFGLSAEAIDPLMRRAAKTINFGVLYGMSAFRLSQELGIPYEEAQAFIQKYFQSYPKVKAWIEKTLEEGRTRGYVETLFGRRRYVPDLNARVKGKREAAERMAFNMPVQGTAADLMKLAMVRLFPQLREVGARMLLQVHDELLLEAPKERAEEVAALAKEVMEGVWPLAVPLEVEVGIGEDWLAAKG

SEQ ID NO: 4107 - DNA, 2523 bp, synthetic construct; identical to SEQ ID NO: 3851
  misc_feature 1..2523: note = Variant of DNA polymerase I from Thermus sp. strain 2.9
  source 1..2523: mol_type = other DNA

SEQ ID NO: 4108 - protein, 841 aa, synthetic construct; identical to SEQ ID NO: 3476
  REGION 1..841: note = Variant of DNA polymerase I from Thermus sp. strain 2.9

SEQ ID NO: 4109 - DNA, 2523 bp, synthetic construct
  misc_feature 1..2523: note = Variant of DNA polymerase I from Thermus sp. strain 2.9
  source 1..2523: mol_type = other DNA
atgcaccatcatcatcatcatggcggtagcggcgtgttaccggtgttcgagcctaaaggtcgcgtgcttctggttgatggccatcatctcgcgtatcgtaacttctttgccctgaaaggattaaccaccagcagcggcgagccggtacagggtgtctacggctttgcaaagtcgctcctgaaagctctgaaagaagacggtgatgtggtgattgttgtctttgatgcgaaagcgccaagttttcgccacgaagcgtacgaagcttacaaagccgggcgtgctccaacgccggaagactttcctcgccaattggcgcttatgaaggaattagtggatttgcttggcctcgaacgcttggaagttcccggtttcgaggcagacgacgtattagcgactctcgcaaagaaagccgaacgtgagggctatgaagtccagatcttgacagcagatcgcgatcttttccagcttttatctccgcgcatctcggtgttacacccggaagggcatcgtatcaccccggaatggctctgggagaaatatggtttgcgtcccgaacaatgggtggattttcgcgccttagcaggcgatccgagcgacaatattccgggagttaaaggtatcggcgagaagacggcgctcaagctccttaaagaatgggggtcgttggagaacttgcttaagaatttagatcaggtcaaaccagagtcagtgcgtgagaagattcttgctcacctcgaagacctcaaattaagccgcgaattgtcccgtgtacgcaccgatttgccgctcgaagttgatttccaacgccgccgcgaacctgactgggagggtcttaaagcgtttttagagcgtcttgaatttggttcgctcttgcatgaattcggccttttagaaagcccgttaccagccgaagaagcaccttggccaccgcccgagggcgcgtttttaggttaccgtttgagtcgcccggaaccgatgtgggccgaattactggctcttgcagcgtctgcccagggacgtgtgtatcgcgcggaagaccctcatggtgcgctccgcggcctcttcgaagtccgtggactccttgccaaagacttagctgttgttgcattgcgcgaaggtcttgatttacctccgactgatgatccaatgcttcttgcgtacctcttggacccgtcaaacacgacgcccgaaggcgtagcccgtcgttacggcggcgagtggaccgaagatgcagcgaaacgcgcgttattggccgaacgtttgcacgccaatttattaggacgtttgcaaggcgaggaacgtctcctctggctttacgaagaagtggagaaaccattgagtcgcgtgctcgcgcatatggaagctaccggtgtcaaattagacgtggcgtatttggagaatctcagccttgaagttgctgcccacatgcgccgcttggaggaagaagtattccgtttagcaggccgttcctttcgccttaattctcgcgatcagttagaacgtgtgttgttcgatgaacttggtctccctcctatcggcaagacagagtctaccggtaaacgtagcacttcagcggcggttttagaagctcttcgcgaagtccatcccattgtggacaagatcttgcaataccgcgaactcgcgaaattgaaaggcacctatattgaccgtcttccggcattagtccacccgaaaacgggacgcctccatacccgcttcaaccaaacagccacggcgaccggtcgtttgtcctcctctgatccaaaccttcagaatattccagtacgtaccccattgggccagaagatccgccgtgcgtttgtagctgaggagggttggcgtttagtggccctcgattatagccaaattgaattacgtgtccttgcccatctttctggcgatgagaacctcatccgcgtgtttcaggaaggcaaagacattcacactcaaacggcaagctggatgtttggattatcagctgaagcgatcgatcctttgatgcgtcgtgcagcgaagaccatcaatttcggtgttctctacggtatgagtgcctttcgtttgtcgcaggaattaggcattccctatgaagaagctcaggcgttcattcagaaatactttcaaagctatcccaaagttaaagcatggatcgagaagactctcgaagaaggccgcacacgtggttacgtagagaccttatttggacgtcgccgctatgttcccgatttaaacgctcgcgtgaaaggcaagcgtgaagccgccgaacgcatggcgttcaacatgcctgtacagggcacggcagctgacctcatgaaacttgcaatggtgcgcctttttccacaattgcgtgaagttggtgcccgcatgctcttgcaggtccacgatgaactcttgttagaagcgccaaaagagcgtgcggaagaggtggcagccctcgcgaaagaagttatggaaggcgtgtggcccttagcggtgcctcttgaagtcgaagttggtattggcgaggattggctggctgccaaagga

SEQ ID NO: 4110 - protein, 841 aa, synthetic construct
  REGION 1..841: note = Variant of DNA polymerase I from Thermus sp. strain 2.9
MHHHHHHGGSGVLPVFEPKGRVLLVDGHHLAYRNFFALKGLTTSSGEPVQGVYGFAKSLLKALKEDGDVVIVVFDAKAPSFRHEAYEAYKAGRAPTPEDFPRQLALMKELVDLLGLERLEVPGFEADDVLATLAKKAEREGYEVQILTADRDLFQLLSPRISVLHPEGHRITPEWLWEKYGLRPEQWVDFRALAGDPSDNIPGVKGIGEKTALKLLKEWGSLENLLKNLDQVKPESVREKILAHLEDLKLSRELSRVRTDLPLEVDFQRRREPDWEGLKAFLERLEFGSLLHEFGLLESPLPAEEAPWPPPEGAFLGYRLSRPEPMWAELLALAASAQGRVYRAEDPHGALRGLFEVRGLLAKDLAVVALREGLDLPPTDDPMLLAYLLDPSNTTPEGVARRYGGEWTEDAAKRALLAERLHANLLGRLQGEERLLWLYEEVEKPLSRVLAHMEATGVKLDVAYLENLSLEVAAHMRRLEEEVFRLAGRSFRLNSRDQLERVLFDELGLPPIGKTESTGKRSTSAAVLEALREVHPIVDKILQYRELAKLKGTYIDRLPALVHPKTGRLHTRFNQTATATGRLSSSDPNLQNIPVRTPLGQKIRRAFVAEEGWRLVALDYSQIELRVLAHLSGDENLIRVFQEGKDIHTQTASWMFGLSAEAIDPLMRRAAKTINFGVLYGMSAFRLSQELGIPYEEAQAFIQKYFQSYPKVKAWIEKTLEEGRTRGYVETLFGRRRYVPDLNARVKGKREAAERMAFNMPVQGTAADLMKLAMVRLFPQLREVGARMLLQVHDELLLEAPKERAEEVAALAKEVMEGVWPLAVPLEVEVGIGEDWLAAKG

SEQ ID NO: 4111 - DNA, 2523 bp, synthetic construct
  misc_feature 1..2523: note = Variant of DNA polymerase I from Thermus sp. strain 2.9
  source 1..2523: mol_type = other DNA
atgcaccatcatcatcatcatggcggtagcggcgtgttaccggtgttcgagcataaaggtcgcgtgcttctggttgatggccatcatctcgcgtatcgtaacttctttgccctgaaaggattaaccaccagcagcggcgagccggtacagggtgtctacggctttgcaaagtcgctcctgaaagctctgaaagaagacggtgatgtggtgattgttgtctttgatgcgaaagcgccaagttttcgccacgaagcgtacgaagcttacaaagccgggcgtgctccaacgccggaagactttcctcgccaattggcgcttatgaaggaattagtggatttgcttggcctcgaacgcttggaagttcccggtttcgaggcagacgacgtattagcgactctcgcaaagaaagccgaacgtgagggctatgaagtccagatcttgacagcagatcgcgatcttttccagcttttatctccgcgcatctcggtgttacacccggaagggcatcgtatcaccccggaatggctctgggagaaatatggtttgcgtcccgaacaatgggtggattttcgcgccttagcaggcgatccgagcgacaatattccgggagttaaaggtatcggcgagaagacggcgctcaagctccttaaagaatgggggtcgttggagaacttgcttaagaatttagatcaggtcaaaccagagtcagtgcgtgagaagattcttgctcacctcgaagacctcaaattaagccgcgaattgtcccgtgtacgcaccgatttgccgctcgaagttgatttccaacgccgccgcgaacctgactgggagggtcttaaagcgtttttagagcgtcttgaatttggttcgctcctgcatgaattcggccttttagaaagcccgttaccagccgaagaagcaccttggccaccgcccgagggcgcgtttttaggttaccgtttgagtcgcccggaaccgatgtgggccgaattactggctcttgcagcgtctgcccagggacgtgtgtatcgcgcggaagaccctcatggtgcgctccgcggcctcttcgaagtccgtggactccttgccaaagacttagctgttgttgcattgcgcgaaggtcttgatttacctccgactgatgatccaatgcttcttgcgtacctcttggacccgtcaaacacgacgcccgaaggcgtagcccgtcgttacggcggcgagtggaccgaagatgcagcgaaacgcgcgttattggccgaacgtttgcacgccaatttattaggacgtttgcaaggcgaggaacgtctcctctggctttacgaagaagtggagaaaccattgagtcgcgtgctcgcgcatatggaagctaccggtgtcaaattagacgtggcgtatttggagaatctcagccttgaagttgctgcccacatgcgccgcttggaggaagaagtagtccgtttagcaggccgttcctttcgccttaattctcgcgatcagttagaacgtgtgctgttcgatgaacttggtctccctcctatcggcaagacagagaagaccggtaaacgtagcacttcagcggcggttttagaagctcttcgcgaagtccatcccattgtggacaagatcttgcaataccgcgaactcgcgaaattgaaaggcacctatattgaccgtcttccggcattagtccacccgaaaacgggacgcctccatacccgcttcaaccaaacagccacggcgaccggtcgtttgtcctcctctgatccaaaccttcagaatattccagtacgtaccccattgggccagaagatccgccgtgcgtttgtagctgaggagggttggcgtttagtggccctcgattatagccaaattgaattacgtgtccttgcccatctttctggcgatgagaacctcatccgcgtgtttcaggaaggcaaagacattcacactcaaacggcaagctggatgtttggattatcagctgaagcgatcgatcctttgatgcgtcgtgcagcgaagaagatcaatttcggtgttctctacggtatgagtccgtttcgtttgtcgcaggaattaggcattccctatgaagaagctcaggcgttcattcagaaatactttcaaagctatcccaaagttaaagcatggatcgagaagactctcgaagaaggccgcacacgtggttacgtagagaccttatttggacgtcgccgctatgttcccgatttaaacgctcgcgtgaaaggcaagcgtgaagccgccgaacgcatggcgttcaacatgcctgtacagggcacggcagctgacctcatgaaacttgcaatggtgcgcctttttccacaattgcgtgaagttggtgcccgcatgctcttgcaggtccacgatgaactcttgttagaagcgccaaaagagcgtgcggaagaggtggcagccctcgcgaaagaagttatggaaggcgtgtggcccttagcggtgcctcttgaagtcgaagttggtattggcgaggattggctggctgccaaagga

SEQ ID NO: 4112 - protein, 841 aa, synthetic construct
  REGION 1..841: note = Variant of DNA polymerase I from Thermus sp. strain 2.9
MHHHHHHGGSGVLPVFEHKGRVLLVDGHHLAYRNFFALKGLTTSSGEPVQGVYGFAKSLLKALKEDGDVVIVVFDAKAPSFRHEAYEAYKAGRAPTPEDFPRQLALMKELVDLLGLERLEVPGFEADDVLATLAKKAEREGYEVQILTADRDLFQLLSPRISVLHPEGHRITPEWLWEKYGLRPEQWVDFRALAGDPSDNIPGVKGIGEKTALKLLKEWGSLENLLKNLDQVKPESVREKILAHLEDLKLSRELSRVRTDLPLEVDFQRRREPDWEGLKAFLERLEFGSLLHEFGLLESPLPAEEAPWPPPEGAFLGYRLSRPEPMWAELLALAASAQGRVYRAEDPHGALRGLFEVRGLLAKDLAVVALREGLDLPPTDDPMLLAYLLDPSNTTPEGVARRYGGEWTEDAAKRALLAERLHANLLGRLQGEERLLWLYEEVEKPLSRVLAHMEATGVKLDVAYLENLSLEVAAHMRRLEEEVVRLAGRSFRLNSRDQLERVLFDELGLPPIGKTEKTGKRSTSAAVLEALREVHPIVDKILQYRELAKLKGTYIDRLPALVHPKTGRLHTRFNQTATATGRLSSSDPNLQNIPVRTPLGQKIRRAFVAEEGWRLVALDYSQIELRVLAHLSGDENLIRVFQEGKDIHTQTASWMFGLSAEAIDPLMRRAAKKINFGVLYGMSPFRLSQELGIPYEEAQAFIQKYFQSYPKVKAWIEKTLEEGRTRGYVETLFGRRRYVPDLNARVKGKREAAERMAFNMPVQGTAADLMKLAMVRLFPQLREVGARMLLQVHDELLLEAPKERAEEVAALAKEVMEGVWPLAVPLEVEVGIGEDWLAAKG

SEQ ID NO: 4113 - DNA, 2523 bp, synthetic construct
  misc_feature 1..2523: note = Variant of DNA polymerase I from Thermus sp. strain 2.9
  source 1..2523: mol_type = other DNA
atgcaccatcatcatcatcatggcggtagcggcgtgttacctgtgttcgagcctaaaggtcgcgtgcttctggttgatggccatcatctcgcgtatcgtaacttctttgccctgaaaggattaaccaccagcagcggcgagccggtacagggtgtctacggctttgcaaagtcgctcctgaaagctctgaaagaagacggtgatgtggtgattgttgtctttgatgcgaaagcgccaagttttcgccacgaagcgtacgaagcttacaaagccgggcgtgctgatacgccggaagactttcctcgccaattggcgcttatgaaggaattagtggatttgcttggcctcgaacgcttggaagttcccggtttcgaggcagacgacgtattagcgactctcgcaaagaaagccgaacgtgagggctatgaagtccagatcttgacagcagatcgcgatcttttccagcttttatctccgcgcatctcggtgttacacccggatgggcatcgtatcaccccggaatggctctgggagaaatatggtttgcgtcccgaacaatgggtggattttcgcgccttagcaggcgataaaagcgacaatattccgggagttaaaggtatcggcgagaagacggcgctcaagctccttaaagaatgggggtcgttggagaacttgcttaagaatttagatcaggtcaaaccagagtcagtgcgtgagaagattcttgctcacctcgaagacctcaagttaagccgcgaattgtcccgtgtacgcaccgatttgccgctcgaagttgatttccaacgccgccgcgaacctgactgggagggtcttaaagcgtttttagagcgtcttgaatttggttcgctcttgcatgaattcggccttttagaaagcccgttaccagccgaagaagcaccttggccaccgcccgagggcgcgtttttaggttaccgtttgagtcgcccggaaccgatgtgggccgaattactggctcttgcagcgtctgcccagggacgtgtgtatcgcgcggaagaccctcatggtgcgctccgcggcctcttcgaagtccgtggactccttgccaaagacttagctgttgttgcattgcgcgaaggtcttgatttacctccgactgatgatccaatgcttcttgcgtacctcttggacccgtcaaacacgacgcctgaaggcgtagcccgtcgttacggcggcgagtggaccgaagatgcagcgaaacgcgcgttattggccgaacgtttgcacgccaatttattaggacgtttgcaaggcgaggagcgtctcctctggctttacgaagaagtggagaaaccattgagtcgcgtgctcgcgcatatggaagctaccggtgtcaaattagacgtggcgtatttggagaatctcagccttgaagttgctgcccacatgcgccgcttggaggaagaagtattccgtttagcaggccgttcctttcgccttaattctcgcgatcagttagaacgtgtgttgttcgatgaacttggtctccctcctatcggcaagacagagaagaccggtaaacgtagcacttcagcggcggttttagaagctcttcgcgaagtccatcccattgtggacaagatcttgcaataccgcgaactcgcgaaattgaaaggcacctatattgaccgtcttccggcattagtccacccgaaaacgggacgcctccatacccgcttcaaccaaacagccacggcgaccggtcgtttgtcctcctctgatccaaaccttcagaatattccagtacgtaccaaattgggccagaagatccgccgtgcgtttgtagctgaggagggttggcgtttagtggccctcgattatagccaaattgaattacgtgtccttgcccatctttctggcgatgagaacctcatccgcgtgtttgaggaaggcaaagacattcacactcaaacggcaagctggatgtttggattatcagctgaagcgatcgatcctttgatgcgtcgtgcagcgaagaccatcaatttcggtgttctctacggtatgagtgcctttcgtttgtcgcaggaattaggcattcccaaagaagaagctcaggcgttcattcagaaatactttcaaagctatcccaaagttaaagcatggatcgagaagactctcgaagaaggccgcacccgtggttacgtagagaccttatttggacgtcgccgctatgttcccgatttaaacgctcgcgtgaaaggcaagcgtgaagccgccgaacgcatggcgttcaacatgcctgtacagggcacggcagctgacctcatgaaacttgcaatggtgcgcctttttccacaattgcgtgaagttggtgcccgcatgctcttgcaggtccacgatgaactcttgttagaagcgccaaaagagcgtgcggaagaggtggcagccctcgcgaaagaagttatggaaggcgtgtggcccttagcggtgcctcttgaagtcgaagttggtattggcgaggattggctggctgccaaagga

SEQ ID NO: 4114 - protein, 841 aa, synthetic construct
  REGION 1..841: note = Variant of DNA polymerase I from Thermus sp. strain 2.9
MHHHHHHGGSGVLPVFEPKGRVLLVDGHHLAYRNFFALKGLTTSSGEPVQGVYGFAKSLLKALKEDGDVVIVVFDAKAPSFRHEAYEAYKAGRADTPEDFPRQLALMKELVDLLGLERLEVPGFEADDVLATLAKKAEREGYEVQILTADRDLFQLLSPRISVLHPDGHRITPEWLWEKYGLRPEQWVDFRALAGDKSDNIPGVKGIGEKTALKLLKEWGSLENLLKNLDQVKPESVREKILAHLEDLKLSRELSRVRTDLPLEVDFQRRREPDWEGLKAFLERLEFGSLLHEFGLLESPLPAEEAPWPPPEGAFLGYRLSRPEPMWAELLALAASAQGRVYRAEDPHGALRGLFEVRGLLAKDLAVVALREGLDLPPTDDPMLLAYLLDPSNTTPEGVARRYGGEWTEDAAKRALLAERLHANLLGRLQGEERLLWLYEEVEKPLSRVLAHMEATGVKLDVAYLENLSLEVAAHMRRLEEEVFRLAGRSFRLNSRDQLERVLFDELGLPPIGKTEKTGKRSTSAAVLEALREVHPIVDKILQYRELAKLKGTYIDRLPALVHPKTGRLHTRFNQTATATGRLSSSDPNLQNIPVRTKLGQKIRRAFVAEEGWRLVALDYSQIELRVLAHLSGDENLIRVFEEGKDIHTQTASWMFGLSAEAIDPLMRRAAKTINFGVLYGMSAFRLSQELGIPKEEAQAFIQKYFQSYPKVKAWIEKTLEEGRTRGYVETLFGRRRYVPDLNARVKGKREAAERMAFNMPVQGTAADLMKLAMVRLFPQLREVGARMLLQVHDELLLEAPKERAEEVAALAKEVMEGVWPLAVPLEVEVGIGEDWLAAKG

SEQ ID NO: 4115 - DNA, 2523 bp, synthetic construct
  misc_feature 1..2523: note = Variant of DNA polymerase I from Thermus sp. strain 2.9
  source 1..2523: mol_type = other DNA
atgcaccatcatcatcatcatggcggtagcggcgtgttaccggtgttcgagcctaaaggtcgcgtgcttctggttgatggccatcatctcgcgtatcgtaacttctttgccctgaaaggattaaccaccagcagcggcgagccggtacagggtgtctacggctttgcaaagtcgctcctgaaagctctgaaagaagacggtgatgtggtgattgttgtctttgatgcgaaagcgccaagttttcgccacgaagcgtacgaagcttacaaagccgggcgtgctccaacgccggaagactttcctcgccaattggcgcttatgaaggaattagtggatttgcttggcctcgaacgcttggaagttcccggtttcgaggcagacgacgtattagcgactctcgcaaagaaagccgaacgtgagggctatgaagtccagatcttgacagcagatcgcgatcttttccagcttttatctccgcgcatctcggtgttacacccggaagggcatcgtatcaccccggaatggctctgggagaaatatggtttgcgtcccgaacaatgggtggattttcgcgccttagcaggcgatccgagcgacaatattccgggagttaaaggtatcggcgagaagacggcgctcaagctccttaaagaatgggggtcgttggagaacttgcttaagaatttagatcaggtcaaaccagagtcagtgcgtgagaagattcttgctcacctcgaagacctcaaattaagccgcgaattgtcccgtgtacgcaccgatttgccgctcgaagttgatttccaacgccgccgcgaacctgactgggagggtcttaaagcgtttttagagcgtcttgaatttggttcgctcctgcatgaattcggccttttagaaagcccgttaccagccgaagaagcaccttggccaccgcccgagggcgcgtttttaggttaccgtttgagtcgcccggaaccgatgtgggccgaattactggctcttgcagcgtctgcccagggacgtgtgtatcgcgcggaagaccctcatggtgcgctccgcggcctcttcgaagtccgtggactccttgccaaagacttagctgttgttgcattgcgcgaaggtcttgatttacctccgactgatgatccaatgcttcttgcgtacctcttggacccgtcaaacacgacgcccgaaggcgtagcccgtcgttacggcggcgagtggaccgaagatgcagcgaaacgcgcgttattggccgaacgtttgcacgccaatttattaggacgtttgcaaggcgaggaacgtctcctctggctttacgaagaagtggagaaaccattgagtcgcgtgctcgcgcatatggaagctaccggtgtcaaattagacgtggcgtatttggagaatctcagccttgaagttgctgcccacatgcgccgcttggaggaagaagtattccgtttagcaggccgttcctttcgccttaattctcgcgatcagttagaacgtgtgttgttcgatgaacttggtctccctcctatcggcaagacagagaagaccggtaaacgtagcacttcagcggcggttttagaagctcttcgcgaagtccatcccattgtggacaagatcttgcaataccgcgaactggcgaaattgaaaggcacctatattgaccgtcttccggcattagtccacccgaaaacgggacgcctccatacccgcttcaaccaaacagccacggcgaccggtcgtttgtcctcctctgatccaaaccttcagaatattccagtacgtaccccattgggccagaagatccgccgtgcgtttgtagctgaggagggttggcgtttagtggccctcgattatagccaaattgaattacgtgtccttgcccatctttctggcgatgagaacctcatccgcgtgtttcaggaaggcaaagacattcacactcaaacggcaagctggatgtttggattatcagctgaagcgatcgatcctttgatgcgtcgtgcagcgaagaagatcaatttcggtgttctctacggtatgagtgcctttcgtttgtcgcaggaattaggcattccctatgaagaagctcaggcgttcattcagaaatactttcaaagctatcccaaagttaaagcatggatcgagaagactctcgaagaaggccgcacacgtggttacgtagagaccttatttggacgtcgccgctatgttcccgatttaaacgctcgcgtgaaaggcaagcgtgaagccgccgaacgcatggcgttcaacatgcctgtacagggcacggcagctgacctcatgaaacttgcaatggtgcgcctttttccacaattgcgtgaagttggtgcccgcatgctcttgcaggtccacgatgaactcttgttagaagcgccaaaagagcgtgcggaagaggtggcagccctcgcgaaagaagttatggaaggcgtgtggcccttagcggtgcctcttgaagtcgaagttggtattggcgaggattggctggctgccaaagga

SEQ ID NO: 4116 - protein, 841 aa, synthetic construct; identical to SEQ ID NO: 4010
  REGION 1..841: note = Variant of DNA polymerase I from Thermus sp. strain 2.9

SEQ ID NO: 4117 - DNA, 2523 bp, synthetic construct
  misc_feature 1..2523: note = Variant of DNA polymerase I from Thermus sp. strain 2.9
  source 1..2523: mol_type = other DNA
atgcaccatcatcatcatcatggcggtagcggcgtgttaccggtgttcgagcctaaaggtcgcgtgcttctggttgatggccatcatctcgcgtatcgtaacttctttgccctgaaaggattaaccaccagcagtggcgagccggtacagggtgtctacggctttgcaaagtcgctcctgaaagctctgaaagaagacggtgatgtggtgattgttgtctttgatgcgaaagcgccaagttttcgccacgaagcgtacgaagcttacaaagccgggcgtgctccaacgccggaagactttcctcgccaattggcgcttatgaaggaattagtggatttgcttggcctcgaacgcttggaagttcccggtttcgaggcagacgacgtattagcgactctcgcaaagaaagccgaacgtgagggctatgaagtccagatcttgacagcagatcgcgatcttttccagcttttatctccgcgcatctcggtgttacacccggaagggcatcgtatcaccccggaatggctctgggagaaatatggtttgcgtcccgaacaatgggtggattttcgcgccttagcaggcgatccgagcgacaatattccgggagttaaaggtatcggcgagaagacggcgctcaagctccttaaagaatgggggtcgttggagaacttgcttaagaatttagatcaggtcaaaccagagtcagtgcgtgagaagattcttgctcacctcgaagacctcaaattaagccgcgaattgtcccgtgtacgcaccgatttgccgctcgaagttgatttccaacgccgccgcgaacctgactgggagggtcttaaagcgtttttagagcgtcttgaatttggttcgctcttgcatgaattcggccttttagaaagcccgttaccagccgaagaagcaccttggccaccgcccgagggcgcgtttttaggttaccgtttgagtcgcccggaaccgatgtgggccgaattactggctcttgcagcgtctgcccagggacgtgtgtatcgcgcggaagaccctcatggtgcgctccgcggcctcttcgaagtccgtggactccttgccaaagacttagctgttgttgcattgcgcgaaggtcttgatttacctccgactgatgatccaatgcttcttgcgtacctcttggacccgtcaaacacgacgcccgaaggcgtagcccgtcgttacggcggcgagtggaccgaagatgcagcgaaacgcgcgttattggccgaacgtttgcacgaaaatttattaggacgtttgcaaggcgaggaacgtctcctctggctttacgaagaagtggagaaaccattgagtcgcgtgctcgcgcatatggaagctaccggtgtcaaattagacgtggcgtatttggagaatctcagccttgaagttgctgcccacatgcgccgcttggaggaagaagtattccgtttagcaggccgttcctttcgccttgtttctcgcgatcagttagaacgtgtgttgttcgatgaacttggtctccctcctatcggcaagacagagaagaccggtaaacgtagcacttcacgtgcggttttagaggctcttcgcgaagtccatcccattgtggacaagatcttgcagtaccgcgaactcgcgaaattgaaaggcacctatattgaccgtcttccggcattagtccacccgaaaacgggacgcctccatacccgcttcaaccaaacagccacggcgaccggtcgtttgtcctcctctgatccaaaccttcagaatattccagtacgtaccccattgggccagaagatccgccgtgcgtttgtagctgaggagggttggcgtttagtggccctcgattatagtcaaattgaattacgtgtccttgcccatctttctggcgatgagaacctcatccgcgtgtttcaggaaggcaaagacattcacactcaaacggcaagctggatgtttggattatcagctgaagcgatcgatcctttgatgcgtcgtgcagcgaagaccatcaatttcggtgttctctacggtatgagtgcctttcgtttgtcgcaggaattaggcattccctatgaagaagctcaggcgttcattcagaaatactttcaaagctatcccaaagttaaagcatggatcgagaagactctcgaggaaggccgcacacgtggttacgtagagaccttatttggacgtcgccgctatgttcccgatttaaacgctcgcgtgaaaggcaagcgtgaagccgccgaacgcatggcgttcaacatgcctgtacagggcacggcagctgacctcatgaaacttgcaatggtgcgcctttttccacaattgcgtgaagttggtgcccgcatgctcttgcaggtccacgatgaactcttgttagaagcgccaaaagagcgtgcggaagaggtggcagccctcgcgaaagaagttatggaaggcgtgtggcccttagcggtgcctcttgaagtcgaagttggtattggcgaggattggctggctgccaaagga

SEQ ID NO: 4118 - protein, 841 aa, synthetic construct
  REGION 1..841: note = Variant of DNA polymerase I from Thermus sp. strain 2.9
MHHHHHHGGSGVLPVFEPKGRVLLVDGHHLAYRNFFALKGLTTSSGEPVQGVYGFAKSLLKALKEDGDVVIVVFDAKAPSFRHEAYEAYKAGRAPTPEDFPRQLALMKELVDLLGLERLEVPGFEADDVLATLAKKAEREGYEVQILTADRDLFQLLSPRISVLHPEGHRITPEWLWEKYGLRPEQWVDFRALAGDPSDNIPGVKGIGEKTALKLLKEWGSLENLLKNLDQVKPESVREKILAHLEDLKLSRELSRVRTDLPLEVDFQRRREPDWEGLKAFLERLEFGSLLHEFGLLESPLPAEEAPWPPPEGAFLGYRLSRPEPMWAELLALAASAQGRVYRAEDPHGALRGLFEVRGLLAKDLAVVALREGLDLPPTDDPMLLAYLLDPSNTTPEGVARRYGGEWTEDAAKRALLAERLHENLLGRLQGEERLLWLYEEVEKPLSRVLAHMEATGVKLDVAYLENLSLEVAAHMRRLEEEVFRLAGRSFRLVSRDQLERVLFDELGLPPIGKTEKTGKRSTSRAVLEALREVHPIVDKILQYRELAKLKGTYIDRLPALVHPKTGRLHTRFNQTATATGRLSSSDPNLQNIPVRTPLGQKIRRAFVAEEGWRLVALDYSQIELRVLAHLSGDENLIRVFQEGKDIHTQTASWMFGLSAEAIDPLMRRAAKTINFGVLYGMSAFRLSQELGIPYEEAQAFIQKYFQSYPKVKAWIEKTLEEGRTRGYVETLFGRRRYVPDLNARVKGKREAAERMAFNMPVQGTAADLMKLAMVRLFPQLREVGARMLLQVHDELLLEAPKERAEEVAALAKEVMEGVWPLAVPLEVEVGIGEDWLAAKG

SEQ ID NO: 4119 - DNA, 2523 bp, synthetic construct
  misc_feature 1..2523: note = Variant of DNA polymerase I from Thermus sp. strain 2.9
  source 1..2523: mol_type = other DNA
atgcaccatcatcatcatcatggcggtagcggcgtgttagaggtgttcgagcctaaaggtcgcgtgcttctggttgatggccatcatctcgcgtatcgtaacttctttgccctgaaaggattaaccaccagcagcggcgagccggtacagggtgtctacggctttgcaaagtcgctcctgaaagctctgaaagaagacggtgatgtggtgattgttgtctttgatgcgaaagcgccaagttttcgccacgaagcgtacgaagcttacaaagccgggcgtgctcctacgccggaagactttcctcgccaattggcgcttatgaaggaattagtggatttgcttggcctcgaacgcttggaagttcccggtttcgaggcagacgacgtattagcgactctcgcaaagaaagccgaacgcgagggctatgaagtccagatcttgacagcagatcgcgatcttttccagcttttatctccgcgcatctcggtgttacacccggatgggcatcgtatcaccccggaatggctctgggagaaatatggtttgcgtcccgaacaatgggtggattttcgcgccttagcaggcgatcctagcgacaatattccgggagttaaaggtatcggcgagaagacggcgctcaagctccttaaagaatgggggtcgttggagaacttgcttaagaatttagatcaggtcaaaccagagtcagtgcgtgagaagattcttgctcacctcgaagacctcgagttaagccgcgaattgtcccgtgtacgcaccgatttgccgctcgaagttgatttccaacgccgccgcgaacctgactgggagggtcttaaagcgtttttagagcgtcttgaatttggttcgctcttgcatgaattcggccttttagaaagcccgttaccagccgaagaagcaccttggccaccgcccgagggcgcgtttttaggttaccgtttgagtcgcccggaaccgatgtgggccgaattactggctcttgcagcgtctgcccagggacgtgtgtatcgcgcggaagaccctcatggtgcgctccgcggcctcttcgaagtccgtggactccttgccaaagacttagctgttgttgcattgcgcgaaggtcttgatttacctccgactgatgatccaatgcttcttgcgtacctcttggacccgtcaaacacgacgcctgaaggcgtagcccgtcgttacggcggcgagtggaccgaagatgcagcgaaacgcgcgttattggccgaacgtttgcacgccaatttattaggacgtttgcaaggcgagaagcgtctcctctggctttacgaagaagtggagaaaccattgagtcgcgtgctcgcgcatatggaagctaccggtgtcaaattagacgtggcgtatttggagaatctcagccttgaagttgctgcccacatgcgccgcttggaggaagaagtattccgtttagcaggccgttcctttcgccttaattctcgcgatcagttagaacgtgtgttgttcgatgaacttggtctccctcctatcggcaagacagagaagaccggtaaacgtagcacttcagcggcggttttagaagctcttcgcgaagtccatcccattgtggacaagatcttgcaataccgcgaactcgcgaaattgaaaggcacctatattgaccgtcttccggcattagtccacccgaaaacgggacgcctccatacccgcttcaaccaaacagccacggcgaccggtcgtttgtcctcctctgatccaaaccttcagaatattccagtacgtaccaaattgggccagaagatccgccgtgcgtttgtagctgaggagggttggcgtttagtggccctcgattatagccaaattgaattacgtgtccttgcccatctttctggcgatgagaacctcatccgcgtgtttgaggaaggcaaagacattcacactcaaacggcaagctggatgtttggattatcagctgaagcgatcgatcctttgatgcgtcgtgcagcgaagaccatcaatttcggtgttctctacggtatgagtgcctttcgtttgtcgcaggaattaggcattccctacgaagaagctcaggcgttcattcagaaatactttcaaagctatcccaaagttaaagcatggatcgagaagactctcgaagaaggccgcacccgtggttacgtagagaccttatttggacgtcgccgctatgttcccgatttaaacgctcgcgtgaaaggcaagcgtgaagccgccgaacgcatggcgttcaacatgcctgtacagggcacggcagctgacctcatgaaacttgcaatggtgcgcctttttccacaattgcgtgaagttggtgcccgcatgctcttgcaggtccacgatgaactcttgttagaagcgccaaaagagcgtgcggaagaggtggcagccctcgcgaaagaagttatggaaggcgtgtggcccttagcggtgcctcttgaagtcgaagttggtattggcgaggattggctggctgccaaagga

SEQ ID NO: 4120 - protein, 841 aa, synthetic construct
  REGION 1..841: note = Variant of DNA polymerase I from Thermus sp. strain 2.9
MHHHHHHGGSGVLEVFEPKGRVLLVDGHHLAYRNFFALKGLTTSSGEPVQGVYGFAKSLLKALKEDGDVVIVVFDAKAPSFRHEAYEAYKAGRAPTPEDFPRQLALMKELVDLLGLERLEVPGFEADDVLATLAKKAEREGYEVQILTADRDLFQLLSPRISVLHPDGHRITPEWLWEKYGLRPEQWVDFRALAGDPSDNIPGVKGIGEKTALKLLKEWGSLENLLKNLDQVKPESVREKILAHLEDLELSRELSRVRTDLPLEVDFQRRREPDWEGLKAFLERLEFGSLLHEFGLLESPLPAEEAPWPPPEGAFLGYRLSRPEPMWAELLALAASAQGRVYRAEDPHGALRGLFEVRGLLAKDLAVVALREGLDLPPTDDPMLLAYLLDPSNTTPEGVARRYGGEWTEDAAKRALLAERLHANLLGRLQGEKRLLWLYEEVEKPLSRVLAHMEATGVKLDVAYLENLSLEVAAHMRRLEEEVFRLAGRSFRLNSRDQLERVLFDELGLPPIGKTEKTGKRSTSAAVLEALREVHPIVDKILQYRELAKLKGTYIDRLPALVHPKTGRLHTRFNQTATATGRLSSSDPNLQNIPVRTKLGQKIRRAFVAEEGWRLVALDYSQIELRVLAHLSGDENLIRVFEEGKDIHTQTASWMFGLSAEAIDPLMRRAAKTINFGVLYGMSAFRLSQELGIPYEEAQAFIQKYFQSYPKVKAWIEKTLEEGRTRGYVETLFGRRRYVPDLNARVKGKREAAERMAFNMPVQGTAADLMKLAMVRLFPQLREVGARMLLQVHDELLLEAPKERAEEVAALAKEVMEGVWPLAVPLEVEVGIGEDWLAAKG

SEQ ID NO: 4121 - DNA, 2523 bp, synthetic construct
  misc_feature 1..2523: note = Variant of DNA polymerase I from Thermus sp. strain 2.9
  source 1..2523: mol_type = other DNA
atgcaccatcatcatcatcatggcggtagcggcgtgttaccggtgttcgagcctaaaggtcgcgtgcttctggttgatggccatcatctcgcgtatcgtaacttctttgccctgaaaggattaaccaccagcagcggcgagccggtacagggtgtctacggctttgcaaagtcgctcctgaaagctctgaaagaagacggtgatgtggtgattgttgtctttgatgcgaaagcgccaagttttcgccacgaagcgtacgaagcttacaaagccgggcgtgctccaacgccggaagactttcctcgccaattggcgcttatgaaggaattagtggatttgcttggcctcgaacgcttggaagttcccggtttcgaggcagacgacgtattagcgactctcgcaaagaaagccgaacgtgagggctatgaagtccagatcttgacagcagatcgcgatcttttccagcttttatctccgcgcatctcggtgttacacccggaagggcatcgtatcaccccggaatggctctgggagaaatatggtttgcgtcccgaacaatgggtggattttcgcgccttagcaggcgatccgagcgacaatattccgggagttaaaggtatcggcgagaagacggcgctcaagctccttaaagaatgggggtcgttggagaacttgcttaagaatttagatcaggtcaaaccagagtcagtgcgtgagaagattcttgctcacctcgaagacctcaaattaagccgcgaattgtcccgtgtacgcaccgatttgccgctcgaagttgatttccaacgccgccgcgaacctgactgggagggtcttaaagcgtttttagagcgtcttgaatttggttcgctcttgcatgaattcggccttttagaaagcccgttaccagccgaagaagcaccttggccaccgcccgagggcgcgtttttaggttaccgtttgagtcgcccggaaccgatgtgggccgaattactggctcttgcagcgtctgcccagggacgtgtgtatcgcgcggaagaccctcatggtgcgctccgcggcctcttcgaagtccgtggactccttgccaaagacttagctgttgttgcattgcgcgaaggtcttgatttacctccgactgatgatccaatgcttcttgcgtacctcttggacccgtcaaacacgacgcccgaaggcgtagcccgtcgttacggcggcgagtggaccgaagatgcagcgaaacgcgcgttattggccgaacgtttgcacgccaatttattaggacgtttgcaaggcgaggaacgtctcctctggctttacgaagaagtggagaaaccattgagtcgcgtgctcgcgcatatggaagctaccggtgtcaaattagacgtggcgtatttggagaatctcagccttgaagttgctgcccacatgcgccgcttggaggaagaagtattcacgttagcaggccgttcctttcgccttaattctcgcgatcagttagaacgtgtgttgttcgatgaacttggtctccctcctatcggcaagacagagaagaccggtaaacgtagcacttcagcggcggttttagaagctcttcgcgaagtccatcccattgtggacaagatcttgcaataccgcgaactcgcgaaattgaaaggcacctatattgaccgtcttccggcattagtccacccgaaaacgggacgcctccatacccgcttcaaccaaacagccacggcgaccggtcgtttgtcctcctctgatccaaaccttcagaatattccagtacgtaccccattgggccagaagatccgccgtgcgtttgtagctgaggagggttggcgtttagtggccctcgattatagccaaattgaattacgtgtccttgcccatctttctggcgatgagaacctcatccgcgtgtttcaggaaggcaaagacattcacactcaaacggcaagctggatgtttggattatcagctgaagcgatcgatcctttgatgcgtcgtgcagcgaagaccatcaatttcggtgttctctacggtatgagtgcctttcgtttgtcgcaggaattaggcattccctatgaagaagctcaggcgttcattcagaaatactttcaaagctatcccaaagttaaagcatggatcgagaagactctcgaagaaggccgcacacgtggttacgtagagaccttatttggacgtcgccgctatgttcccgatttaaacgctcgcgtgaaaggcaagcgtgaagccgccgaacgcatggcgttcaacatgcctgtacagggcacggcagctgacctcatgaaacttgcaatggtgcgcctttttccacaattgcgtgaagttggtgcccgcatgctcttgcaggtccacgatgaactcttgttagaagcgccaaaagagcgtgcggaagaggtggcagccctcgcgaaagaagttatggaaggcgtgtggcccttagcggtgcctcttgaagtcgaagttggtattggcgaggattggctggctgccaaagga

SEQ ID NO: 4122 - protein, 841 aa, synthetic construct
  REGION 1..841: note = Variant of DNA polymerase I from Thermus sp. strain 2.9
MHHHHHHGGSGVLPVFEPKGRVLLVDGHHLAYRNFFALKGLTTSSGEPVQGVYGFAKSLLKALKEDGDVVIVVFDAKAPSFRHEAYEAYKAGRAPTPEDFPRQLALMKELVDLLGLERLEVPGFEADDVLATLAKKAEREGYEVQILTADRDLFQLLSPRISVLHPEGHRITPEWLWEKYGLRPEQWVDFRALAGDPSDNIPGVKGIGEKTALKLLKEWGSLENLLKNLDQVKPESVREKILAHLEDLKLSRELSRVRTDLPLEVDFQRRREPDWEGLKAFLERLEFGSLLHEFGLLESPLPAEEAPWPPPEGAFLGYRLSRPEPMWAELLALAASAQGRVYRAEDPHGALRGLFEVRGLLAKDLAVVALREGLDLPPTDDPMLLAYLLDPSNTTPEGVARRYGGEWTEDAAKRALLAERLHANLLGRLQGEERLLWLYEEVEKPLSRVLAHMEATGVKLDVAYLENLSLEVAAHMRRLEEEVFTLAGRSFRLNSRDQLERVLFDELGLPPIGKTEKTGKRSTSAAVLEALREVHPIVDKILQYRELAKLKGTYIDRLPALVHPKTGRLHTRFNQTATATGRLSSSDPNLQNIPVRTPLGQKIRRAFVAEEGWRLVALDYSQIELRVLAHLSGDENLIRVFQEGKDIHTQTASWMFGLSAEAIDPLMRRAAKTINFGVLYGMSAFRLSQELGIPYEEAQAFIQKYFQSYPKVKAWIEKTLEEGRTRGYVETLFGRRRYVPDLNARVKGKREAAERMAFNMPVQGTAADLMKLAMVRLFPQLREVGARMLLQVHDELLLEAPKERAEEVAALAKEVMEGVWPLAVPLEVEVGIGEDWLAAKG

SEQ ID NO: 4123 - DNA, 2523 bp, synthetic construct
  misc_feature 1..2523: note = Variant of DNA polymerase I from Thermus sp. strain 2.9
  source 1..2523: mol_type = other DNA
atgcaccatcatcatcatcatggcggtagcggcgtgttaccggtgttcgagcctaaaggtcgcgtgcttctggttgatggccatcatctcgcgtatcgtaacttctttgccctgaaaggattaaccaccagcagcggcgagccggtacagggtgtctacggctttgcaaagtcgctcctgaaagctctgaaagaagacggtgatgtggtgattgttgtctttgattctaaagcgccaagttttcgccacgaagcgtacgaagcttacaaagccgggcgtgctccaacgccggaagactttcctcgccaattggcgcttatgaaggaattagtggatttgcttggcctcgaacgcttggaagttcccggtttcgaggcagacgacgtattagcgactctcgcaaagaaagccgaacgtgagggctatgaagtccagatcttgacagcagatcgcgatcttttccagcttttatctccgcgcatctcggtgttacacccggaagggcatcgtatcaccccggaatggctctgggagaaatatggtttgcgtcccgaacaatgggtggattttcgcgccttagcaggcgatccgagcgacaatattccgggagttaaaggtatcggcgagaagacggcgctcaagctccttaaagaatgggggtcgttggagaacttgcttaagaatttagatcaggtcaaaccagagtcagtgcgtgagaagattcttgctcacctcgaagacctcaaattaagccgcgaattgtcccgtgtacgcaccgatttgccgctcgaagttgatttccaacgccgccgcgaacctgactgggagggtcttaaagcgtttttagagcgtcttgaatttggttcgctcttgcatgaattcggccttttagaaagcccgttaccagccgaagaagcaccttggccaccgcccgagggcgcgtttttaggttaccgtttgagtcgcccggaaccgatgtgggccgaattactggctcttgcagcgtctgcccagggacgtgtgtatcgcgcggaagaccctcatggtgcgctccgcggcctcttcgaagtccgtggactccttgccaaagacttagctgttgttgcattgcgcgaaggtcttgatttacctccgactgatgatccaatgcttcttgcgtacctcttggacccgtcaaacacgacgcccgaaggcgtagcccgtcgttacggcggcgagtggaccgaagatgcagcgaaacgcgcgttattggccgaacgtttgcacgccaatttattaggacgtttgcaaggcgaggaacgtctcctctggctttacgaagaagtggagaaaccattgagtcgcgtgctcgcgcatatggaagctaccggtgtcaaattagacgtggcgtatttggagaatctcagccttgaagttgctgcccacatgcgccgcttggaggaagaagtattccgtttagcaggccgttcctttcgccttaattctcgcgatcagttagaacgtgtgttgttcgatgaacttggtctccctcctatcggcaagacagagaagaccggtaaacgtagcacttcagcggcggttttagaagctcttcgcgaagtccatcccattgtggacaagatcttgcaataccgcgaactcgcgaaattgaaaggcacctatattgaccgtcttccggcattagtccacccgaaaacgggacgcctccatacccgcttcaaccaaacagccacggcgaccggtcgtttgtcctcctctgatccaaaccttcagaatattccagtacgtaccccattgggccagaagatccgccgtgcgtttgtagctgaggagggttggcgtttagtggccctcgattatagccaaattgaattacgtgtccttgcccatctttctggcgatgagaacctcatccgcgtgtttcaggaaggcaaagacattcacactcaaacggcaagctggatgtttggattatcagctgaagcgatcgatcctttgatgcgtcgtgcagcgaagaccatcaatttcggtgttctctacggtatgagtgcctttcgtttgtcgcaggaattaggcattccctatgaagaagctcaggcgttcattcagaaatactttcaaagctatcccaaagttaaagcatggatcgagaagactctcgaagaaggccgcacacgtggttacgtagagaccttatttggacgtcgccgctatgttcccgatttaaacgctcgcgtgaaaggcaagcgtgaagccgccgaacgcatggcgttcaacatgcctgtacagggcacggcagctgacctcatgaaacttgcaatggtgcgcctttttccacaattgcgtgaagttggtgcccgcatgctcttgcaggtccacgatgaactcttgttagaagcgccaaaagagcgtgcggaagaggtggcagccctcgcgaaagaagttatggaaggcgtgtggcccttagcggtgcctcttgaagtcgaagttggtattggcgaggattggctggctgccaaagga

SEQ ID NO: 4124 - protein, 841 aa, synthetic construct; identical to SEQ ID NO: 3314
  REGION 1..841: note = Variant of DNA polymerase I from Thermus sp. strain 2.9

SEQ ID NO: 4125 - DNA, 2523 bp, synthetic construct
  misc_feature 1..2523: note = Variant of DNA polymerase I from Thermus sp. strain 2.9
  source 1..2523: mol_type = other DNA
atgcaccatcatcatcatcatggcggtagcggcgtgttacctgtgttcgagcctaaaggtcgcgtgcttctggttgatggccatcatctcgcgtatcgtaacttctttgccctgaaaggattaaccaccagcagcggcgagccggtacagggtgtctacggctttgcaaagtcgctcctgaaagctctgaaagaagacggtgatgtggtgattgttgtctttgatgcgaaagcgccaagttttcgccacgaagcgtacgaagcttacaaagccgggcgtgctcctacgccggaagactttcctcgccaattggcgcttatgaaggaattagtggatttgcttggcctcgaacgcttggaagttcccggtttcgaggcagacgacgtattagcgactctcgcaaagaaagccgaacgcgagggctatgaagtccagatcttgacagcagatcgcgatcttttccagcttttatctccgcgcatctcggtgttacacccggaagggcatcgtatcaccccggaatggctctgggagaaatatggtttgcgtcccgaacaatgggtggattttcgcgccttagcaggcgataaaagcgacaatattccgggagttaaaggtatcggcgagaagacggcgctcaagctccttaaagaatgggggtcgttggagaacttgcttaagaatttagatcaggtcaaaccagagtcagtgcgtgagaagattcttgctcacctcgaagacctcaagttaagccgcgaattgtcccgtgtacgcaccgatttgccgctcgaagttgatttccaacgccgccgcgaacctgactgggagggtcttaaagcgtttttagagcgtcttgaatttggttcgctcttgcatgaattcggccttttagaaagcccgttaccagccgaagaagcaccttggccaccgcccgagggcgcgtttttaggttaccgtttgagtcgcccggaaccgatgtgggccgaattactggctcttgcagcgtctgcccagggacgtgtgtatcgcgcggaagaccctcatggtgcgctccgcggcctcttcgaagtccgtggactccttgccaaagacttagctgttgttgcattgcgcgaaggtcttgatttacctccgactgatgatccaatgcttcttgcgtacctcttggacccgtcaaacacgacgcctgaaggcgtagcccgtcgttacggcggcgagtggaccgaagatgcagcgaaacgcgcgttattggccgaacgtttgcacgccaatttattaggacgtttgcaaggcgaggaacgtctcctctggctttacgaagaagtggagaaaccattgagtcgcgtgctcgcgcatatggaagctaccggtgtcaaattagacgtggcgtatttggagaatctcagccttgaagttgctgcccacatgcgccgcttggaggaagaagtattccgtttagcaggccgttcctttcgccttaattctcgcgatcagttagaacgtgtgttgttcgatgaacttggtctccctcctatcggcaagacagagaagaccggtaaacgtagcacttcagcggcggttttagaagctcttcgcgaagtccatcccattgtggacaagatcttgcaataccgcgaactcgcgaaattgaaaggcacctatattgaccgtcttccggcattagtccacccgaaaacgggacgcctccatacccgcttcaaccaaacagccacggcgaccggtcgtttgtcctcctctgatccaaaccttcagaatattccagtacgtaccccattgggccagaagatccgccgtgcgtttgtagctgaggagggttggcgtttagtggccctcgattatagccaaattgaattacgtgtccttgcccatctttctggcgatgagaacctcatccgcgtgtttgaggaaggcaaagacattcacactcaaacggcaagctggatgtttggattatcagctgaagcgatcgatcctttgatgcgtcgtgcagcgaagaccatcaatttcggtgttctctacggtatgagtgcctttcgtttgtcgcaggaattaggcattccctatgaagaagctcaggcgttcattcagaaatactttcaaagctatcccaaagttaaagcatggatcgagaagactctcgaagaaggccgccaccgtggttacgtagagaccttatttggacgtcgccgctatgttcccgatttaaacgctcgcgtgaaaggcaagcgtgaagccgccgaacgcatggcgttcaacatgcctgtacagggcacggcagctgacctcatgaaacttgcaatggtgcgcctttttccacaattgcgtgaagttggtgcccgcatgctcttgcaggtccacgatgaactcttgttagaagcgccaaaagagcgtgcggaagaggtggcagccctcgcgaaagaagttatggaaggcgtgtggcccttagcggtgcctcttgaagtcgaagttggtattggcgaggattggctggctgccaaagga

SEQ ID NO: 4126 - protein, 841 aa, synthetic construct
  REGION 1..841: note = Variant of DNA polymerase I from Thermus sp. strain 2.9
MHHHHHHGGSGVLPVFEPKGRVLLVDGHHLAYRNFFALKGLTTSSGEPVQGVYGFAKSLLKALKEDGDVVIVVFDAKAPSFRHEAYEAYKAGRAPTPEDFPRQLALMKELVDLLGLERLEVPGFEADDVLATLAKKAEREGYEVQILTADRDLFQLLSPRISVLHPEGHRITPEWLWEKYGLRPEQWVDFRALAGDKSDNIPGVKGIGEKTALKLLKEWGSLENLLKNLDQVKPESVREKILAHLEDLKLSRELSRVRTDLPLEVDFQRRREPDWEGLKAFLERLEFGSLLHEFGLLESPLPAEEAPWPPPEGAFLGYRLSRPEPMWAELLALAASAQGRVYRAEDPHGALRGLFEVRGLLAKDLAVVALREGLDLPPTDDPMLLAYLLDPSNTTPEGVARRYGGEWTEDAAKRALLAERLHANLLGRLQGEERLLWLYEEVEKPLSRVLAHMEATGVKLDVAYLENLSLEVAAHMRRLEEEVFRLAGRSFRLNSRDQLERVLFDELGLPPIGKTEKTGKRSTSAAVLEALREVHPIVDKILQYRELAKLKGTYIDRLPALVHPKTGRLHTRFNQTATATGRLSSSDPNLQNIPVRTPLGQKIRRAFVAEEGWRLVALDYSQIELRVLAHLSGDENLIRVFEEGKDIHTQTASWMFGLSAEAIDPLMRRAAKTINFGVLYGMSAFRLSQELGIPYEEAQAFIQKYFQSYPKVKAWIEKTLEEGRHRGYVETLFGRRRYVPDLNARVKGKREAAERMAFNMPVQGTAADLMKLAMVRLFPQLREVGARMLLQVHDELLLEAPKERAEEVAALAKEVMEGVWPLAVPLEVEVGIGEDWLAAKG

SEQ ID NO: 4127 - DNA, 2523 bp, synthetic construct
  misc_feature 1..2523: note = Variant of DNA polymerase I from Thermus sp. strain 2.9
  source 1..2523: mol_type = other DNA
atgcaccatcatcatcatcatggcggtagcggcgtgttacctgtgttcgagcctaaaggtcgcgtgcttctggttgatggccatcatctcgcgtatcgtaacttctttgccctgaaaggattaaccaccagcagcggcgagccggtacagggtgtctacggctttgcaaagtcgctcctgaaagctctgaaagaagacggtgatgtggtgattgttgtctttgatgcgaaagcgccaagttttcgccacgaagcgtacgaagcttacaaagccgggcgtgctccaacgccggaagactttcctcgccaattggcgcttatgaaggaattagtggatttgcttggcctcgaacgcttggaagttcccggtttcgaggcagacgacgtattagcgactctcgcaaagaaagccgaacgtgagggctatgaagtccagatcttgacagcagatcgcgatcttttccagcttttatctccgcgcatctcggtgttacacccggaagggcatcgtatcaccccggaatggctctgggagaaatatggtttgcgtcccgaacaatgggtggattttcgcgccttagcaggcgatccgagcgacaatattccgggagttaaaggtatcggcgagaagacggcgctcaagctccttaaagaatgggggtcgttggagaacttgcttaagaatttagatcaggtcaaaccagagtcagtgcgtgagaagattcttgctcacctcgaagacctcaaattaagccgcgaattgtcccgtgtacgcaccgatttgccgctcgaagttgatttccaacgccgccgcgaacctgactgggagggtcttaaagcgtttttagagcgtcttgaatttggttcgctcttgcatgaattcggccttttagaaagcccgttaccagccgaagaagcaccttggccaccgcccgagggcgcgtttttaggttaccgtttgagtcgcccggaaccgatgtgggccgaattactggctcttgcagcgtctgcccagggacgtgtgtatcgcgcggaagaccctcatggtgcgctccgcggcctcttcgaagtccgtggactccttgccaaagacttagctgttgttgcattgcgcgaaggtcttgatttacctccgactgatgatccaatgcttcttgcgtacctcttggacccgtcaaacacgacgcctgaaggcgtagcccgtcgttacggcggcgagtggaccgaagatgcagcgaaacgcgcgttattggccgaacgtttgcacgccaatttattaggacgtttgcaaggcgaggaacgtctcctctggctttacgaagaagtggagaaaccattgagtcgcgtgctcgcgcatatggaagctaccggtgtcaaattagacgtggcgtatttggagaatctcagccttgaagttgctgcccacatgcgccgcttggaggaagaagtattccgtttagcaggccgttcctttcgccttaattctcgcgatcagttagaacgtgtgttgttcgatgaacttggtctccctcctatcggcaagacagagaagaccggtaaacgtagcacttcagcggcggttttagaagctcttcgcgaagtccatcccattgtggacaagatcttgcaataccgcgaactcgcgaaattgaaaggcacctatattgaccgtcttccggcattagtccacccgaaaacgggacgcctccatacccgcttcaaccaaacagccacggcgaccggtcgtttgtcctcctctgatccaaaccttcagaatattccagtacgtaccaaattgggccagaagatccgccgtgcgtttgtagctgaggagggttggcgtttagtggccctcgattatagccaaattgaattacgtgtccttgcccatctttctggcgatgagaacctcatccgcgtgtttgaggaaggcaaagacattcacactcaaacggcaagctggatgtttggattatcagctgaagcgatcgatcctttgatgcgtcgtgcagcgaagaccatcaatttcggtgttctctacggtatgagtgcctttcgtttgtcgcaggaattaggcattccctatgaagaagctcaggcgttcattcagaaatactttcaaagctatcccaaagttaaagcatggatcgagaagactctcgaagaaggccgcacccgtggttacgtagagaccttatttggacgtcgccgctatgttcccgatttaaacgctcgcgtgaaaggcaagcgtgaagccgccgaacgcatggcgttcaacatgcctgtacagggcacggcagctgacctcatgaaacttgcaatggtgcgcctttttccacaattgcgtgaagttggtgcccgcatgctcttgcaggtccacgatgaactcttgttagaagcgccaaaagagcgtgcggaagaggtggcagccctcgcgaaagaagttatggaaggcgtgtggcccttagcggtgcctcttgaagtcgaagttggtattggcgaggattggctggctgccaaagga

SEQ ID NO: 4128 - protein, 841 aa, synthetic construct
  REGION 1..841: note = Variant of DNA polymerase I from Thermus sp. strain 2.9
MHHHHHHGGSGVLPVFEPKGRVLLVDGHHLAYRNFFALKGLTTSSGEPVQGVYGFAKSLLKALKEDGDVVIVVFDAKAPSFRHEAYEAYKAGRAPTPEDFPRQLALMKELVDLLGLERLEVPGFEADDVLATLAKKAEREGYEVQILTADRDLFQLLSPRISVLHPEGHRITPEWLWEKYGLRPEQWVDFRALAGDPSDNIPGVKGIGEKTALKLLKEWGSLENLLKNLDQVKPESVREKILAHLEDLKLSRELSRVRTDLPLEVDFQRRREPDWEGLKAFLERLEFGSLLHEFGLLESPLPAEEAPWPPPEGAFLGYRLSRPEPMWAELLALAASAQGRVYRAEDPHGALRGLFEVRGLLAKDLAVVALREGLDLPPTDDPMLLAYLLDPSNTTPEGVARRYGGEWTEDAAKRALLAERLHANLLGRLQGEERLLWLYEEVEKPLSRVLAHMEATGVKLDVAYLENLSLEVAAHMRRLEEEVFRLAGRSFRLNSRDQLERVLFDELGLPPIGKTEKTGKRSTSAAVLEALREVHPIVDKILQYRELAKLKGTYIDRLPALVHPKTGRLHTRFNQTATATGRLSSSDPNLQNIPVRTKLGQKIRRAFVAEEGWRLVALDYSQIELRVLAHLSGDENLIRVFEEGKDIHTQTASWMFGLSAEAIDPLMRRAAKTINFGVLYGMSAFRLSQELGIPYEEAQAFIQKYFQSYPKVKAWIEKTLEEGRTRGYVETLFGRRRYVPDLNARVKGKREAAERMAFNMPVQGTAADLMKLAMVRLFPQLREVGARMLLQVHDELLLEAPKERAEEVAALAKEVMEGVWPLAVPLEVEVGIGEDWLAAKG

SEQ ID NO: 4129 - DNA, 2523 bp, synthetic construct
  misc_feature 1..2523: note = Variant of DNA polymerase I from Thermus sp. strain 2.9
  source 1..2523: mol_type = other DNA
atgcaccatcatcatcatcatggcggtagcggcgtgttaccggtgttcgagcctaaaggtcgcgtgcttctggttgatggccatcatctcgcgtatcgtaacttctttgccctgaaaggattaaccaccagcagcggcgagccggtacagggtgtctggggctttgcaaagtcgctcctgaaagctctgaaagaagacggtgatgtggtgattgttgtctttgatgcgaaagcgccaagttttcgccacgaagcgtacgaagcttacaaagccgggcgtgctccaacgccggaagactttcctcgccaattggcgcttatgaaggaattagtggatttgcttggcctcgaacgcttggaagttcccggtttcgaggcagacgacgtattagcgactctcgcaaagaaagccgaacgtgagggctatgaagtccagatcttgacagcagatcgcgatcttttccagcttttatctccgcgcatctcggtgttacacccggaagggcatcgtatcaccccggaatggctctgggagaaatatggtttgcgtcccgaacaatgggtggattttcgcgccttagcaggcgatccgagcgacaatattccgggagttaaaggtatcggcgagaagacggcgctcaagctccttaaagaatgggggtcgttggagaacttgcttaagaatttagatcaggtcaaaccagagtcagtgcgtgagaagattcttgctcacctcgaagacctcaaattaagccgcgaattgtcccgtgtacgcaccgatttgccgctcgaagttgatttccaacgccgccgcgaacctgactgggagggtcttaaagcgtttttagagcgtcttgaatttggttcgctcttgcatgaattcggccttttagaaagcccgttaccagccgaagaagcaccttggccaccgcccgagggcgcgtttttaggttaccgtttgagtcgcccggaaccgatgtgggccgaattactggctcttgcagcgtctgcccagggacgtgtgtatcgcgcggaagaccctcatggtgcgctccgcggcctcttcgaagtccgtggactccttgccaaagacttagctgttgttgcattgcgcgaaggtcttgatttacctccgactgatgatccaatgcttcttgcgtacctcttggacccgtcaaacacgacgcccgaaggcgtagcccgtcgttacggcggcgagtggaccgaagatgcagcgaaacgcgcgttattggccgaacgtttgcacgccaatttattaggacgtttgcaaggcgaggaacgtctcctctggctttacgaagaagtggagaaaccattgagtcgcgtgctcgcgcatatggaagctaccggtgtcaaattagacgtggcgtatttggagaatctcagccttgaagttgctgcccacatgcgccgcttggaggaagaagtattccgtttagcaggccgttcctttcgccttaattctcgcgatcagttagaacgtgtgttgttcgatgaacttggtctccctcctatcggcaagacagagaagaccggtaaacgtagcacttcagcggcggttttagaagctcttcgcgaagtccatcccattgtggacaagatcttgcaataccgcgaactcgcgaaattgaaaggcacctatattgaccgtcttccggcattagtccacccgaaaacgggacgcctccatacccgcttcaaccaaacagccacggcgaccggtcgtttgtcctcctctgatccaaaccttcagaatattccagtacgtaccccattgggccagaagatccgccgtgcgtttgtagctgaggagggttggcgtttagtggccctcgattatagccaaattgaattacgtgtccttgcccatctttctggcgatgagaacctcatccgcgtgtttcaggaaggcaaagacattcacactcaaacggcaagctggatgtttggattatcagctgaagcgatcgatcctttgatgcgtcgtgcagcgaagaccatcaatttcggtgttctctacggtatgagtgcctttcgtttgtcgcaggaattaggcattccctatgaagaagctcaggcgttcattcagaaatactttcaaagctatcccaaagttaaagcatggatcgagaagactctcgaagaaggccgcacacgtggttacgtagagaccttatttggacgtcgccgctatgttcccgatttaaacgctcgcgtgaaaggcaagcgtgaagccgccgaacgcatggcgttcaacatgcctgtacagggcacggcagctgacctcatgaaacttgcaatggtgcgcctttttccacaattgcgtgaagttggtgcccgcatgctcttgcaggtccacgatgaactcttgttagaagcgccaaaagagcgtgcggaagaggtggcagccctcgcgaaagaagttatggaaggcgtgtggcccttagcggtgcctcttgaagtcgaagttggtattggcgaggattggctggctgccaaagga

SEQ ID NO: 4130 - protein, 841 aa, synthetic construct
  REGION 1..841: note = Variant of DNA polymerase I from Thermus sp. strain 2.9
MHHHHHHGGSGVLPVFEPKGRVLLVDGHHLAYRNFFALKGLTTSSGEPVQGVWGFAKSLLKALKEDGDVVIVVFDAKAPSFRHEAYEAYKAGRAPTPEDFPRQLALMKELVDLLGLERLEVPGFEADDVLATLAKKAEREGYEVQILTADRDLFQLLSPRISVLHPEGHRITPEWLWEKYGLRPEQWVDFRALAGDPSDNIPGVKGIGEKTALKLLKEWGSLENLLKNLDQVKPESVREKILAHLEDLKLSRELSRVRTDLPLEVDFQRRREPDWEGLKAFLERLEFGSLLHEFGLLESPLPAEEAPWPPPEGAFLGYRLSRPEPMWAELLALAASAQGRVYRAEDPHGALRGLFEVRGLLAKDLAVVALREGLDLPPTDDPMLLAYLLDPSNTTPEGVARRYGGEWTEDAAKRALLAERLHANLLGRLQGEERLLWLYEEVEKPLSRVLAHMEATGVKLDVAYLENLSLEVAAHMRRLEEEVFRLAGRSFRLNSRDQLERVLFDELGLPPIGKTEKTGKRSTSAAVLEALREVHPIVDKILQYRELAKLKGTYIDRLPALVHPKTGRLHTRFNQTATATGRLSSSDPNLQNIPVRTPLGQKIRRAFVAEEGWRLVALDYSQIELRVLAHLSGDENLIRVFQEGKDIHTQTASWMFGLSAEAIDPLMRRAAKTINFGVLYGMSAFRLSQELGIPYEEAQAFIQKYFQSYPKVKAWIEKTLEEGRTRGYVETLFGRRRYVPDLNARVKGKREAAERMAFNMPVQGTAADLMKLAMVRLFPQLREVGARMLLQVHDELLLEAPKERAEEVAALAKEVMEGVWPLAVPLEVEVGIGEDWLAAKG

SEQ ID NO: 4131 - DNA, 2523 bp, synthetic construct
  misc_feature 1..2523: note = Variant of DNA polymerase I from Thermus sp. strain 2.9
  source 1..2523: mol_type = other DNA
atgcaccatcatcatcatcatggcggtagcggcgtgttaccggtgttcgagcctaaaggtcgcgtgcttctggttgatggccatcatctcgcgtatcgtaacttctttgccctgaaaggattaaccaccagcagcggcgagccggtacagggtgtctacggctttgcaaagtcgctcctgaaagctctgaaagaagacggtgatgtggtgattgttgtctttgatgcgaaagcgccaagttttcgccacgaagcgtacgaagcttacaaagccgggcgtgctccaacgccggaagactttcctcgccaattggcgcttatgaaggaattagtggatttgcttggcctcgaacgcttggaagttcccggtttcgaggcagacgacgtattagcgactctcgcaaagaaagccgaacgtgagggctatgaagtccagatcttgacagcagatcgcgatcttttccagcttttatctccgcgcatctcggtgttacacccggaagggcatcgtatcaccccggaatggctctgggagaaatatggtttgcgtcccgaacaatgggtggattttcgcgccttagcaggcgatccgagcgacaatattccgggagttaaaggtatcggcgagaagacggcgctcaagctccttaaagaatgggggtcgttggagaacttgcttaagaatttagatcaggtcaaaccagagtcagtgcgtgagaagattcttgctcacctcgaagacctcaaattaagccgcgaattgtcccgtgtacgcaccgatttgccgctcgaagttgatttccaacgccgccgcgaacctgactgggagggtcttaaagcgtttttagagcgtcttgaatttggttcgctcttgcatgaattcggccttttagaaagcccgttaccagccgaagaagcaccttggccaccgcccgagggcgcgtttttaggttaccgtttgagtcgcccggaaccgatgtgggccgaattactggctcttgcagcgtctgcccagggacgtgtgtatcgcgcggaagaccctcatggtgcgctccgcggcctcttcgaagtccgtggactccttgccaaagacttagctgttgttgcattgcgcgaaggtcttgatttacctccgactgatgatccaatgcttcttgcgtacctcttggacccgtcaaacacgacgcccgaaggcgtagcccgtcgttacggcggcgagtggaccgaagatgcagcgaaacgcgcgttattggccgaacgtttgcacgccaatttattaggacgtttgcaaggcgaggaacgtctcctctggctttacgaagaagtggagaaaccattgagtcgcgtgctcgcgcatatggaagctaccggtgtcttgttagacgtggcgtatttggagaatctcagccttgaagttgctgcccacatgcgccgcttggaggaagaagtattccgtttagcaggccgttcctttcgccttaattctcgcgatcagttagaacgtgtgttgttcgatgaacttggtctccctcctatcggcaagacagagaagaccggtaaacgtagcacttcagcggcggttttagaagctcttcgcgaagtccatcccattgtggacaagatcttgcaataccgcgaactcgcgaaattgaaaggcacctatattgaccgtcttccggcattagtccacccgaaaacgggacgcctccatacccgcttcaaccaaacagccacggcgaccggtcgtttgtcctcctctgatccaaaccttcagaatattccagtacgtaccccattgggccagaagatccgccgtgcgtttgtagctgaggagggttggcgtttagtggccctcgattatagccaaattgaattacgtgtccttgcccatctttctggcgatgagaacctcatccgcgtgtttcaggaaggcaaagacattcacactcaaacggcaagctggatgtttggattatcagctgaagcgatcgatcctttgatgcgtcgtgcagcgaagaccatcaatttcggtgttctctacggtatgagtgcctttcgtttgtcgcaggaattaggcattccctatgaagaagctcaggcgttcattcagaaatactttcaaagctatcccaaagttaaagcatggatcgagaagactctcgaagaaggccgcacacgtggttacgtagagaccttatttggacgtcgccgctatgttcccgatttaaacgctcgcgtgaaaggcaagcgtgaagccgccgaacgcatggcgttcaacatgcctgtacagggcacggcagctgacctcatgaaacttgcaatggtgcgcctttttccacaattgcgtgaagttggtgcccgcatgctcttgcaggtccacgatgaactcttgttagaagcgccaaaagagcgtgcggaagaggtggcagccctcgcgaaagaagttatggaaggcgtgtggcccttagcggtgcctcttgaagtcgaagttggtattggcgaggattggctggctgccaaagga

SEQ ID NO: 4132 - protein, 841 aa, synthetic construct
  REGION 1..841: note = Variant of DNA polymerase I from Thermus sp. strain 2.9
MHHHHHHGGSGVLPVFEPKGRVLLVDGHHLAYRNFFALKGLTTSSGEPVQGVYGFAKSLLKALKEDGDVVIVVFDAKAPSFRHEAYEAYKAGRAPTPEDFPRQLALMKELVDLLGLERLEVPGFEADDVLATLAKKAEREGYEVQILTADRDLFQLLSPRISVLHPEGHRITPEWLWEKYGLRPEQWVDFRALAGDPSDNIPGVKGIGEKTALKLLKEWGSLENLLKNLDQVKPESVREKILAHLEDLKLSRELSRVRTDLPLEVDFQRRREPDWEGLKAFLERLEFGSLLHEFGLLESPLPAEEAPWPPPEGAFLGYRLSRPEPMWAELLALAASAQGRVYRAEDPHGALRGLFEVRGLLAKDLAVVALREGLDLPPTDDPMLLAYLLDPSNTTPEGVARRYGGEWTEDAAKRALLAERLHANLLGRLQGEERLLWLYEEVEKPLSRVLAHMEATGVLLDVAYLENLSLEVAAHMRRLEEEVFRLAGRSFRLNSRDQLERVLFDELGLPPIGKTEKTGKRSTSAAVLEALREVHPIVDKILQYRELAKLKGTYIDRLPALVHPKTGRLHTRFNQTATATGRLSSSDPNLQNIPVRTPLGQKIRRAFVAEEGWRLVALDYSQIELRVLAHLSGDENLIRVFQEGKDIHTQTASWMFGLSAEAIDPLMRRAAKTINFGVLYGMSAFRLSQELGIPYEEAQAFIQKYFQSYPKVKAWIEKTLEEGRTRGYVETLFGRRRYVPDLNARVKGKREAAERMAFNMPVQGTAADLMKLAMVRLFPQLREVGARMLLQVHDELLLEAPKERAEEVAALAKEVMEGVWPLAVPLEVEVGIGEDWLAAKG

SEQ ID NO: 4133 - DNA, 2523 bp, synthetic construct
  misc_feature 1..2523: note = Variant of DNA polymerase I from Thermus sp. strain 2.9
  source 1..2523: mol_type = other DNA
atgcaccatcatcatcatcatggcggtagcggcgtgttaccggtgttcgagcctaaaggtcgcgtgcttctggttgatggccatcatctcgcgtatcgtaacttctttgccctgaaaggattaaccaccagcagcggcgagccggtacagggtgtctacggctttgcaaagtcgctcctgaaagctctgaaagaagacggtgatgtggtgattgttgtctttgatgcgaaagcgccaagttttcgccacgaagcgtacgaagcttacaaagccgggcgtgctccaacgccggaagactttcctcgccaattggcgcttatgaaggaattagtggatttgcttggcctcgaacgcttggaagttcccggtttcgaggcagacgacgtattagcgactctcgcaaagaaagccgaacgtgagggctatgaagtccagatcttgacagcagatcgcgatcttttccagcttttatctccgcgcatctcggtgttacacccggaagggcatcgtatcaccccggaatggctctgggagaaatatggtttgcgtcccgaacaatgggtggattttcgcgccttagcaggcgatccgagcgacaatattccgggagttaaaggtatcggcgagaagacggcgctcaagctccttaaagaatgggggtcgttggagaacttgcttaagaatttagatcaggtcaaaccagagtcagtgcgtgagaagattcttgctcacctcgaagacctcaaattaagccgcgaattgtcccgtgtacgcaccgatttgccgctcgaagttgatttccaacgccgccgcgaacctgactgggagggtcttaaagcgtttttagagcgtcttgaatttggttcgctcttgcatgaattcggccttttagaaagcccgttaccagccgaagaagcaccttggccaccgcccgagactgcgtttttaggttaccgtttgagtcgcccggaaccgatgtgggccgaattactggctcttgcagcgtctgcccagggacgtgtgtatcgcgcggaagaccctcatggtgcgctccgcggcctcttcgaagtccgtggactccttgccaaagacttagctgttgttgcattgcgcgaaggtcttgatttacctccgactgatgatccaatgcttcttgcgtacctcttggacccgtcaaacacgacgcccgaaggcgtagcccgtcgttacggcggcgagtggaccgaagatgcagcgaaacgcgcgttattggccgaacgtttgcacgccaatttattaggacgtttgcaaggcgaggaacgtctcctctggctttacgaagaagtggagaaaccattgagtcgcgtgctcgcgcatatggaagctaccggtgtcaaattagacgtggcgtatttggagaatctcagccttgaagttgctgcccacatgcgccgcttggaggaagaagtattccgtttagcaggccgttcctttcgccttaattctcgcgatcagttagaacgtgtgttgttcgatgaacttggtctccctcctatcggcaagacagagaagaccggtaaacgtagcacttcagcggcggttttagaagctcttcgcgaagtccatcccattgtggacaagatcttgcaataccgcgaactcgcgaaattgaaaggcacctatattgaccgtcttccggcattagtccacccgaaaacgggacgcctccatacccgcttcaaccaaacagccacggcgaccggtcgtttgtcctcctctgatccaaaccttcagaatattccagtacgtaccccattgggccagaagatccgccgtgcgtttgtagctgaggagggttggcgtttagtggccctcgattatagccaaattgaattacgtgtccttgcccatctttctggcgatgagaacctcatccgcgtgtttcaggaaggcaaagacattcacactcaaacggcaagctggatgtttggattatcagctgaagcgatcgatcctttgatgcgtcgtgcagcgaagaccatcaatttcggtgttctctacggtatgagtgcctttcgtttgtcgcaggaattaggcattccctatgaagaagctcaggcgttcattcagaaatactttcaaagctatcccaaagttaaagcatggatcgagaagactctcgaagaaggccgcacacgtggttacgtagagaccttatttggacgtcgccgctatgttcccgatttaaacgctcgcgtgaaaggcaagcgtgaagccgccgaacgcatggcgttcaacatgcctgtacagggcacggcagctgacctcatgaaacttgcaatggtgcgcctttttccacaattgcgtgaagttggtgcccgcatgctcttgcaggtccacgatgaactcttgttagaagcgccaaaagagcgtgcggaagaggtggcagccctcgcgaaagaagttatggaaggcgtgtggcccttagcggtgcctcttgaagtcgaagttggtattggcgaggattggctggctgccaaagga

SEQ ID NO: 4134 - protein, 841 aa, synthetic construct
  REGION 1..841: note = Variant of DNA polymerase I from Thermus sp. strain 2.9
MHHHHHHGGSGVLPVFEPKGRVLLVDGHHLAYRNFFALKGLTTSSGEPVQGVYGFAKSLLKALKEDGDVVIVVFDAKAPSFRHEAYEAYKAGRAPTPEDFPRQLALMKELVDLLGLERLEVPGFEADDVLATLAKKAEREGYEVQILTADRDLFQLLSPRISVLHPEGHRITPEWLWEKYGLRPEQWVDFRALAGDPSDNIPGVKGIGEKTALKLLKEWGSLENLLKNLDQVKPESVREKILAHLEDLKLSRELSRVRTDLPLEVDFQRRREPDWEGLKAFLERLEFGSLLHEFGLLESPLPAEEAPWPPPETAFLGYRLSRPEPMWAELLALAASAQGRVYRAEDPHGALRGLFEVRGLLAKDLAVVALREGLDLPPTDDPMLLAYLLDPSNTTPEGVARRYGGEWTEDAAKRALLAERLHANLLGRLQGEERLLWLYEEVEKPLSRVLAHMEATGVKLDVAYLENLSLEVAAHMRRLEEEVFRLAGRSFRLNSRDQLERVLFDELGLPPIGKTEKTGKRSTSAAVLEALREVHPIVDKILQYRELAKLKGTYIDRLPALVHPKTGRLHTRFNQTATATGRLSSSDPNLQNIPVRTPLGQKIRRAFVAEEGWRLVALDYSQIELRVLAHLSGDENLIRVFQEGKDIHTQTASWMFGLSAEAIDPLMRRAAKTINFGVLYGMSAFRLSQELGIPYEEAQAFIQKYFQSYPKVKAWIEKTLEEGRTRGYVETLFGRRRYVPDLNARVKGKREAAERMAFNMPVQGTAADLMKLAMVRLFPQLREVGARMLLQVHDELLLEAPKERAEEVAALAKEVMEGVWPLAVPLEVEVGIGEDWLAAKG

SEQ ID NO: 4135 - DNA, 2523 bp, synthetic construct
  misc_feature 1..2523: note = Variant of DNA polymerase I from Thermus sp. strain 2.9
  source 1..2523: mol_type = other DNA
atgcaccatcatcatcatcatggcggtagcggcgtgttaccggtgttcgagcctaaaggtcgcgtgcttctggttgatggccatcatctcgcgtatcgtaacttctttgccctgaaaggattaaccaccagcagcggcgagccggtacagggtgtctacggctttgcaaagtcgctcctgaaagctctgaaagaagacggtgatgtggtgattgttgtctttgatgcgaaagcgccaagttttcgccacgaagcgtacgaagcttacaaagccgggcgtgctccaacgccggaagactttcctcgccaattggcgcttatgaaggaattagtggatttgcttggcctcgaacgcttggaagttcccggtttcgaggcagacgacgtattagcgactctcgcaaagaaagccgaacgtgagggctatgaagtccagatcttgacagcagatcgcgatcttttccagcttttatctccgcgcatctcggtgttacacccggaagggcatcgtatcaccccggaatggctctgggagaaatatggtttgcgtcccgaacaatgggtggattttcgcgccttagcaggcgatccgagcgacaatattccgggagttaaaggtatcggcgagaagacggcgctcaagctccttaaagaatgggggtcgttggagaacttgcttaagaatttagatcaggtcaaaccagagtcagtgcgtgagaagattcttgctcacctcgaagacctcaaattaagccgcgaattgtcccgtgtacgcaccgatttgccgctcgaagttgatttccaacgccgccgcgaacctgactgggagggtcttaaagcgtttttagagcgtcttgaatttggttcgctcctgcatgaattcggccttttagaaagcccgttaccagccgaagaagcaccttggccaccgcccgagggcgcgtttttaggttaccgtttgagtcgcccggaaccgatgtgggccgaattactggctcttgcagcgtctgcccagggacgtgtgtatcgcgcggaagaccctcatggtgcgctccgcggcctcttcgaagtccgtggactccttgccaaagacttagctgttgttgcattgcgcgaaggtcttgatttacctccgactgatgatccaatgcttcttgcgtacctcttggacccgtcaaacacgacgcccgaaggcgtagcccgtcgttacggcggcgagtggaccgaagatgcagcgaaacgcgcgttattggccgaacgtttgcacgccaatttattaggacgtttgcaaggcgaggaacgtctcctctggctttacgaagaagtggagaaaccattgagtcgcgtgctcgcgcatatggaagctaccggtgtcaaattagacgtggcgtatttggagaatctcagccttgaagttgctgcccacatgcgccgcttggaggaagaagtattccgtttagcaggccgttcctttcgccttaattctcgcgatatgttagaacgtgtgctgttcgatgaacttggtctccctcctatcggcaagacagagaagaccggtaaacgtagcacttcagcggcggttttagaagctcttcgcgaagtccatcccattgtggacaagatcttgcaataccgcgaactggcgaaattgaaaggcacctatattgaccgtcttccggcattagtccacccgaaaacgggacgcctccatacccgcttcaaccaaacagccacggcgaccggtcgtttgtcctcctctgatccaaaccttcagaatattccagtacgtaccccattgggccagaagatccgccgtgcgtttgtagctgaggagggttggcgtttagtggccctcgattatagccaaattgaattacgtgtccttgcccatctttctggcgatgagaacctcatccgcgtgtttcaggaaggcaaagacattcacactcaaacggcaagctggatgtttggattatcagctgaagcgatcgatcctttgatgcgtcgtgcagcgaagaccatcaatttcggtgttctctacggtatgagtccgtttcgtttgtcgcaggaattaggcattccctatgaagaagctcaggcgttcattcagaaatactttcaaagctatcccaaagttaaagcatggatcgagaagactctcgaagaaggccgcacacgtggttacgtagagaccttatttggacgtcgccgctatgttcccgatttaaacgctcgcgtgaaaggcaagcgtgaagccgccgaacgcatggcgttcaacatgcctgtacagggcacggcagctgacctcatgaaacttgcaatggtgcgcctttttccacaattgcgtgaagttggtgcccgcatgctcttgcaggtccacgatgaactcttgttagaagcgccaaaagagcgtgcggaagaggtggcagccctcgcgaaagaagttatggaaggcgtgtggcccttagcggtgcctcttgaagtcgaagttggtattggcgaggattggctggctgccaaagga

SEQ ID NO: 4136 - protein, 841 aa, synthetic construct
  REGION 1..841: note = Variant of DNA polymerase I from Thermus sp. strain 2.9
MHHHHHHGGSGVLPVFEPKGRVLLVDGHHLAYRNFFALKGLTTSSGEPVQGVYGFAKSLLKALKEDGDVVIVVFDAKAPSFRHEAYEAYKAGRAPTPEDFPRQLALMKELVDLLGLERLEVPGFEADDVLATLAKKAEREGYEVQILTADRDLFQLLSPRISVLHPEGHRITPEWLWEKYGLRPEQWVDFRALAGDPSDNIPGVKGIGEKTALKLLKEWGSLENLLKNLDQVKPESVREKILAHLEDLKLSRELSRVRTDLPLEVDFQRRREPDWEGLKAFLERLEFGSLLHEFGLLESPLPAEEAPWPPPEGAFLGYRLSRPEPMWAELLALAASAQGRVYRAEDPHGALRGLFEVRGLLAKDLAVVALREGLDLPPTDDPMLLAYLLDPSNTTPEGVARRYGGEWTEDAAKRALLAERLHANLLGRLQGEERLLWLYEEVEKPLSRVLAHMEATGVKLDVAYLENLSLEVAAHMRRLEEEVFRLAGRSFRLNSRDMLERVLFDELGLPPIGKTEKTGKRSTSAAVLEALREVHPIVDKILQYRELAKLKGTYIDRLPALVHPKTGRLHTRFNQTATATGRLSSSDPNLQNIPVRTPLGQKIRRAFVAEEGWRLVALDYSQIELRVLAHLSGDENLIRVFQEGKDIHTQTASWMFGLSAEAIDPLMRRAAKTINFGVLYGMSPFRLSQELGIPYEEAQAFIQKYFQSYPKVKAWIEKTLEEGRTRGYVETLFGRRRYVPDLNARVKGKREAAERMAFNMPVQGTAADLMKLAMVRLFPQLREVGARMLLQVHDELLLEAPKERAEEVAALAKEVMEGVWPLAVPLEVEVGIGEDWLAAKG

SEQ ID NO: 4137 - DNA, 2523 bp, synthetic construct
  misc_feature 1..2523: note = Variant of DNA polymerase I from Thermus sp. strain 2.9
  source 1..2523: mol_type = other DNA
atgcaccatcatcatcatcatggcggtagcggcgtgttaccggtgttcgagcctaaaggtcgcgtgcttctggttgatggccatcatctcgcgtatcgtaacttctttgccctgaaaggattaaccaccagcctgggcgagccggtacagggtgtctacggctttgcaaagtcgctcctgaaagctctgaaagaagacggtgatgtggtgattgttgtctttgatgcgaaagcgccaagttttcgccacgaagcgtacgaagcttacaaagccgggcgtgctccaacgccggaagactttcctcgccaattggcgcttatgaaggaattagtggatttgcttggcctcgaacgcttggaagttcccggtttcgaggcagacgacgtattagcgactctcgcaaagaaagccgaacgtgagggctatgaagtccagatcttgacagcagatcgcgatcttttccagcttttatctccgcgcatctcggtgttacacccggaagggcatcgtatcaccccggaatggctctgggagaaatatggtttgcgtcccgaacaatgggtggattttcgcgccttagcaggcgatccgagcgacaatattccgggagttaaaggtatcggcgagaagacggcgctcaagctccttaaagaatgggggtcgttggagaacttgcttaagaatttagatcaggtcaaaccagagtcagtgcgtgagaagattcttgctcacctcgaagacctcaaattaagccgcgaattgtcccgtgtacgcaccgatttgccgctcgaagttgatttccaacgccgccgcgaacctgactgggagggtcttaaagcgtttttagagcgtcttgaatttggttcgctcttgcatgaattcggccttttagaaagcccgttaccagccgaagaagcaccttggccaccgcccgagggcgcgtttttaggttaccgtttgagtcgcccggaaccgatgtgggccgaattactggctcttgcagcgtctgcccagggacgtgtgtatcgcgcggaagaccctcatggtgcgctccgcggcctcttcgaagtccgtggactccttgccaaagacttagctgttgttgcattgcgcgaaggtcttgatttacctccgactgatgatccaatgcttcttgcgtacctcttggacccgtcaaacacgacgcccgaaggcgtagcccgtcgttacggcggcgagtggaccgaagatgcagcgaaacgcgcgttattggccgaacgtttgcacgaaaatttattaggacgtttgcaaggcgaggaacgtctcctctggctttacgaagaagtggagaaaccattgagtcgcgtgctcgcgcatatggaagctaccggtgtcaaattagacgtggcgtatttggagaatctcagccttgaagttgctgcccacatgcgccgcttggaggaagaagtattccgtttagcaggccgttcctttcgccttaactctcgcgatcagttagaacgtgtgttgttcgatgaacttggtctccctcctatcggcaagacagagaagaccggtaaacgtagcacttcagctgcggttttagaggctcttcgcgaagtccatcccattgtggacaagatcttgcagtaccgcgaactcgcgaaattgaaaggcacctatattgaccgtcttccggcattagtccacccgaaaacgggacgcctccatacccgcttcaaccaaacagccacggcgaccggtcgtttgtcctcctctgatccaaaccttcagaatattccagtacgtaccccattgggccagaagatccgccgtgcgtttgtagctgaggagggttggcgtttagtggccctcgattatagtcaaattgaattacgtgtccttgcccatctttctggcgatgagaacctcatccgcgtgtttcaggaaggcaaagacattcacactcaaacggcaagctggatgtttggattatcagctgaagcgatcgatcctttgatgcgtcgtgcagcgaagaccatcaatttcggtgttctctacggtatgagtgcctttcgtttgtcgcaggaattaggcattccctatgaagaagctcaggcgttcattcagaaatactttcaaagctatcccaaagttaaagcatggatcgagaagactctcgaagaaggccgcacacgtggttacgtagagaccttatttggacgtcgccgctatgttcccgatttaaacgctcgcgtgaaaggcaagcgtgaagccgccgaacgcatggcgttcaacatgcctgtacagggcacggcagctgacctcatgaaacttgcaatggtgcgcctttttccacaattgcgtgaagttggtgcccgcatgctcttgcaggtccacgatgaactcttgttagaagcgccaaaagagcgtgcggaagaggtggcagccctcgcgaaagaagttatggaaggcgtgtggcccttagcggtgcctcttgaagtcgaagttggtattggcgaggattggctggctgccaaagga

SEQ ID NO: 4138 - protein, 841 aa, synthetic construct
  REGION 1..841: note = Variant of DNA polymerase I from Thermus sp. strain 2.9
MHHHHHHGGSGVLPVFEPKGRVLLVDGHHLAYRNFFALKGLTTSLGEPVQGVYGFAKSLLKALKEDGDVVIVVFDAKAPSFRHEAYEAYKAGRAPTPEDFPRQLALMKELVDLLGLERLEVPGFEADDVLATLAKKAEREGYEVQILTADRDLFQLLSPRISVLHPEGHRITPEWLWEKYGLRPEQWVDFRALAGDPSDNIPGVKGIGEKTALKLLKEWGSLENLLKNLDQVKPESVREKILAHLEDLKLSRELSRVRTDLPLEVDFQRRREPDWEGLKAFLERLEFGSLLHEFGLLESPLPAEEAPWPPPEGAFLGYRLSRPEPMWAELLALAASAQGRVYRAEDPHGALRGLFEVRGLLAKDLAVVALREGLDLPPTDDPMLLAYLLDPSNTTPEGVARRYGGEWTEDAAKRALLAERLHENLLGRLQGEERLLWLYEEVEKPLSRVLAHMEATGVKLDVAYLENLSLEVAAHMRRLEEEVFRLAGRSFRLNSRDQLERVLFDELGLPPIGKTEKTGKRSTSAAVLEALREVHPIVDKILQYRELAKLKGTYIDRLPALVHPKTGRLHTRFNQTATATGRLSSSDPNLQNIPVRTPLGQKIRRAFVAEEGWRLVALDYSQIELRVLAHLSGDENLIRVFQEGKDIHTQTASWMFGLSAEAIDPLMRRAAKTINFGVLYGMSAFRLSQELGIPYEEAQAFIQKYFQSYPKVKAWIEKTLEEGRTRGYVETLFGRRRYVPDLNARVKGKREAAERMAFNMPVQGTAADLMKLAMVRLFPQLREVGARMLLQVHDELLLEAPKERAEEVAALAKEVMEGVWPLAVPLEVEVGIGEDWLAAKG

SEQ ID NO: 4139 - DNA, 2523 bp, synthetic construct
  misc_feature 1..2523: note = Variant of DNA polymerase I from Thermus sp. strain 2.9
  source 1..2523: mol_type = other DNA
atgcaccatcatcatcatcatggcggtagcggcgtgttaccggtgttcgagcctaaaggtcgcgtgcttctggttgatggccatcatctcgcgtatcgtaacttctttgccctgaaaggattaaccaccagcagcggcgagccggtacagggtgtctacggctttgcaaagtcgctcctgaaagctctgaaagaagacggtgatgtggtgattgttgtctttgatgcgaaagcgccaagttttcgccacgaagcgtacgaagcttacaaagccgggcgtgctccaacgccggaagactttcctcgccaattggcgcttatgaaggaattagtggatttgcttggcctcgaacgcttggaagttcccggtttcgaggcagacgacgtattagcgactctcgcaaagaaagccgaacgtgagggctatgaagtccagatcttgacagcagatcgcgatcttttccagcttttatctccgcgcatctcggtgttacacccggatgggcatcgtatcaccccggaatggctctgggagaaatatggtttgcgtcccgaacaatgggtggattttcgcgccttagcaggcgatccgagcgacaatattccgggagttaaaggtatcggcgagaagacggcgctcaagctccttaaagaatgggggtcgttggagaacttgcttaagaatttagatcaggtcaaaccagagtcagtgcgtgagaagattcttgctcacctcgaagacctcaaattaagccgcgaattgtcccgtgtacgcaccgatttgccgctcgaagttgatttccaacgccgccgcgaacctgactgggagggtcttaaagcgtttttagagcgtcttgaatttggttcgctcttgcatgaattcggccttttagaaagcccgttaccagccgaagaagcaccttggccaccgcccgagggcgcgtttttaggttaccgtttgagtcgcccggaaccgatgtgggccgaattactggctcttgcagcgtctgcccagggacgtgtgtatcgcgcggaagaccctcatggtgcgctccgcggcctcttcgaagtccgtggactccttgccaaagacttagctgttgttgcattgcgcgaaggtcttgatttacctccgactgatgatccaatgcttcttgcgtacctcttggacccgtcaaacacgacgcctgaaggcgtagcccgtcgttacggcggcgagtggaccgaagatgcagcgaaacgcgcgttattggccgaacgtttgcacgccaatttattaggacgtttgcaaggcgaggaacgtctcctctggctttacgaagaagtggagaaaccattgagtcgcgtgctcgcgcatatggaagctaccggtgtcaaattagacgtggcgtatttggagaatctcagccttgaagttgctgcccacatgcgccgcttggaggaagaagtattccgtttagcaggccgttcctttcgccttaattctcgcgatcagttagaacgtgtgttgttcgatgaacttggtctccctcctatcggcaagacagagaagaccggtaaacgtagcacttcagcggcggttttagaagctcttcgcgaagtccatcccattgtggacaagatcttgcaataccgcgaactcgcgaaattgaaaggcacctatattgaccgtcttccggcattagtccacccgaaaacgggacgcctccatacccgcttcaaccaaacagccacggcgaccggtcgtttgtcctcctctgatccaaaccttcagaatattccagtacgtaccccattgggccagaagatccgccgtgcgtttgtagctgaggagggttggcgtttagtggccctcgattatagccaaattgaattacgtgtccttgcccatctttctggcgatgagaacctcatccgcgtgtttgaggaaggcaaagacattcacactcaaacggcaagctggatgtttggattatcagctgaagcgatcgatcctttgatgcgtcgtgcagcgaagaccatcaatttcggtgttctctacggtatgagtgcctttcgtttgtcgcaggaattaggcattccctatgaagaagctcaggcgttcattcagaaatactttcaaagctatcccaaagttaaagcatggatcgagaagactctcgaagaaggccgcacacgtggttacgtagagaccttatttggacgtcgccgctatgttcccgatttaaacgctcgcgtgaaaggcaagcgtgaagccgccgaacgcatggcgttcaacatgcctgtacagggcacggcagctgacctcatgaaacttgcaatggtgcgcctttttccacaattgcgtgaagttggtgcccgcatgctcttgcaggtccacgatgaactcttgttagaagcgccaaaagagcgtgcggaagaggtggcagccctcgcgaaagaagttatggaaggcgtgtggcccttagcggtgcctcttgaagtcgaagttggtattggcgaggattggctggctgccaaagga

SEQ ID NO: 4140 - protein, 841 aa, synthetic construct; identical to SEQ ID NO: 3808
  REGION 1..841: note = Variant of DNA polymerase I from Thermus sp. strain 2.9

SEQ ID NO: 4141 - DNA, 2523 bp, synthetic construct
  misc_feature 1..2523: note = Variant of DNA polymerase I from Thermus sp. strain 2.9
  source 1..2523: mol_type = other DNA
atgcaccatcatcatcatcatggcggtagcggcgtgttaccggtgttcgagcctaaaggtcgcgtgcttctggttgatggccatcatctcgcgtatcgtaacttctttgccctgaaaggattaaccaccagcagcggcgagccggtacagggtgtctacggctttgcaaagtcgctcctgaaagctctgaaagaagacggtgatgtggtgattgttgtctttgatgcgaaagcgccaagttttcgccacgaagcgtacgaagcttacaaagccgggcgtgctccaacgccggaaccttttcctcgccaattggcgcttatgaaggaattagtggatttgcttggcctcgaacgcttggaagttcccggtttcgaggcagacgacgtattagcgactctcgcaaagaaagccgaacgtgagggctatgaagtccagatcttgacagcagatcgcgatcttttccagcttttatctccgcgcatctcggtgttacacccggaagggcatcgtatcaccccggaatggctctgggagaaatatggtttgcgtcccgaacaatgggtggattttcgcgccttagcaggcgatccgagcgacaatattccgggagttaaaggtatcggcgagaagacggcgctcaagctccttaaagaatgggggtcgttggagaacttgcttaagaatttagatcaggtcaaaccagagtcagtgcgtgagaagattcttgctcacctcgaagacctcaaattaagccgcgaattgtcccgtgtacgcaccgatttgccgctcgaagttgatttccaacgccgccgcgaacctgactgggagggtcttaaagcgtttttagagcgtcttgaatttggttcgctcttgcatgaattcggccttttagaaagcccgttaccagccgaagaagcaccttggccaccgcccgagggcgcgtttttaggttaccgtttgagtcgcccggaaccgatgtgggccgaattactggctcttgcagcgtctgcccagggacgtgtgtatcgcgcggaagaccctcatggtgcgctccgcggcctcttcgaagtccgtggactccttgccaaagacttagctgttgttgcattgcgcgaaggtcttgatttacctccgactgatgatccaatgcttcttgcgtacctcttggacccgtcaaacacgacgcccgaaggcgtagcccgtcgttacggcggcgagtggaccgaagatgcagcgaaacgcgcgttattggccgaacgtttgcacgccaatttattaggacgtttgcaaggcgaggaacgtctcctctggctttacgaagaagtggagaaaccattgagtcgcgtgctcgcgcatatggaagctaccggtgtcaaattagacgtggcgtatttggagaatctcagccttgaagttgctgcccacatgcgccgcttggaggaagaagtattccgtttagcaggccgttcctttcgccttaattctcgcgatcagttagaacgtgtgttgttcgatgaacttggtctccctcctatcggcaagacagagaagaccggtaaacgtagcacttcagcggcggttttagaagctcttcgcgaagtccatcccattgtggacaagatcttgcaataccgcgaactcgcgaaattgaaaggcacctatattgaccgtcttccggcattagtccacccgaaaacgggacgcctccatacccgcttcaaccaaacagccacggcgaccggtcgtttgtcctcctctgatccaaaccttcagaatattccagtacgtaccccattgggccagaagatccgccgtgcgtttgtagctgaggagggttggcgtttagtggccctcgattatagccaaattgaattacgtgtccttgcccatctttctggcgatgagaacctcatccgcgtgtttcaggaaggcaaagacattcacactcaaacggcaagctggatgtttggattatcagctgaagcgatcgatcctttgatgcgtcgtgcagcgaagaccatcaatttcggtgttctctacggtatgagtgcctttcgtttgtcgcaggaattaggcattccctatgaagaagctcaggcgttcattcagaaatactttcaaagctatcccaaagttaaagcatggatcgagaagactctcgaagaaggccgcacacgtggttacgtagagaccttatttggacgtcgccgctatgttcccgatttaaacgctcgcgtgaaaggcaagcgtgaagccgccgaacgcatggcgttcaacatgcctgtacagggcacggcagctgacctcatgaaacttgcaatggtgcgcctttttccacaattgcgtgaagttggtgcccgcatgctcttgcaggtccacgatgaactcttgttagaagcgccaaaagagcgtgcggaagaggtggcagccctcgcgaaagaagttatggaaggcgtgtggcccttagcggtgcctcttgaagtcgaagttggtattggcgaggattggctggctgccaaagga

SEQ ID NO: 4142 - protein, 841 aa, synthetic construct
  REGION 1..841: note = Variant of DNA polymerase I from Thermus sp. strain 2.9
MHHHHHHGGSGVLPVFEPKGRVLLVDGHHLAYRNFFALKGLTTSSGEPVQGVYGFAKSLLKALKEDGDVVIVVFDAKAPSFRHEAYEAYKAGRAPTPEPFPRQLALMKELVDLLGLERLEVPGFEADDVLATLAKKAEREGYEVQILTADRDLFQLLSPRISVLHPEGHRITPEWLWEKYGLRPEQWVDFRALAGDPSDNIPGVKGIGEKTALKLLKEWGSLENLLKNLDQVKPESVREKILAHLEDLKLSRELSRVRTDLPLEVDFQRRREPDWEGLKAFLERLEFGSLLHEFGLLESPLPAEEAPWPPPEGAFLGYRLSRPEPMWAELLALAASAQGRVYRAEDPHGALRGLFEVRGLLAKDLAVVALREGLDLPPTDDPMLLAYLLDPSNTTPEGVARRYGGEWTEDAAKRALLAERLHANLLGRLQGEERLLWLYEEVEKPLSRVLAHMEATGVKLDVAYLENLSLEVAAHMRRLEEEVFRLAGRSFRLNSRDQLERVLFDELGLPPIGKTEKTGKRSTSAAVLEALREVHPIVDKILQYRELAKLKGTYIDRLPALVHPKTGRLHTRFNQTATATGRLSSSDPNLQNIPVRTPLGQKIRRAFVAEEGWRLVALDYSQIELRVLAHLSGDENLIRVFQEGKDIHTQTASWMFGLSAEAIDPLMRRAAKTINFGVLYGMSAFRLSQELGIPYEEAQAFIQKYFQSYPKVKAWIEKTLEEGRTRGYVETLFGRRRYVPDLNARVKGKREAAERMAFNMPVQGTAADLMKLAMVRLFPQLREVGARMLLQVHDELLLEAPKERAEEVAALAKEVMEGVWPLAVPLEVEVGIGEDWLAAKG

SEQ ID NO: 4143 - DNA, 2523 bp, synthetic construct; identical to SEQ ID NO: 4121
  misc_feature 1..2523: note = Variant of DNA polymerase I from Thermus sp. strain 2.9
  source 1..2523: mol_type = other DNA

SEQ ID NO: 4144 - protein, 841 aa, synthetic construct; identical to SEQ ID NO: 4122
  REGION 1..841: note = Variant of DNA polymerase I from Thermus sp. strain 2.9

SEQ ID NO: 4145 - DNA, 2523 bp, synthetic construct
  misc_feature 1..2523: note = Variant of DNA polymerase I from Thermus sp. strain 2.9
  source 1..2523: mol_type = other DNA
atgcaccatcatcatcatcatggcggtagcggcgtgttaccggtgttcgagcctaaaggtcgcgtgcttctggttgatggccatcatctcgcgtatcgtaacttctttgccctgaaaggattaaccaccagcagtggcgagccggtacagggtgtctacggctttgcaaagtcgctcctgaaagctctgaaagaagacggtgatgtggtgattgttgtctttgatgcgaaagcgccaagttttcgccacgaagcgtacgaagcttacaaagccgggcgtgctccaacgccggaagactttcctcgccaattggcgcttatgaaggaattagtggatttgcttggcctcgaacgcttggaagttcccggtttcgaggcagacgacgtattagcgactctcgcaaagaaagccgaacgtgagggctatgaagtccagatcttgacagcagatcgcgatcttttccagcttttatctccgcgcatctcggtgttacacccggaagggcatcgtatcaccccggaatggctctgggagaaatatggtttgcgtcccgaacaatgggtggattttcgcgccttagcaggcgatccgagcgacaatattccgggagttaaaggtatcggcgagaagacggcgctcaagctccttaaagaatgggggtcgttggagaacttgcttaagaatttagatcaggtcaaaccagagtcagtgcgtgagaagattcttgctcacctcgaagacctcaaattaagccgcgaattgtcccgtgtacgcaccgatttgccgctcgaagttgatttccaacgccgccgcgaacctgactgggagggtcttaaagcgtttttagagcgtcttgaatttggttcgctcttgcatgaattcggccttttagaaagcccgttagtcgccgaagaagcaccttggccaccgcccgagggcgcgtttttaggttaccgtttgagtcgcccggaaccgatgtgggccgaattactggctcttgcagcgtctgcccagggacgtgtgtatcgcgcggaagaccctcatggtgcgctccgcggcctcttcgaagtccgtggactccttgccaaagacttagctgttgttgcattgcgcgaaggtcttgatttacctccgactgatgatccaatgcttcttgcgtacctcttggacccgtcaaacacgacgcccgaaggcgtagcccgtcgttacggcggcgagtggaccgaagatgcagcgaaacgcgcgttattggccgaacgtttgcacgcaaatttattaggacgtttgcaaggcgaggaacgtctcctctggctttacgaagaagtggagaaaccattgagtcgcgtgctcggccatatggaagctaccggtgtcaaattagacgtggcgtatttggagaatctcagccttgaagttgctgcccacatgcgccgcttggaggaagaagtattccgtttagcaggccgttcctttcgccttagctctcgcgatcagttagaacgtgtgttgttcgatgaacttggtctccctcctatcggcaagacagagaagaccggtaaacgtagcacttcagctgcggttttagaggctcttcgcgaagtccatcccattgtggacaagatcttgcagtaccgcgaactcgcgaaattgaaaggcacctatattgaccgtcttccggcattagtccacccgaaaacgggacgcctccatacccgcttcaaccaaacagccacggcgaccggtcgtttgtcctcctctgatccaaaccttcagaatattccagtacgtaccccattgggccagaagatccgccgtgcgtttgtagctgaggagggttggcgtttagtggccctcgattatagtcaaattgaattacgtgtccttgcccatctttctggcgatgagaacctcatccgcgtgtttcaggaaggcaaagacattcacactcaaacggcaagctggatgtttggattatcagctgaagcgatcgatcctttgatgcgtcgtgcagcgaagaccatcaatttcggtgttctctacggtatgagtgcctttcgtttgtcgcaggaattaggcattccctatgaagaagctcaggcgttcattcagaaatactttcaaagctatcccaaagttaaagcatggatcgagaagactctcgaagaaggccgcacacgtggttacgtagagaccttatttggacgtcgccgctatgttcccgatttaaacgctcgcgtgaaaggcaagcgtgaagccgccgaacgcatggcgttcaacatgcctgtacagggcacggcagctgacctcatgaaacttgcaatggtgcgcctttttccacaattgcgtgaagttggtgcccgcatgctcttgcaggtccacgatgaactcttgttagaagcgccaaaagagcgtgcggaagaggtggcagccctcgcgaaagaagttatggaaggcgtgtggcccttagcggtgcctcttgaagtcgaagttggtattggcgaggattggctggctgccaaagga

SEQ ID NO: 4146 - protein, 841 aa, synthetic construct
  REGION 1..841: note = Variant of DNA polymerase I from Thermus sp. strain 2.9
MHHHHHHGGSGVLPVFEPKGRVLLVDGHHLAYRNFFALKGLTTSSGEPVQGVYGFAKSLLKALKEDGDVVIVVFDAKAPSFRHEAYEAYKAGRAPTPEDFPRQLALMKELVDLLGLERLEVPGFEADDVLATLAKKAEREGYEVQILTADRDLFQLLSPRISVLHPEGHRITPEWLWEKYGLRPEQWVDFRALAGDPSDNIPGVKGIGEKTALKLLKEWGSLENLLKNLDQVKPESVREKILAHLEDLKLSRELSRVRTDLPLEVDFQRRREPDWEGLKAFLERLEFGSLLHEFGLLESPLVAEEAPWPPPEGAFLGYRLSRPEPMWAELLALAASAQGRVYRAEDPHGALRGLFEVRGLLAKDLAVVALREGLDLPPTDDPMLLAYLLDPSNTTPEGVARRYGGEWTEDAAKRALLAERLHANLLGRLQGEERLLWLYEEVEKPLSRVLGHMEATGVKLDVAYLENLSLEVAAHMRRLEEEVFRLAGRSFRLSSRDQLERVLFDELGLPPIGKTEKTGKRSTSAAVLEALREVHPIVDKILQYRELAKLKGTYIDRLPALVHPKTGRLHTRFNQTATATGRLSSSDPNLQNIPVRTPLGQKIRRAFVAEEGWRLVALDYSQIELRVLAHLSGDENLIRVFQEGKDIHTQTASWMFGLSAEAIDPLMRRAAKTINFGVLYGMSAFRLSQELGIPYEEAQAFIQKYFQSYPKVKAWIEKTLEEGRTRGYVETLFGRRRYVPDLNARVKGKREAAERMAFNMPVQGTAADLMKLAMVRLFPQLREVGARMLLQVHDELLLEAPKERAEEVAALAKEVMEGVWPLAVPLEVEVGIGEDWLAAKG

SEQ ID NO: 4147 - DNA, 2523 bp, synthetic construct
  misc_feature 1..2523: note = Variant of DNA polymerase I from Thermus sp. strain 2.9
  source 1..2523: mol_type = other DNA
atgcaccatcatcatcatcatggcggtagcggcgtgttaccggtgttcgagcctaaaggtcgcgtgcttctggttgatggccatcatctcgcgtatcgtaacttctttgccctgaaaggattaaccaccagcagcggcgagccggtacagggtgtcgctggctttgcaaagtcgctcctgaaagctctgaaagaagacggtgatgtggtgattgttgtctttgatgcgaaagcgccaagttttcgccacgaagcgtacgaagcttacaaagccgggcgtgctccaacgccggaagactttcctcgccaattggcgcttatgaaggaattagtggatttgcttggcctcgaacgcttggaagttcccggtttcgaggcagacgacgtattagcgactctcgcaaagaaagccgaacgtgagggctatgaagtccagatcttgacagcagatcgcgatcttttccagcttttatctccgcgcatctcggtgttacacccggaagggcatcgtatcaccccggaatggctctgggagaaatatggtttgcgtcccgaacaatgggtggattttcgcgccttagcaggcgatccgagcgacaatattccgggagttaaaggtatcggcgagaagacggcgctcaagctccttaaagaatgggggtcgttggagaacttgcttaagaatttagatcaggtcaaaccagagtcagtgcgtgagaagattcttgctcacctcgaagacctcaaattaagccgcgaattgtcccgtgtacgcaccgatttgccgctcgaagttgatttccaacgccgccgcgaacctgactgggagggtcttaaagcgtttttagagcgtcttgaatttggttcgctcttgcatgaattcggccttttagaaagcccgttaccagccgaagaagcaccttggccaccgcccgagggcgcgtttttaggttaccgtttgagtcgcccggaaccgatgtgggccgaattactggctcttgcagcgtctgcccagggacgtgtgtatcgcgcggaagaccctcatggtgcgctccgcggcctcttcgaagtccgtggactccttgccaaagacttagctgttgttgcattgcgcgaaggtcttgatttacctccgactgatgatccaatgcttcttgcgtacctcttggacccgtcaaacacgacgcccgaaggcgtagcccgtcgttacggcggcgagtggaccgaagatgcagcgaaacgcgcgttattggccgaacgtttgcacgccaatttattaggacgtttgcaaggcgaggaacgtctcctctggctttacgaagaagtggagaaaccattgagtcgcgtgctcgcgcatatggaagctaccggtgtcaaattagacgtggcgtatttggagaatctcagccttgaagttgctgcccacatgcgccgcttggaggaagaagtattccgtttagcaggccgttcctttcgccttaattctcgcgatcagttagaacgtgtgttgttcgatgaacttggtctccctcctatcggcaagacagagaagaccggtaaacgtagcacttcagcggcggttttagaagctcttcgcgaagtccatcccattgtggacaagatcttgcaataccgcgaactcgcgaaattgaaaggcacctatattgaccgtcttccggcattagtccacccgaaaacgggacgcctccatacccgcttcaaccaaacagccacggcgaccggtcgtttgtcctcctctgatccaaaccttcagaatattccagtacgtaccccattgggccagaagatccgccgtgcgtttgtagctgaggagggttggcgtttagtggccctcgattatagccaaattgaattacgtgtccttgcccatctttctggcgatgagaacctcatccgcgtgtttcaggaaggcaaagacattcacactcaaacggcaagctggatgtttggattatcagctgaagcgatcgatcctttgatgcgtcgtgcagcgaagaccatcaatttcggtgttctctacggtatgagtgcctttcgtttgtcgcaggaattaggcattccctatgaagaagctcaggcgttcattcagaaatactttcaaagctatcccaaagttaaagcatggatcgagaagactctcgaagaaggccgcacacgtggttacgtagagaccttatttggacgtcgccgctatgttcccgatttaaacgctcgcgtgaaaggcaagcgtgaagccgccgaacgcatggcgttcaacatgcctgtacagggcacggcagctgacctcatgaaacttgcaatggtgcgcctttttccacaattgcgtgaagttggtgcccgcatgctcttgcaggtccacgatgaactcttgttagaagcgccaaaagagcgtgcggaagaggtggcagccctcgcgaaagaagttatggaaggcgtgtggcccttagcggtgcctcttgaagtcgaagttggtattggcgaggattggctggctgccaaagga

SEQ ID NO: 4148 - protein, 841 aa, synthetic construct
  REGION 1..841: note = Variant of DNA polymerase I from Thermus sp. strain 2.9
MHHHHHHGGSGVLPVFEPKGRVLLVDGHHLAYRNFFALKGLTTSSGEPVQGVAGFAKSLLKALKEDGDVVIVVFDAKAPSFRHEAYEAYKAGRAPTPEDFPRQLALMKELVDLLGLERLEVPGFEADDVLATLAKKAEREGYEVQILTADRDLFQLLSPRISVLHPEGHRITPEWLWEKYGLRPEQWVDFRALAGDPSDNIPGVKGIGEKTALKLLKEWGSLENLLKNLDQVKPESVREKILAHLEDLKLSRELSRVRTDLPLEVDFQRRREPDWEGLKAFLERLEFGSLLHEFGLLESPLPAEEAPWPPPEGAFLGYRLSRPEPMWAELLALAASAQGRVYRAEDPHGALRGLFEVRGLLAKDLAVVALREGLDLPPTDDPMLLAYLLDPSNTTPEGVARRYGGEWTEDAAKRALLAERLHANLLGRLQGEERLLWLYEEVEKPLSRVLAHMEATGVKLDVAYLENLSLEVAAHMRRLEEEVFRLAGRSFRLNSRDQLERVLFDELGLPPIGKTEKTGKRSTSAAVLEALREVHPIVDKILQYRELAKLKGTYIDRLPALVHPKTGRLHTRFNQTATATGRLSSSDPNLQNIPVRTPLGQKIRRAFVAEEGWRLVALDYSQIELRVLAHLSGDENLIRVFQEGKDIHTQTASWMFGLSAEAIDPLMRRAAKTINFGVLYGMSAFRLSQELGIPYEEAQAFIQKYFQSYPKVKAWIEKTLEEGRTRGYVETLFGRRRYVPDLNARVKGKREAAERMAFNMPVQGTAADLMKLAMVRLFPQLREVGARMLLQVHDELLLEAPKERAEEVAALAKEVMEGVWPLAVPLEVEVGIGEDWLAAKG

SEQ ID NO: 4149 - DNA, 2523 bp, synthetic construct
  misc_feature 1..2523: note = Variant of DNA polymerase I from Thermus sp. strain 2.9
  source 1..2523: mol_type = other DNA
atgcaccatcatcatcatcatggcggtagcggcgtgttaccggtgttcgagcctaaaggtcgcgtgcttctggttgatggccatcatctcgcgtatcgtaacttctttgccctgaaaggattaaccaccagcctgggcgagccggtacagggtgtctacggctttgcaaagtcgctcctgaaagctctgaaagaagacggtgatgtggtgattgttgtctttgatgcgaaagcgccaagttttcgccacgaagcgtacgaagcttacaaagccgggcgtgctccaacgccggaagactttcctcgccaattggcgcttatgaaggaattagtggatttgcttggcctcgaacgcttggaagttcccggtttcgaggcagacgacgtattagcgactctcgcaaagaaagccgaacgtgagggctatgaagtccagatcttgacagcagatcgcgatcttttccagcttttatctccgcgcatctcggtgttacacccggaagggcatcgtatcaccccggaatggctctgggagaaatatggtttgcgtcccgaacaatgggtggattttcgcgccttagcaggcgatccgagcgacaatattccgggagttaaaggtatcggcgagaagacggcgctcaagctccttaaagaatgggggtcgttggagaacttgcttaagaatttagatcaggtcaaaccagagtcagtgcgtgagaagattcttgctcacctcgaagacctcaaattaagccgcgaattgtcccgtgtacgcaccgatttgccgctcgaagttgatttccaacgccgccgcgaacctgactgggagggtcttaaagcgtttttagagcgtcttgaatttggttcgctcttgcatgaattcggccttttagaaagcccgttaccagccgaagaagcaccttggccaccgcccgagggcgcgtttttaggttaccgtttgagtcgcccggaaccgatgtgggccgaattactggctcttgcagcgtctgcccagggacgtgtgtatcgcgcggaagaccctcatggtgcgctccgcggcctcttcgaagtccgtggactccttgccaaagacttagctgttgttgcattgcgcgaaggtcttgatttacctccgactgatgatccaatgcttcttgcgtacctcttggacccgtcaaacacgacgcccgaaggcgtagcccgtcgttacggcggcgagtggaccgaagatgcagcgaaacgcgcgttattggccgaacgtttgcacgaaaatttattaggacgtttgcaaggcgaggaacgtctcctctggctttacgaagaagtggagaaaccattgagtcgcgtgctcgcgcatatggaagctaccggtgtcaaattagacgtggcgtatttggagaatctcagccttgaagttgctgcccacatgcgccgcttggaggaagaagtattccgtttagcaggccgttcctttcgccttaattctcgcgatcagttagaacgtgtgttgttcgatgaacttggtctccctcctatcggcaagacagagaagaccggtaaacgtagcacttcagcggcggttttagaagctcttcgcgaagtccatcccattgtggacaagatcttgcaataccgcgaactcgcgaaattgaaaggcacctatattgaccgtcttccggcattagtccacccgaaaacgggacgcctccatacccgcttcaaccaaacagccacggcgaccggtcgtttgtcctcctctgatccaaaccttcagaatattccagtacgtaccccattgggccagaagatccgccgtgcgtttgtagctgaggagggttggcgtttagtggccctcgattatagtcaaattgaattacgtgtccttgcccatctttctggcgatgagaacctcatccgcgtgtttcaggaaggcaaagacattcacactcaaacggcaagctggatgtttggattatcagctgaagcgatcgatcctttgatgcgtcgtgcagcgaagaccatcaatttcggtgttctctacggtatgagtgcctttcgtttgtcgcaggaattaggcattccctatgaagaagctcaggcgttcattcagaaatactttcaaagctatcccaaagttaaagcatggatcgagaagactctcgaagaaggccgcacacgtggttacgtagagaccttatttggacgtcgccgctatgttcccgatttaaacgctcgcgtgaaaggcaagcgtgaagccgccgaacgcatggcgttcaacatgcctgtacagggcacggcagctgacctcatgaaacttgcaatggtgcgcctttttccacaattgcgtgaagttggtgcccgcatgctcttgcaggtccacgatgaactcttgttagaagcgccaaaagagcgtgcggaagaggtggcagccctcgcgaaagaagttatggaaggcgtgtggcccttagcggtgcctcttgaagtcgaagttggtattggcgaggattggctggctgccaaagga

SEQ ID NO: 4150 - protein, 841 aa, synthetic construct; identical to SEQ ID NO: 4138
  REGION 1..841: note = Variant of DNA polymerase I from Thermus sp. strain 2.9

SEQ ID NO: 4151 - DNA, 2523 bp, synthetic construct
  misc_feature 1..2523: note = Variant of DNA polymerase I from Thermus sp. strain 2.9
  source 1..2523: mol_type = other DNA
atgcaccatcatcatcatcatggcggtagcggcgtgttaccggtgttcgagcataaaggtcgcgtgcttctggttgatggccatcatctcgcgtatcgtaacttctttgccctgaaaggattaaccaccagcagcggcgagccggtacagggtgtctacggctttgcaaagtcgctcctgaaagctctgaaagaagacggtgatgtggtgattgttgtctttgatgcgaaagcgccaagttttcgccacgaagcgtacgaagcttacaaagccgggcgtgctccaacgccggaagactttcctcgccaattggcgcttatgaaggaattagtggatttgcttggcctcgaacgcttggaagttcccggtttcgaggcagacgacgtattagcgactctcgcaaagaaagccgaacgtgagggctatgaagtccagatcttgacagcagatcgcgatcttttccagcttttatctccgcgcatctcggtgttacacccggaagggcatcgtatcaccccggaatggctctgggagaaatatggtttgcgtcccgaacaatgggtggattttcgcgccttagcaggcgatccgagcgacaatattccgggagttaaaggtatcggcgagaagacggcgctcaagctccttaaagaatgggggtcgttggagaacttgcttaagaatttagatcaggtcaaaccagagtcagtgcgtgagaagattcttgctcacctcgaagacctcaaattaagccgcgaattgtcccgtgtacgcaccgatttgccgctcgaagttgatttccaacgccgccgcgaacctgactgggagggtcttaaagcgtttttagagcgtcttgaatttggttcgctcctgcatgaattcggccttttagaaagcccgttaccagccgaagaagcaccttggccaccgcccgagggcgcgtttttaggttaccgtttgagtcgcccggaaccgatgtgggccgaattactggctcttgcagcgtctgcccagggacgtgtgtatcgcgcggaagaccctcatggtgcgctccgcggcctcttcgaagtccgtggactccttgccaaagacttagctgttgttgcattgcgcgaaggtcttgatttacctccgactgatgatccaatgcttcttgcgtacctcttggacccgtcaaacacgacgcccgaaggcgtagcccgtcgttacggcggcgagtggaccgaagatgcagcgaaacgcgcgttattggccgaacgtttgcacgccaatttattaggacgtttgcaaggcgaggaacgtctcctctggctttacgaagaagtggagaaaccattgagtcgcgtgctcgcgcatatggaagctaccggtgtcaaattagacgtggcgtatttggagaatctcagccttgaagttgctgcccacatgcgccgcttggaggaagaagtagtccgtttagcaggccgttcctttcgccttaattctcgcgatcagttagaacgtgtgttgttcgatgaacttggtctccctcctatcggcaagacagagaagaccggtaaacgtagcacttcagcggcggttttagaagctcttcgcgaagtccatcccattgtggacaagatcttgcaataccgcgaactcgcgaaattgaaaggcacctatattgaccgtcttccggcattagtccacccgaaaacgggacgcctccatacccgcttcaaccaaacagccacggcgaccggtcgtttgtcctcctctgatccaaaccttcagaatattccagtacgtaccccattgggccagaagatccgccgtgcgtttgtagctgaggagggttggcgtttagtggccctcgattatagccaaattgaattacgtgtccttgcccatctttctggcgatgagaacctcatccgcgtgtttcaggaaggcaaagacattcacactcaaacggcaagctggatgtttggattatcagctgaagcgatcgatcctttgatgcgtcgtgcagcgaagaagatcaatttcggtgttctctacggtatgagtgcctttcgtttgtcgcaggaattaggcattccctatgaagaagctcaggcgttcattcagaaatactttcaaagctatcccaaagttaaagcatggatcgagaagactctcgaagaaggccgcacacgtggttacgtagagaccttatttggacgtcgccgctatgttcccgatttaaacgctcgcgtgaaaggcaagcgtgaagccgccgaacgcatggcgttcaacatgcctgtacagggcacggcagctgacctcatgaaacttgcaatggtgcgcctttttccacaattgcgtgaagttggtgcccgcatgctcttgcaggtccacgatgaactcttgttagaagcgccaaaagagcgtgcggaagaggtggcagccctcgcgaaagaagttatggaaggcgtgtggcccttagcggtgcctcttgaagtcgaagttggtattggcgaggattggctggctgccaaagga

SEQ ID NO: 4152 - protein, 841 aa, synthetic construct
  REGION 1..841: note = Variant of DNA polymerase I from Thermus sp. strain 2.9
MHHHHHHGGSGVLPVFEHKGRVLLVDGHHLAYRNFFALKGLTTSSGEPVQGVYGFAKSLLKALKEDGDVVIVVFDAKAPSFRHEAYEAYKAGRAPTPEDFPRQLALMKELVDLLGLERLEVPGFEADDVLATLAKKAEREGYEVQILTADRDLFQLLSPRISVLHPEGHRITPEWLWEKYGLRPEQWVDFRALAGDPSDNIPGVKGIGEKTALKLLKEWGSLENLLKNLDQVKPESVREKILAHLEDLKLSRELSRVRTDLPLEVDFQRRREPDWEGLKAFLERLEFGSLLHEFGLLESPLPAEEAPWPPPEGAFLGYRLSRPEPMWAELLALAASAQGRVYRAEDPHGALRGLFEVRGLLAKDLAVVALREGLDLPPTDDPMLLAYLLDPSNTTPEGVARRYGGEWTEDAAKRALLAERLHANLLGRLQGEERLLWLYEEVEKPLSRVLAHMEATGVKLDVAYLENLSLEVAAHMRRLEEEVVRLAGRSFRLNSRDQLERVLFDELGLPPIGKTEKTGKRSTSAAVLEALREVHPIVDKILQYRELAKLKGTYIDRLPALVHPKTGRLHTRFNQTATATGRLSSSDPNLQNIPVRTPLGQKIRRAFVAEEGWRLVALDYSQIELRVLAHLSGDENLIRVFQEGKDIHTQTASWMFGLSAEAIDPLMRRAAKKINFGVLYGMSAFRLSQELGIPYEEAQAFIQKYFQSYPKVKAWIEKTLEEGRTRGYVETLFGRRRYVPDLNARVKGKREAAERMAFNMPVQGTAADLMKLAMVRLFPQLREVGARMLLQVHDELLLEAPKERAEEVAALAKEVMEGVWPLAVPLEVEVGIGEDWLAAKG

SEQ ID NO: 4153 - DNA, 2523 bp, synthetic construct
  misc_feature 1..2523: note = Variant of DNA polymerase I from Thermus sp. strain 2.9
  source 1..2523: mol_type = other DNA
atgcaccatcatcatcatcatggcggtagcggcgtgttacctgtgttcgagcctaaaggtcgcgtgcttctggttgatggccatcatctcgcgtatcgtaacttctttgccctgaaaggattaaccaccagcagcggcgagccggtacagggtgtctacggctttgcaaagtcgctcctgaaagctctgaaagaagacggtgatgtggtgattgttgtctttgatgcgaaagcgccaagttttcgccacgaagcgtacgaagcttacaaagccgggcgtgctgatacgccggaagactttcctcgccaattggcgcttatgaaggaattagtggatttgcttggcctcgaacgcttggaagttcccggtttcgaggcagacgacgtattagcgactctcgcaaagaaagccgaacgtgagggctatgaagtccagatcttgacagcagatcgcgatcttttccagcttttatctccgcgcatctcggtgttacacccggaagggcatcgtatcaccccggaatggctctgggagaaatatggtttgcgtcccgaacaatgggtggattttcgcgccttagcaggcgatccgagcgacaatattccgggagttaaaggtatcggcgagaagacggcgctcaagctccttaaagaatgggggtcgttggagaacttgcttaagaatttagatcaggtcaaaccagagtcagtgcgtgagaagattcttgctcacctcgaagacctcgagttaagccgcgaattgtcccgtgtacgcaccgatttgccgctcgaagttgatttccaacgccgccgcgaacctgactgggagggtcttaaagcgtttttagagcgtcttgaatttggttcgctcttgcatgaattcggccttttagaaagcccgttaccagccgaagaagcaccttggccaccgcccgagggcgcgtttttaggttaccgtttgagtcgcccggaaccgatgtgggccgaattactggctcttgcagcgtctgcccagggacgtgtgtatcgcgcggaagaccctcatggtgcgctccgcggcctcttcgaagtccgtggactccttgccaaagacttagctgttgttgcattgcgcgaaggtcttgatttacctccgactgatgatccaatgcttcttgcgtacctcttggacccgtcaaacacgacgcctgaaggcgtagcccgtcgttacggcggcgagtggaccgaagatgcagcgaaacgcgcgttattggccgaacgtttgcacgccaatttattaggacgtttgcaaggcgagaagcgtctcctctggctttacgaagaagtggagaaaccattgagtcgcgtgctcgcgcatatggaagctaccggtgtcaaattagacgtggcgtatttggagaatctcagccttgaagttgctgcccacatgcgccgcttggaggaagaagtattccgtttagcaggccgttcctttcgccttaattctcgcgatcagttagaacgtgtgttgttcgatgaacttggtctccctcctatcggcaagacagagaagaccggtaaacgtagcacttcagcggcggttttagaagctcttcgcgaagtccatcccattgtggacaagatcttgcaataccgcgaactcgcgaaattgaaaggcacctatattgaccgtcttccggcattagtccacccgaaaacgggacgcctccatacccgcttcaaccaaacagccacggcgaccggtcgtttgtcctcctctgatccaaaccttcagaatattccagtacgtaccccgttgggccagaagatccgccgtgcgtttgtagctgaggagggttggcgtttagtggccctcgattatagccaaattgaattacgtgtccttgcccatctttctggcgatgagaacctcatccgcgtgtttgaggaaggcaaagacattcacactcaaacggcaagctggatgtttggattatcagctgaagcgatcgatcctttgatgcgtcgtgcagcgaagaccatcaatttcggtgttctctacggtatgagtgcctttcgtttgtcgcaggaattaggcattccctacgaagaagctcaggcgttcattcagaaatactttcaaagctatcccaaagttaaagcatggatcgagaagactctcgaagaaggccgcacccgtggttacgtagagaccttatttggacgtcgccgctatgttcccgatttaaacgctcgcgtgaaaggcaagcgtgaagccgccgaacgcatggcgttcaacatgcctgtacagggcacggcagctgacctcatgaaacttgcaatggtgcgcctttttccacaattgcgtgaagttggtgcccgcatgctcttgcaggtccacgatgaactcttgttagaagcgccaaaagagcgtgcggaagaggtggcagccctcgcgaaagaagttatggaaggcgtgtggcccttagcggtgcctcttgaagtcgaagttggtattggcgaggattggctggctgccaaagga

SEQ ID NO: 4154 - protein, 841 aa, synthetic construct
  REGION 1..841: note = Variant of DNA polymerase I from Thermus sp. strain 2.9
MHHHHHHGGSGVLPVFEPKGRVLLVDGHHLAYRNFFALKGLTTSSGEPVQGVYGFAKSLLKALKEDGDVVIVVFDAKAPSFRHEAYEAYKAGRADTPEDFPRQLALMKELVDLLGLERLEVPGFEADDVLATLAKKAEREGYEVQILTADRDLFQLLSPRISVLHPEGHRITPEWLWEKYGLRPEQWVDFRALAGDPSDNIPGVKGIGEKTALKLLKEWGSLENLLKNLDQVKPESVREKILAHLEDLELSRELSRVRTDLPLEVDFQRRREPDWEGLKAFLERLEFGSLLHEFGLLESPLPAEEAPWPPPEGAFLGYRLSRPEPMWAELLALAASAQGRVYRAEDPHGALRGLFEVRGLLAKDLAVVALREGLDLPPTDDPMLLAYLLDPSNTTPEGVARRYGGEWTEDAAKRALLAERLHANLLGRLQGEKRLLWLYEEVEKPLSRVLAHMEATGVKLDVAYLENLSLEVAAHMRRLEEEVFRLAGRSFRLNSRDQLERVLFDELGLPPIGKTEKTGKRSTSAAVLEALREVHPIVDKILQYRELAKLKGTYIDRLPALVHPKTGRLHTRFNQTATATGRLSSSDPNLQNIPVRTPLGQKIRRAFVAEEGWRLVALDYSQIELRVLAHLSGDENLIRVFEEGKDIHTQTASWMFGLSAEAIDPLMRRAAKTINFGVLYGMSAFRLSQELGIPYEEAQAFIQKYFQSYPKVKAWIEKTLEEGRTRGYVETLFGRRRYVPDLNARVKGKREAAERMAFNMPVQGTAADLMKLAMVRLFPQLREVGARMLLQVHDELLLEAPKERAEEVAALAKEVMEGVWPLAVPLEVEVGIGEDWLAAKG

SEQ ID NO: 4155 - DNA, 2523 bp, synthetic construct
  misc_feature 1..2523: note = Variant of DNA polymerase I from Thermus sp. strain 2.9
  source 1..2523: mol_type = other DNA
atgcaccatcatcatcatcatggcggtagcggcgtgttaccggtgttcgagcataaaggtcgcgtgcttctggttgatggccatcatctcgcgtatcgtaacttctttgccctgaaaggattaaccaccagcagcggcgagccggtacagggtgtctacggctttgcaaagtcgctcctgaaagctctgaaagaagacggtgatgtggtgattgttgtctttgatgcgaaagcgccaagttttcgccacgaagcgtacgaagcttacaaagccgggcgtgctccaacgccggaagactttcctcgccaattggcgcttatgaaggaattagtggatttgcttggcctcgaacgcttggaagttcccggtttcgaggcagacgacgtattagcgactctcgcaaagaaagccgaacgtgagggctatgaagtccagatcttgacagcagatcgcgatcttttccagcttttatctccgcgcatctcggtgttacacccggaagggcatcgtatcaccccggaatggctctgggagaaatatggtttgcgtcccgaacaatgggtggattttcgcgccttagcaggcgatccgagcgacaatattccgggagttaaaggtatcggcgagaagacggcgctcaagctccttaaagaatgggggtcgttggagaacttgcttaagaatttagatcaggtcaaaccagagtcagtgcgtgagaagattcttgctcacctcgaagacctcaaattaagccgcgaattgtcccgtgtacgcaccgatttgccgctcgaagttgatttccaacgccgccgcgaacctgactgggagggtcttaaagcgtttttagagcgtcttgaatttggttcgctcctgcatgaattcggccttttagaaagcccgttaccagccgaagaagcaccttggccaccgcccgagggcgcgtttttaggttaccgtttgagtcgcccggaaccgatgtgggccgaattactggctcttgcagcgtctgcccagggacgtgtgtatcgcgcggaagaccctcatggtgcgctccgcggcctcttcgaagtccgtggactccttgccaaagacttagctgttgttgcattgcgcgaaggtcttgatttacctccgactgatgatccaatgcttcttgcgtacctcttggacccgtcaaacacgacgcccgaaggcgtagcccgtcgttacggcggcgagtggaccgaagatgcagcgaaacgcgcgttattggccgaacgtttgcacgccaatttattaggacgtttgcaaggcgaggaacgtctcctctggctttacgaagaagtggagaaaccattgagtcgcgtgctcgcgcatatggaagctaccggtgtcaaattagacgtggcgtatttggagaatctcagccttgaagttgctgcccacatgcgccgcttggaggaagaagtattccgtttagcaggccgttcctttcgccttaattctcgcgatcagttagaacgtgtgttgttcgatgaacttggtctccctcctatcggcaagacagagaagaccggtaaacgtagcacttcagcggcggttttagaagctcttcgcgaagtccatcccattgtggacaagatcttgcaataccgcgaactcgcgaaattgaaaggcacctatattgaccgtcttccggcattagtccacccgaaaacgggacgcctccatacccgcttcaaccaaacagccacggcgaccggtcgtttgtcctcctctgatccaaaccttcagaatattccagtacgtaccccattgggccagaagatccgccgtgcgtttgtagctgaggagggttggcgtttagtggccctcgattatagccaaattgaattacgtgtccttgcccatctttctggcgatgagaacctcatccgcgtgtttcaggaaggcaaagacattcacactcaaacggcaagctggatgtttggattatcagctgaagcgatcgatcctttgatgcgtcgtgcagcgaagacgatcaatttcggtgttctctacggtatgagtgcctttcgtttgtcgcaggaattaggcattccctatgaagaagctcaggcgttcattcagaaatactttcaaagctatcccaaagttaaagcatggatcgagaagactctcgaagaaggccgcacacgtggttacgtagagaccttatttggacgtcgccgctatgttcccgatttaaacgctcgcgtgaaaggcaagcgtgaagccgccgaacgcatggcgttcaacatgcctgtacagggcacggcagctgacctcatgaaacttgcaatggtgcgcctttttccacaattgcgtgaagttggtgcccgcatgctcttgcaggtccacgatgaactcttgttagaagcgccaaaagagcgtgcggaagaggtggcagccctcgcgaaagaagttatggaaggcgtgtggcccttagcggtgcctcttgaagtcgaagttggtattggcgaggattggctggctgccaaagga

SEQ ID NO: 4156 - protein, 841 aa, synthetic construct; identical to SEQ ID NO: 3822
  REGION 1..841: note = Variant of DNA polymerase I from Thermus sp. strain 2.9

SEQ ID NO: 4157 - DNA, 2523 bp, synthetic construct
  misc_feature 1..2523: note = Variant of DNA polymerase I from Thermus sp. strain 2.9
  source 1..2523: mol_type = other DNA
atgcaccatcatcatcatcatggcggtagcggcgtgttaccggtgttcgagcctaaaggtcgcgtgcttctggttgatggccatcatctcgcgtatcgtaacttctttgccctgaaaggattaaccaccagcagcggcgagccggtacagggtgtctacggctttgcaaagtcgctcctgaaagctctgaaagaagacggtgatgtggtgattgttgtctttgatgcgaaagcgccaagttttcgccacgaagcgtacgaagcttacaaagccgggcgtgctccaacgccggaagactttcctcgccaattggcgcttatgaaggaattagtggatttgcttggcctcgaacgcttggaagttcccggtttcgaggcagacgacgtattagcgactctcgcaaagaaagccgaacgtgagggctatgaagtccagatcttgacagcagatcgcgatcttttccagcttttatctccgcgcatctcggtgttacacccggaagggcatcgtatcaccccggaatggctctgggagaaatatggtttgcgtcccgaacaatgggtggattttcgcgccttagcaggcgatccgagcgacaatattccgggagttaaaggtatcggcgagaagacggcgctcaagctccttaaagaatgggggtcgttggagaacttgcttaagaatttagatcaggtcaaaccagagtcagtgcgtgagaagattcttgctcacctcgaagacctcaaattaagccgcgaattgtcccgtgtacgcaccgatttgccgctcgaagttgatttccaacgccgccgcgaacctgactgggagggtcttaaagcgtttttagagcgtcttgaatttggttcgctccagcatgaattcggccttttagaaagcccgttaccagccgaagaagcaccttggccaccgcccgagggcgcgtttttaggttaccgtttgagtcgcccggaaccgatgtgggccgaattactggctcttgcagcgtctgcccagggacgtgtgtatcgcgcggaagaccctcatggtgcgctccgcggcctcttcgaagtccgtggactccttgccaaagacttagctgttgttgcattgcgcgaaggtcttgatttacctccgactgatgatccaatgcttcttgcgtacctcttggacccgtcaaacacgacgcccgaaggcgtagcccgtcgttacggcggcgagtggaccgaagatgcagcgaaacgcgcgttattggccgaacgtttgcacgccaatttattaggacgtttgcaaggcgaggaacgtctcctctggctttacgaagaagtggagaaaccattgagtcgcgtgctcgcgcatatggaagctaccggtgtcaaattagacgtggcgtatttggagaatctcagccttgaagttgctgcccacatgcgccgcttggaggaagaagtattccgtttagcaggccgttcctttcgccttaattctcgcgatcagttagaacgtgtgttgttcgatgaacttggtctccctcctatcggcaagacagagaagaccggtaaacgtagcacttcagcggcggttttagaagctcttcgcgaagtccatcccattgtggacaagatcttgcaataccgcgaactcgcgaaattgaaaggcacctatattgaccgtcttccggcattagtccacccgaaaacgggacgcctccatacccgcttcaaccaaacagccacggcgaccggtcgtttgtcctcctctgatccaaaccttcagaatattccagtacgtaccccattgggccagaagatccgccgtgcgtttgtagctgaggagggttggcgtttagtggccctcgattatagccaaattgaattacgtgtccttgcccatctttctggcgatgagaacctcatccgcgtgtttcaggaaggcaaagacattcacactcaaacggcaagctggatgtttggattatcagctgaagcgatcgatcctttgatgcgtcgtgcagcgaagacgatcaatttcggtgttctctacggtatgagtgcctttcgtttgtcgcaggaattaggcattccctatgaagaagctcaggcgttcattcagaaatactttcaaagctatcccaaagttaaagcatggatcgagaagactctcgaagaaggccgcacacgtggttacgtagagaccttatttggacgtcgccgctatgttcccgatttaaacgctcgcgtgaaaggcaagcgtgaagccgccgaacgcatggcgttcaacatgcctgtacagggcacggcagctgacctcatgaaacttgcaatggtgcgcctttttccacaattgcgtgaagttggtgcccgcatgctcttgcaggtccacgatgaactcttgttagaagcgccaaaagagcgtgcggaagaggtggcagccctcgcgaaagaagttatggaaggcgtgtggcccttagcggtgcctcttgaagtcgaagttggtattggcgaggattggctggctgccaaagga

SEQ ID NO: 4158 - protein, 841 aa, synthetic construct
  REGION 1..841: note = Variant of DNA polymerase I from Thermus sp. strain 2.9
MHHHHHHGGSGVLPVFEPKGRVLLVDGHHLAYRNFFALKGLTTSSGEPVQGVYGFAKSLLKALKEDGDVVIVVFDAKAPSFRHEAYEAYKAGRAPTPEDFPRQLALMKELVDLLGLERLEVPGFEADDVLATLAKKAEREGYEVQILTADRDLFQLLSPRISVLHPEGHRITPEWLWEKYGLRPEQWVDFRALAGDPSDNIPGVKGIGEKTALKLLKEWGSLENLLKNLDQVKPESVREKILAHLEDLKLSRELSRVRTDLPLEVDFQRRREPDWEGLKAFLERLEFGSLQHEFGLLESPLPAEEAPWPPPEGAFLGYRLSRPEPMWAELLALAASAQGRVYRAEDPHGALRGLFEVRGLLAKDLAVVALREGLDLPPTDDPMLLAYLLDPSNTTPEGVARRYGGEWTEDAAKRALLAERLHANLLGRLQGEERLLWLYEEVEKPLSRVLAHMEATGVKLDVAYLENLSLEVAAHMRRLEEEVFRLAGRSFRLNSRDQLERVLFDELGLPPIGKTEKTGKRSTSAAVLEALREVHPIVDKILQYRELAKLKGTYIDRLPALVHPKTGRLHTRFNQTATATGRLSSSDPNLQNIPVRTPLGQKIRRAFVAEEGWRLVALDYSQIELRVLAHLSGDENLIRVFQEGKDIHTQTASWMFGLSAEAIDPLMRRAAKTINFGVLYGMSAFRLSQELGIPYEEAQAFIQKYFQSYPKVKAWIEKTLEEGRTRGYVETLFGRRRYVPDLNARVKGKREAAERMAFNMPVQGTAADLMKLAMVRLFPQLREVGARMLLQVHDELLLEAPKERAEEVAALAKEVMEGVWPLAVPLEVEVGIGEDWLAAKG

SEQ ID NO: 4159 - DNA, 2523 bp, synthetic construct
  misc_feature 1..2523: note = Variant of DNA polymerase I from Thermus sp. strain 2.9
  source 1..2523: mol_type = other DNA
atgcaccatcatcatcatcatggcggtagcggcgtgttaccggtgttcgagcctaaaggtcgcgtgcttctggttgatggccatcatctcgcgtatcgtaacttctttgccctgaaaggattaaccaccagcagtggcgagccggtacagggtgtctacggctttgcaaagtcgctcctgaaagctctgaaagaagacggtgatgtggtgattgttgtctttgatgcgaaagcgccaagttttcgccacgaagcgtacgaagcttacaaagccgggcgtgctccaacgccggaagactttcctcgccaattggcgcttatgaaggaattagtggatttgcttggcctcgaacgcttggaagttcccggtttcgaggcagacgacgtattagcgactctcgcaaagaaagccgaacgtgagggctatgaagtccagatcttgacagcagatcgcgatcttttccagcttttatctccgcgcatctcggtgttacacccggaagggcatcgtatcaccccggaatggctctgggagaaatatggtttgcgtcccgaacaatgggtggattttcgcgccttagcaggcgatccgagcgacaatattccgggagttaaaggtatcggcgagaagacggcgctcaagctccttaaagaatgggggtcgttggagaacttgcttaagaatttagatcaggtcaaaccagagtcagtgcgtgagaagattcttgctcacctcgaagacctcaaattaagccgcgaattgtcccgtgtacgcaccgatttgccgctcgaagttgatttccaacgccgccgcgaacctgactgggagggtcttaaagcgtttttagagcgtcttgaatttggttcgctcttgcatgaattcggccttttagaaagcccgttagtcgccgaagaagcaccttggccaccgcccgagggcgcgtttttaggttaccgtttgagtcgcccggaaccgatgtgggccgaattactggctcttgcagcgtctgcccagggacgtgtgtatcgcgcggaagaccctcatggtgcgctccgcggcctcttcgaagtccgtggactccttgccaaagacttagctgttgttgcattgcgcgaaggtcttgatttacctccgactgatgatccaatgcttcttgcgtacctcttggacccgtcaaacacgacgcccgaaggcgtagcccgtcgttacggcggcgagtggaccgaagatgcagcgaaacgcgcgttattggccgaacgtttgcacgaaaatttattaggacgtttgcaaggcgaggaacgtctcctctggctttacgaagaagtggagaaaccattgagtcgcgttctcgcgcatatggaagctaccggtgtcaaattagacgtggcgtatttggagaatctcagccttgaagttgctgcccacatgcgccgcttggaggaagaagtattccgtttagcaggccgttcctttcgccttaattctcgcgatcagttagaacgtgtgttgttcgatgaacttggtctccctcctatcggcaagacagagaagaccggtaaacgtagcacttcagcggcggttttagaagctcttcgcgaagtccatcccattgtggacaagatcttgcaataccgcgaactcgcgaaattgaaaggcacctatattgaccgtcttccggcattagtccacccgaaaacgggacgcctccatacccgcttcaaccaaacagccacggcgaccggtcgtttgtcctcctctgatccaaaccttcagaatattccagtacgtaccccattgggccagaagatccgccgtgcgtttgtagctgaggagggttggcgtttagtggccctcgattatcgtcaaattgaattacgtgtccttgcccatctttctggcgatgagaacctcatccgcgtgtttcaggaaggcaaagacattcacactcaaacggcaagctggatgtttggattatcagctgaagcgatcgatcctttgatgcgtcgtgcagcgaagaccatcaatttcggtgttctctacggtatgagtgcctttcgtttgtcgcaggaattaggcattccctatgaagaagctcaggcgttcattcagaaatactttcaaagctatcccaaagttaaagcatggatcgagaagactctcgaagaaggccgcacacgtggttacgtagagaccttatttggacgtcgccgctatgttcccgatttaaacgctcgcgtgaaaggcaagcgtgaagccgccgaacgcatggcgttcaacatgcctgtacagggcacggcagctgacctcatgaaacttgcaatggtgcgcctttttccacaattgcgtgaagttggtgcccgcatgctcttgcaggtccacgatgaactcttgttagaagcgccaaaagagcgtgcggaagaggtggcagccctcgcgaaagaagttatggaaggcgtgtggcccttagcggtgcctcttgaagtcgaagttggtattggcgaggattggctggctgccaaagga

SEQ ID NO: 4160 - protein, 841 aa, synthetic construct
  REGION 1..841: note = Variant of DNA polymerase I from Thermus sp. strain 2.9
MHHHHHHGGSGVLPVFEPKGRVLLVDGHHLAYRNFFALKGLTTSSGEPVQGVYGFAKSLLKALKEDGDVVIVVFDAKAPSFRHEAYEAYKAGRAPTPEDFPRQLALMKELVDLLGLERLEVPGFEADDVLATLAKKAEREGYEVQILTADRDLFQLLSPRISVLHPEGHRITPEWLWEKYGLRPEQWVDFRALAGDPSDNIPGVKGIGEKTALKLLKEWGSLENLLKNLDQVKPESVREKILAHLEDLKLSRELSRVRTDLPLEVDFQRRREPDWEGLKAFLERLEFGSLLHEFGLLESPLVAEEAPWPPPEGAFLGYRLSRPEPMWAELLALAASAQGRVYRAEDPHGALRGLFEVRGLLAKDLAVVALREGLDLPPTDDPMLLAYLLDPSNTTPEGVARRYGGEWTEDAAKRALLAERLHENLLGRLQGEERLLWLYEEVEKPLSRVLAHMEATGVKLDVAYLENLSLEVAAHMRRLEEEVFRLAGRSFRLNSRDQLERVLFDELGLPPIGKTEKTGKRSTSAAVLEALREVHPIVDKILQYRELAKLKGTYIDRLPALVHPKTGRLHTRFNQTATATGRLSSSDPNLQNIPVRTPLGQKIRRAFVAEEGWRLVALDYRQIELRVLAHLSGDENLIRVFQEGKDIHTQTASWMFGLSAEAIDPLMRRAAKTINFGVLYGMSAFRLSQELGIPYEEAQAFIQKYFQSYPKVKAWIEKTLEEGRTRGYVETLFGRRRYVPDLNARVKGKREAAERMAFNMPVQGTAADLMKLAMVRLFPQLREVGARMLLQVHDELLLEAPKERAEEVAALAKEVMEGVWPLAVPLEVEVGIGEDWLAAKG

SEQ ID NO: 4161 - DNA, 2523 bp, synthetic construct
  misc_feature 1..2523: note = Variant of DNA polymerase I from Thermus sp. strain 2.9
  source 1..2523: mol_type = other DNA
atgcaccatcatcatcatcatggcggtagcggcgtgttaccggtgttcgagcctaaaggtcgcgtgcttctggttgatggccatcatctcgcgtatcgtaacttctttgccctgaaaggattaaccaccagcagcggcgagccggtacagggtgtctacggctttgcaaagtcgctcctgaaagctctgaaagaagacggtgatgtggtgattgttgtctttgatgcgaaagcgccaagttttcgccacgaagcgtacgaagcttacaaagccgggcgtgctccaacgccggaagactttcctcgccaattggcgcttatgaaggaattagtggatttgcttggcctcgaacgcttggaagttcccggtttcgaggcagacgacgtattagcgactctcgcaaagaaagccgaacgtgagggctatgaagtccagatcttgacagcagatcgcgatcttttccagcttttatctccgcgcatctcggtgttacacccggaagggcatcgtatcaccccggaatggctctgggagaaatatggtttgcgtcccgaacaatgggtggattttcgcgccttagcaggcgatccgagcgacaatattccgggagttaaaggtatcggcgagaagacggcgctcaagctccttaaagaatgggggtcgttggagaacttgcttaagaatttagatcaggtcaaaccagagtcagtgcgtgagaagattcttgctcacctcgaagacctcaaattaagccgcgaattgtcccgtgtacgcaccgatttgccgctcgaagttgatttccaacgccgccgcgaacctgactgggagggtcttaaagcgtttttagagcgtcttgaatttggttcgctccagcatgaattcggccttttagaaagcccgttaccagccgaagaagcaccttggccaccgcccgagggcgcgtttttaggttaccgtttgagtcgcccggaaccgatgtgggccgaattactggctcttgcagcgtctgcccagggacgtgtgtatcgcgcggaagaccctcatggtgcgctccgcggcctcttcgaagtccgtggactccttgccaaagacttagctgttgttgcattgcgcgaaggtcttgatttacctccgactgatgatccaatgcttcttgcgtacctcttggacccgtcaaacacgacgcccgaaggcgtagcccgtcgttacggcggcgagtggaccgaagatgcagcgaaacgcgcgttattggccgaacgtttgcacgccaatttattaggacgtttgcaaggcgaggaacgtctcctctggctttacgaagaagtggagaaaccattgagtcgcgtgctcgcgcatatggaagctaccggtgtcaaattagacgtggcgtatttggagaatctcagccttgaagttgctgcccacatgcgccgcttggaggaagaagtattccgtttagcaggccgttcctttcgccttaattctcgcgatcagttagaacgtgtgttgttcgatgaacttggtctccctcctatcggcaagacagagaagaccggtaaacgtagcacttcagcggcggttttagaagctctgcgcgaagtccatcccattgtggacaagatcttgcaataccgcgaactggcgaaattgaaaggcacctatattgaccgtcttccggcattagtccacccgaaaacgggacgcctccatacccgcttcaaccaaacagccacggcgaccggtcgtttgtcctcctctgatccaaaccttcagaatattccagtacgtaccccattgggccagaagatccgccgtgcgtttgtagctgaggagggttggcgtttagtggccctcgattatagccaaattgaattacgtgtccttgcccatctttctggcgatgagaacctcatccgcgtgtttcaggaaggcaaagacattcacactcaaacggcaagctggatgtttggattatcagctgaagcgatcgatcctttgatgcgtcgtgcagcgaagacgatcaatttcggtgttctctacggtatgagtccgtttcgtttgtcgcaggaattaggcattccctatgaagaagctcaggcgttcattcagaaatactttcaaagctatcccaaagttaaagcatggatcgagaagactctcgaagaaggccgcacacgtggttacgtagagaccttatttggacgtcgccgctatgttcccgatttaaacgctcgcgtgaaaggcaagcgtgaagccgccgaacgcatggcgttcaacatgcctgtacagggcacggcagctgacctcatgaaacttgcaatggtgcgcctttttccacaattgcgtgaagttggtgcccgcatgctcttgcaggtccacgatgaactcttgttagaagcgccaaaagagcgtgcggaagaggtggcagccctcgcgaaagaagttatggaaggcgtgtggcccttagcggtgcctcttgaagtcgaagttggtattggcgaggattggctggctgccaaagga

SEQ ID NO: 4162 - protein, 841 aa, synthetic construct
  REGION 1..841: note = Variant of DNA polymerase I from Thermus sp. strain 2.9
MHHHHHHGGSGVLPVFEPKGRVLLVDGHHLAYRNFFALKGLTTSSGEPVQGVYGFAKSLLKALKEDGDVVIVVFDAKAPSFRHEAYEAYKAGRAPTPEDFPRQLALMKELVDLLGLERLEVPGFEADDVLATLAKKAEREGYEVQILTADRDLFQLLSPRISVLHPEGHRITPEWLWEKYGLRPEQWVDFRALAGDPSDNIPGVKGIGEKTALKLLKEWGSLENLLKNLDQVKPESVREKILAHLEDLKLSRELSRVRTDLPLEVDFQRRREPDWEGLKAFLERLEFGSLQHEFGLLESPLPAEEAPWPPPEGAFLGYRLSRPEPMWAELLALAASAQGRVYRAEDPHGALRGLFEVRGLLAKDLAVVALREGLDLPPTDDPMLLAYLLDPSNTTPEGVARRYGGEWTEDAAKRALLAERLHANLLGRLQGEERLLWLYEEVEKPLSRVLAHMEATGVKLDVAYLENLSLEVAAHMRRLEEEVFRLAGRSFRLNSRDQLERVLFDELGLPPIGKTEKTGKRSTSAAVLEALREVHPIVDKILQYRELAKLKGTYIDRLPALVHPKTGRLHTRFNQTATATGRLSSSDPNLQNIPVRTPLGQKIRRAFVAEEGWRLVALDYSQIELRVLAHLSGDENLIRVFQEGKDIHTQTASWMFGLSAEAIDPLMRRAAKTINFGVLYGMSPFRLSQELGIPYEEAQAFIQKYFQSYPKVKAWIEKTLEEGRTRGYVETLFGRRRYVPDLNARVKGKREAAERMAFNMPVQGTAADLMKLAMVRLFPQLREVGARMLLQVHDELLLEAPKERAEEVAALAKEVMEGVWPLAVPLEVEVGIGEDWLAAKG

SEQ ID NO: 4163 - DNA, 2523 bp, synthetic construct
  misc_feature 1..2523: note = Variant of DNA polymerase I from Thermus sp. strain 2.9
  source 1..2523: mol_type = other DNA
atgcaccatcatcatcatcatggcggtagcggcgtgttaccggtgttcgagcctaaaggtcgcgtgcttctggttgatggccatcatctcgcgtatcgtaacttctttgccctgaaaggattaaccaccagcagcggcgagccggtacagggtgtctacggctttgcaaagtcgctcctgaaagctctgaaagaagacggtgatgtggtgattgttgtctttgatgcgaaagcgccaagttttcgccacgaagcgtacgaagcttacaaagccgggcgtgctccaacgccggaagactttcctcgccaattggcgcttatgaaggaattagtggatttgcttggcctcgaacgcttggaagttcccggtttcgaggcagacgacgtattagcgactctcgcaaagaaagccgaacgtgagggctatgaagtccagatcttgacagcagatcgcgatcttttccagcttttatctccgcgcatctcggtgttacacccggaagggcatcgtatcaccccggaatggctctgggagaaatatggtttgcgtcccgaacaatgggtggattttcgcgccttagcaggcgatccgagcgacaatattccgggagttaaaggtatcggcgagaagacggcgctcaagctccttaaagaatgggggtcgttggagaacttgcttaagaatttagatcaggtcaaaccagagtcagtgcgtgagaagattcttgctcacctcgaagacctcaaattaagccgcgaattgtcccgtgtacgcaccgatttgccgctcgaagttgatttccaacgccgccgcgaacctgactgggagggtcttaaagcgtttttagagcgtcttgaatttggttcgctcttgcatgaattcggccttttagaaagcccgttaccagccgaagaagcaccttggccaccgcccgagggcgcgtttttaggttaccgtttgagtcgcccggaaccgatgtgggccgaattactggctcttgcagcgtctgcccagggacgtgtgtatcgcgcggaagaccctcatggtgcgctccgcggcctcttcgaagtccgtggactccttgccaaagacttagctgttgttgcattgcgcgaaggtcttgatttacctccgactgatgatccaatgcttcttgcgtacctcttggacccgtcaaacacgacgcccgaaggcgtagcccgtcgttacggcggcgagtggaccgaagatgcagcgaaacgcgcgttattggccgaacgtttgcacgccaatttattaggacgtttgcaaggcgaggaacgtctcctctggctttacgaagaagtggagaaaccattgagtcgcgtgctcgcgcatatggaagctaccggtgtcaaattagacgtggcgtatttggagaatctcagccttgaagttgctgcccacatgcgccgcttggaggaagaagtattccgtttagcaggccgttcctttcgccttaattctcgcgatcagttagaacgtgtgttgttcgatgaacttggtctccctcctatcggcaagacagagaagaccggtaaacgtagcacttcagcggcggttttagaagctcttcgcgaagtccatcccattgtggacaagatcttgcaataccgcgaactcgcgaaattgaaaggcacctatattgaccgtcttccggcattagtccacccgaaaacgggacgcctccatacccgcttcaaccaaacagccacggcgaccggtcgtttgtcctcctctgatccaaaccttcagaatattccagtacgtaccccattgggccagaagatccgccgtgcgtttgtagctgaggagggttggcgtttagtggccctcgattatagccaaattgaattacgtgtccttgcccatctttctggcgatgagaacctcatccgcgtgtttcaggaaggcaaagacattcacactcaaacggcaagctggatgtttggattatcagctgaagcgatcgatcctttgatgcgtcgtgcagcgaagaccatcaatttcggtgttctctacggtatgagtgcctttcgtttgtcgcaggaattaggcattccctatgaagaagctcaggcgttcattcagaaatactttcaaagctatcccaaagttaaagcatggatcgagaagactctcgaagaaggccgcacacgtggttacgtagagaccttatttggacgtcgccgctatgttcccgatttaaacaggcgcgtgaaaggcaagcgtgaagccgccgaacgcatggcgttcaacatgcctgtacagggcacggcagctgacctcatgaaacttgcaatggtgcgcctttttccacaattgcgtgaagttggtgcccgcatgctcttgcaggtccacgatgaactcttgttagaagcgccaaaagagcgtgcggaagaggtggcagccctcgcgaaagaagttatggaaggcgtgtggcccttagcggtgcctcttgaagtcgaagttggtattggcgaggattggctggctgccaaagga

SEQ ID NO: 4164 - protein, 841 aa, synthetic construct
  REGION 1..841: note = Variant of DNA polymerase I from Thermus sp. strain 2.9
MHHHHHHGGSGVLPVFEPKGRVLLVDGHHLAYRNFFALKGLTTSSGEPVQGVYGFAKSLLKALKEDGDVVIVVFDAKAPSFRHEAYEAYKAGRAPTPEDFPRQLALMKELVDLLGLERLEVPGFEADDVLATLAKKAEREGYEVQILTADRDLFQLLSPRISVLHPEGHRITPEWLWEKYGLRPEQWVDFRALAGDPSDNIPGVKGIGEKTALKLLKEWGSLENLLKNLDQVKPESVREKILAHLEDLKLSRELSRVRTDLPLEVDFQRRREPDWEGLKAFLERLEFGSLLHEFGLLESPLPAEEAPWPPPEGAFLGYRLSRPEPMWAELLALAASAQGRVYRAEDPHGALRGLFEVRGLLAKDLAVVALREGLDLPPTDDPMLLAYLLDPSNTTPEGVARRYGGEWTEDAAKRALLAERLHANLLGRLQGEERLLWLYEEVEKPLSRVLAHMEATGVKLDVAYLENLSLEVAAHMRRLEEEVFRLAGRSFRLNSRDQLERVLFDELGLPPIGKTEKTGKRSTSAAVLEALREVHPIVDKILQYRELAKLKGTYIDRLPALVHPKTGRLHTRFNQTATATGRLSSSDPNLQNIPVRTPLGQKIRRAFVAEEGWRLVALDYSQIELRVLAHLSGDENLIRVFQEGKDIHTQTASWMFGLSAEAIDPLMRRAAKTINFGVLYGMSAFRLSQELGIPYEEAQAFIQKYFQSYPKVKAWIEKTLEEGRTRGYVETLFGRRRYVPDLNRRVKGKREAAERMAFNMPVQGTAADLMKLAMVRLFPQLREVGARMLLQVHDELLLEAPKERAEEVAALAKEVMEGVWPLAVPLEVEVGIGEDWLAAKG

SEQ ID NO: 4165 - DNA, 2523 bp, synthetic construct
  misc_feature 1..2523: note = Variant of DNA polymerase I from Thermus sp. strain 2.9
  source 1..2523: mol_type = other DNA
atgcaccatcatcatcatcatggcggtagcggcgtgttaccggtgttcgagcctaaaggtcgcgtgcttctggttgatggccatcatctcgcgtatcgtaacttctttgccctgaaaggattaaccaccagcctgggcgagccggtacagggtgtctacggctttgcaaagtcgctcctgaaagctctgaaagaagacggtgatgtggtgattgttgtctttgatgcgaaagcgccaagttttcgccacgaagcgtacgaagcttacaaagccgggcgtgctccaacgccggaagactttcctcgccaattggcgcttatgaaggaattagtggatttgcttggcctcgaacgcttggaagttcccggtttcgaggcagacgacgtattagcgactctcgcaaagaaagccgaacgtgagggctatgaagtccagatcttgacagcagatcgcgatcttttccagcttttatctccgcgcatctcggtgttacacccggaagggcatcgtatcaccccggaatggctctgggagaaatatggtttgcgtcccgaacaatgggtggattttcgcgccttagcaggcgatccgagcgacaatattccgggagttaaaggtatcggcgagaagacggcgctcaagctccttaaagaatgggggtcgttggagaacttgcttaagaatttagatcaggtcaaaccagagtcagtgcgtgagaagattcttgctcacctcgaagacctcaaattaagccgcgaattgtcccgtgtacgcaccgatttgccgctcgaagttgatttcggtcgccgccgcgaacctgactgggagggtcttaaagcgtttttagagcgtcttgaatttggttcgctcttgcatgaattcggccttttagaaagcccgttactggccgaagaagcaccttggccaccgcccgagggcgcgtttttaggttaccgtttgagtcgcccggaaccgatgtgggccgaattactggctcttgcagcgtctgcccagggacgtgtgtatcgcgcggaagaccctcatggtgcgctccgcggcctcttcgaagtccgtggactccttgccaaagacttagctgttgttgcattgcgcgaaggtcttgatttacctccgactgatgatccaatgcttcttgcgtacctcttggacccgtcaaacacgacgcccgaaggcgtagcccgtcgttacggcggcgagtggaccgaagatgcagcgaaacgcgcgttattggccgaacgtttgcacgccaatttattaggacgtttgcaaggcgaggaacgtctcctctggctttacgaagaagtggagaaaccattgagtcgcgtgctcgcgcatatggaagctaccggtgtcaaattagacgtggcgtatttggagaatctcagccttgaagttgctgcccacatgcgccgcttggaggaagaagtattccgtttagcaggccgttcctttcgccttaactctcgcgatcagttagaacgtgtgttgttcgatgaacttggtctccctcctatcggcaagacagagaagaccggtaaacgtagcacttcagcggcggttttagaagctcttcgcgaagtccatcccattgtggacaagatcttgcagtaccgcgaactcgcgaaattgaaaggcacctatattgaccgtcttccggcattagtccacccgaaaacgggacgcctccatacccgcttcaaccaaacagccacggcgaccggtcgtttgtcctcctctgatccaaaccttcagaatattccagtacgtaccccattgggccagaagatccgccgtgcgtttgtagctgaggagggttggcgtttagtggccctcgattatcgtcaaattgaaacgcgtgtccttgcccatctttctggcgatgagaacctcatccgcgtgtttcaggaaggcaaagacattcacactcaaacggcaagctggatgtttggattatcagctgaagcgatcgatcctttgatgcgtcgtgcagcgaagaccatcaatttcggtgttctctacggtatgagtgcctttcgtttgtcgcaggaattaggcattccctatgaagaagctcaggcgttcattcagaaatactttcaaagctatcccaaagttaaagcatggatcgagaagactctccgtgaaggccgcacacgtggttacgtagagaccttatttggacgtcgccgctatgttcccgatttaaacgctcgcgtgaaaggcaagcgtgaagccgccgaacgcatggcgttcaacatgcctgtacagggcacggcagctgacctcatgaaacttgcaatggtgcgcctttttccacaattgcgtgaagttggtgcccgcatgctcttgcaggtccacgatgaactcttgttagaagcgccaaaagagcgtgcggaagaggtggcagccctcgcgaaagaagttatggaaggcgtgtggcccttagcggtgcctcttgaagtcgaagttggtattggcgaggattggctggctgccaaagga

SEQ ID NO: 4166 - protein, 841 aa, synthetic construct
  REGION 1..841: note = Variant of DNA polymerase I from Thermus sp. strain 2.9
MHHHHHHGGSGVLPVFEPKGRVLLVDGHHLAYRNFFALKGLTTSLGEPVQGVYGFAKSLLKALKEDGDVVIVVFDAKAPSFRHEAYEAYKAGRAPTPEDFPRQLALMKELVDLLGLERLEVPGFEADDVLATLAKKAEREGYEVQILTADRDLFQLLSPRISVLHPEGHRITPEWLWEKYGLRPEQWVDFRALAGDPSDNIPGVKGIGEKTALKLLKEWGSLENLLKNLDQVKPESVREKILAHLEDLKLSRELSRVRTDLPLEVDFGRRREPDWEGLKAFLERLEFGSLLHEFGLLESPLLAEEAPWPPPEGAFLGYRLSRPEPMWAELLALAASAQGRVYRAEDPHGALRGLFEVRGLLAKDLAVVALREGLDLPPTDDPMLLAYLLDPSNTTPEGVARRYGGEWTEDAAKRALLAERLHANLLGRLQGEERLLWLYEEVEKPLSRVLAHMEATGVKLDVAYLENLSLEVAAHMRRLEEEVFRLAGRSFRLNSRDQLERVLFDELGLPPIGKTEKTGKRSTSAAVLEALREVHPIVDKILQYRELAKLKGTYIDRLPALVHPKTGRLHTRFNQTATATGRLSSSDPNLQNIPVRTPLGQKIRRAFVAEEGWRLVALDYRQIETRVLAHLSGDENLIRVFQEGKDIHTQTASWMFGLSAEAIDPLMRRAAKTINFGVLYGMSAFRLSQELGIPYEEAQAFIQKYFQSYPKVKAWIEKTLREGRTRGYVETLFGRRRYVPDLNARVKGKREAAERMAFNMPVQGTAADLMKLAMVRLFPQLREVGARMLLQVHDELLLEAPKERAEEVAALAKEVMEGVWPLAVPLEVEVGIGEDWLAAKG

SEQ ID NO: 4167 - DNA, 2523 bp, synthetic construct
  misc_feature 1..2523: note = Variant of DNA polymerase I from Thermus sp. strain 2.9
  source 1..2523: mol_type = other DNA
atgcaccatcatcatcatcatggcggtagcggcgtgttaccggtgttcgagcctaaaggtcgcgtgcttctggttgatggccatcatctcgcgtatcgtaacttctttgccctgaaaggattaaccaccagcctgggcgagccggtacagggtgtctacggctttgcaaagtcgctcctgaaagctctgaaagaagacggtgatgtggtgattgttgtctttgatgcgaaagcgccaagttttcgccacgaagcgtacgaagcttacaaagccgggcgtgctccaacgccggaagactttcctcgccaattggcgcttatgaaggaattagtggatttgcttggcctcgaacgcttggaagttcccggtttcgaggcagacgacgtattagcgactctcgcaaagaaagccgaacgtgagggctatgaagtccagatcttgacagcagatcgcgatcttttccagcttttatctccgcgcatctcggtgttacacccggaagggcatcgtatcaccccggaatggctctgggagaaatatggtttgcgtcccgaacaatgggtggattttcgcgccttagcaggcgatccgagcgacaatattccgggagttaaaggtatcggcgagaagacggcgctcaagctccttaaagaatgggggtcgttggagaacttgcttaagaatttagatcaggtcaaaccagagtcagtgcgtgagaagattcttgctcacctcgaagacctcaaattaagccgcgaattgtcccgtgtacgcaccgatttgccgctcgaagttgatttcggtcgccgccgcgaacctgactgggagggtcttaaagcgtttttagagcgtcttgaatttggttcgctcttgcatgaattcggccttttagaaagcccgttactggccgaagaagcaccttggccaccgcccgagggcgcgtttttaggttaccgtttgagtcgcccggaaccgatgtgggccgaattactggctcttgcagcgtctgcccagggacgtgtgtatcgcgcggaagaccctcatggtgcgctccgcggcctcttcgaagtccgtggactccttgccaaagacttagctgttgttgcattgcgcgaaggtcttgatttacctccgactgatgatccaatgcttcttgcgtacctcttggacccgtcaaacacgacgcccgaaggcgtagcccgtcgttacggcggcgagtggaccgaagatgcagcgaaacgcgcgttattggccgaacgtttgcacgccaatttattaggacgtttgcaaggcgaggaacgtctcctctggctttacgaagaagtggagaaaccattgagtcgcgtgctcgcgcatatggaagctaccggtgtcaaattagacgtggcgtatttggagaatctcagccttgaagttgctgcccacatgcgccgcttggaggaagaagtattccgtttagcaggccgttcctttcgccttaactctcgcgatcagttagaacgtgtgttgttcgatgaacttggtctccctcctatcggcaagacagagaagaccggtaaacgtagcacttcagcggcggttttagaagctcttcgcgaagtccatcccattgtggacaagatcttgcagtaccgcgaactcgcgaaattgaaaggcacctatattgaccgtcttccggcattagtccacccgaaaacgggacgcctccatacccgcttcaaccaaacagccacggcgaccggtcgtttgtcctcctctgatccaaaccttcagaatattccagtacgtaccccattgggccagaagatccgccgtgcgtttgtagctgaggagggttggcgtttagtggccctcgattatcgtcaaattgaattacgtgtccttgcccatctttctggcgatgagaacctcatccgcgtgtttcaggaaggcaaagacattcacactcaaacggcaagctggatgtttggattatcagctgaagcgatcgatcctttgatgcgtcgtgcagcgaagaccatcaatttcggtgttctctacggtatgagtgcctttcgtttgtcgcaggaattaggcattccctatgaagaagctcaggcgttcattcagaaatactttcaaagctatcccaaagttaaagcatggatcgagaagactctccgtgaaggccgcacacgtggttacgtagagaccttatttggacgtcgccgctatgttcccgatttaaacgctcgcgtgaaaggcaagcgtgaagccgccgaacgcatggcgttcaacatgcctgtacagggcacggcagctgacctccgtaaacttgcaatggtgcgcctttttccacaattgcgtgaagttggtgcccgcatgctcttgcaggtccacgatgaactcttgttagaagcgccaaaagagcgtgcggaagaggtggcagccctcgcgaaagaagttatggaaggcgtgtggcccttagcggtgcctcttgaagtcgaagttggtattggcgaggattggctggctgccaaagga

SEQ ID NO: 4168 - protein, 841 aa, synthetic construct
  REGION 1..841: note = Variant of DNA polymerase I from Thermus sp. strain 2.9
MHHHHHHGGSGVLPVFEPKGRVLLVDGHHLAYRNFFALKGLTTSLGEPVQGVYGFAKSLLKALKEDGDVVIVVFDAKAPSFRHEAYEAYKAGRAPTPEDFPRQLALMKELVDLLGLERLEVPGFEADDVLATLAKKAEREGYEVQILTADRDLFQLLSPRISVLHPEGHRITPEWLWEKYGLRPEQWVDFRALAGDPSDNIPGVKGIGEKTALKLLKEWGSLENLLKNLDQVKPESVREKILAHLEDLKLSRELSRVRTDLPLEVDFGRRREPDWEGLKAFLERLEFGSLLHEFGLLESPLLAEEAPWPPPEGAFLGYRLSRPEPMWAELLALAASAQGRVYRAEDPHGALRGLFEVRGLLAKDLAVVALREGLDLPPTDDPMLLAYLLDPSNTTPEGVARRYGGEWTEDAAKRALLAERLHANLLGRLQGEERLLWLYEEVEKPLSRVLAHMEATGVKLDVAYLENLSLEVAAHMRRLEEEVFRLAGRSFRLNSRDQLERVLFDELGLPPIGKTEKTGKRSTSAAVLEALREVHPIVDKILQYRELAKLKGTYIDRLPALVHPKTGRLHTRFNQTATATGRLSSSDPNLQNIPVRTPLGQKIRRAFVAEEGWRLVALDYRQIELRVLAHLSGDENLIRVFQEGKDIHTQTASWMFGLSAEAIDPLMRRAAKTINFGVLYGMSAFRLSQELGIPYEEAQAFIQKYFQSYPKVKAWIEKTLREGRTRGYVETLFGRRRYVPDLNARVKGKREAAERMAFNMPVQGTAADLRKLAMVRLFPQLREVGARMLLQVHDELLLEAPKERAEEVAALAKEVMEGVWPLAVPLEVEVGIGEDWLAAKG

SEQ ID NO: 4169 - DNA, 2523 bp, synthetic construct
  misc_feature 1..2523: note = Variant of DNA polymerase I from Thermus sp. strain 2.9
  source 1..2523: mol_type = other DNA
atgcaccatcatcatcatcatggcggtagcggcgtgttaccggtgttcgagcctaaaggtcgcgtgcttctggttgatggccatcatctcgcgtatcgtaacttctttgccctgaaaggattaaccaccagcctgggcgagccggtacagggtgtctacggctttgcaaagtcgctcctgaaagctctgaaagaagacggtgatgtggtgattgttgtctttgatgcgaaagcgccaagttttcgccacgaagcgtacgaagcttacaaagccgggcgtgctccaacgccggaagactttcctcgccaattggcgcttatgaaggaattagtggatttgcttggcctcgaacgcttggaagttcccggtttcgaggcagacgacgtattagcgactctcgcaaagaaagccgaacgtgagggctatgaagtccagatcttgacagcagatcgcgatcttttccagcttttatctccgcgcatctcggtgttacacccggaagggcatcgtatcaccccggaatggctctgggagaaatatggtttgcgtcccgaacaatgggtggattttcgcgccttagcaggcgatccgagcgacaatattccgggagttaaaggtatcggcgagaagacggcgctcaagctccttaaagaatgggggtcgttggagaacttgcttaagaatttagatcaggtcaaaccagagtcagtgcgtgagaagattcttgctcacctcgaagacctcaaattaagccgcgaattgtcccgtgtacgcaccgatttgccgctcgaagttgatttcggtcgccgccgcgaacctgactgggagggtcttaaagcgtttttagagcgtcttgaatttggttcgctcttgcatgaattcggccttttagaaagcccgttactggccgaagaagcaccttggccaccgcccgagggcgcgtttttaggttaccgtttgagtcgcccggaaccgatgtgggccgaattactggctcttgcagcgtctgcccagggacgtgtgtatcgcgcggaagaccctcatggtgcgctccgcggcctcttcgaagtccgtggactccttgccaaagacttagctgttgttgcattgcgcgaaggtcttgatttacctccgactgatgatccaatgcttcttgcgtacctcttggacccgtcaaacacgacgcccgaaggcgtagcccgtcgttacggcggcgagtggaccgaagatgcagcgaaacgcgcgttattggccgaacgtttgcacgccaatttattaggacgtttgcaaggcgaggaacgtctcctctggctttacgaagaagtggagaaaccattgagtcgcgtgctcgcgcatatggaagctaccggtgtcaaattagacgtggcgtatttggagaatctcagccttgaagttgctgcccacatgcgccgcttggaggaagaagtattccgtttagcaggccgttcctttcgccttaactctcgcgatcagttagaacgtgtgttgttcgatgaacttggtctccctcctatcggcaagacagagaagaccggtaaacgtagcacttcagcggcggttttagaagctcttcgcgaagtccatcccattgtggacaagatcttgcagtaccgcgaactcgcgaaattgaaaggcacctatattgaccgtcttccggcattagtccacccgaaaacgggacgcctccatacccgcttcaaccaaacagccacggcgaccggtcgtttgtcctcctctgatccaaaccttcagaatattccagtacgtaccccattgggccagaagatccgccgtgcgtttgtagctgaggagggttggcgtttagtggccctcgattatcgtcaaattgaattacgtgtccttgcccatctttctggcgatgagaacctcatccgcgtgtttcaggaaggcaaagacattcacactcaaacggcaagctggatgtttggattatcagctgaagcgatcgatcctttgatgcgtcgtgcagcgaagaccatcaatttcggtgttctctacggtatgagtgcctttcgtttgtcgcaggaattaggcattccctatgaagaagctcaggcgttcattcagaaatactttcaaagctatcccaaagttaaagcatggatcgagaagactctccgtgaaggccgcacacgtggttacgtagagaccttatttggacgtcgccgctatgttcccgatttaaacgctcgcgtgaaaggcaagcgtgaagccgccgaacgcatggcgttcaacatgcctgtacagggcacggcagctgacctcatgaaacttgcaatggtgcgcctttttccacaattgcgtgaagttggtgcccgcatgctcttgcaggtccacgatgaactcttgttagaagcgccaaaagagcgtggggaagaggtggcagccctcgcgaaagaagttatggaaggcgtgtggcccttagcggtgcctcttgaagtcgaagttggtattggcgaggattggctggctgccaaagga

SEQ ID NO: 4170 - protein, 841 aa, synthetic construct
  REGION 1..841: note = Variant of DNA polymerase I from Thermus sp. strain 2.9
MHHHHHHGGSGVLPVFEPKGRVLLVDGHHLAYRNFFALKGLTTSLGEPVQGVYGFAKSLLKALKEDGDVVIVVFDAKAPSFRHEAYEAYKAGRAPTPEDFPRQLALMKELVDLLGLERLEVPGFEADDVLATLAKKAEREGYEVQILTADRDLFQLLSPRISVLHPEGHRITPEWLWEKYGLRPEQWVDFRALAGDPSDNIPGVKGIGEKTALKLLKEWGSLENLLKNLDQVKPESVREKILAHLEDLKLSRELSRVRTDLPLEVDFGRRREPDWEGLKAFLERLEFGSLLHEFGLLESPLLAEEAPWPPPEGAFLGYRLSRPEPMWAELLALAASAQGRVYRAEDPHGALRGLFEVRGLLAKDLAVVALREGLDLPPTDDPMLLAYLLDPSNTTPEGVARRYGGEWTEDAAKRALLAERLHANLLGRLQGEERLLWLYEEVEKPLSRVLAHMEATGVKLDVAYLENLSLEVAAHMRRLEEEVFRLAGRSFRLNSRDQLERVLFDELGLPPIGKTEKTGKRSTSAAVLEALREVHPIVDKILQYRELAKLKGTYIDRLPALVHPKTGRLHTRFNQTATATGRLSSSDPNLQNIPVRTPLGQKIRRAFVAEEGWRLVALDYRQIELRVLAHLSGDENLIRVFQEGKDIHTQTASWMFGLSAEAIDPLMRRAAKTINFGVLYGMSAFRLSQELGIPYEEAQAFIQKYFQSYPKVKAWIEKTLREGRTRGYVETLFGRRRYVPDLNARVKGKREAAERMAFNMPVQGTAADLMKLAMVRLFPQLREVGARMLLQVHDELLLEAPKERGEEVAALAKEVMEGVWPLAVPLEVEVGIGEDWLAAKG

SEQ ID NO: 4171 - DNA, 2523 bp, synthetic construct
  misc_feature 1..2523: note = Variant of DNA polymerase I from Thermus sp. strain 2.9
  source 1..2523: mol_type = other DNA
atgcaccatcatcatcatcatggcggtagcggcgtgttaccggtgttcgagcctaaaggtcgcgtgcttctggttgatggccatcatctcgcgtatcgtaacttctttgccctgaaaggattaaccaccagcctgggcgagccggtacagggtgtctacggctttgcaaagtcgctcctgaaagctctgaaagaagacggtgatgtggtgattgttgtctttgatgcgaaagcgccaagttttcgccacgaagcgtacgaagcttacaaagccgggcgtgctccaacgccggaagactttcctcgccaattggcgcttatgaaggaattagtggatttgcttggcctcgaacgcttggaagttcccggtttcgaggcagacgacgtattagcgactctcgcaaagaaagccgaacgtgagggctatgaagtccagatcttgacagcagatcgcgatcttttccagcttttatctccgcgcatctcggtgttacacccggaagggcatcgtatcaccccggaatggctctgggagaaatatggtttgcgtcccgaacaatgggtggattttcgcgccttagcaggcgatccgagcgacaatattccgggagttaaaggtatcggcgagaagacggcgctcaagctccttaaagaatgggggtcgttggagaacttgcttaagaatttagatcaggtcaaaccagagtcagtgcgtgagaagattcttgctcacctcgaagacctcaaattaagccgcgaattgtcccgtgtacgcaccgatttgccgctcgaagttgatttcggtcgccgccgcgaacctgactgggagggtcttaaagcgtttttagagcgtcttgaatttggttcgctcttgcatgaattcggccttttagaaagcccgttactggccgaagaagcaccttggccaccgcccgagggcgcgtttttaggttaccgtttgagtcgcccggaaccgatgtgggccgaattactggctcttgcagcgtctgcccagggacgtgtgtatcgcgcggaagaccctcatggtgcgctccgcggcctcttcgaagtccgtggactccttgccaaagacttagctgttgttgcattgcgcgaaggtcttgatttacctccgactgatgatccaatgcttcttgcgtacctcttggacccgtcaaacacgacgcccgaaggcgtagcccgtcgttacggcggcgagtggaccgaagatgcagcgaaacgcgcgttattggccgaacgtttgcacgccaatttattaggacgtttgcaaggcgaggaacgtctcctctggctttacgaagaagtggagaaaccattgagtcgcgtgctcgcgcatatggaagctaccggtgtcaaattagacgtggcgtatttggagaatctcagccttgaagttgctgcccacatgcgccgcttggaggaagaagtattccgtttagcaggccgttcctttcgccttaactctcgcgatcagttagaacgtgtgttgttcgatgaacttggtctccctcctatcggcaagacagagaagaccggtaaacgtagcacttcagcggcggttttagaagctcttcgcgaagtccatcccattgtggacaagatcttgcagtaccgcgaactcgcgaaattgaaaggcacctatattgaccgtcttccggcattagtccacccgaaaacgggacgcctccatacccgcttcaaccaaacagccacggcgaccggtcgtttgtcctcctctgatccaaaccttcagaatattccagtacgtaccccattgggccagaagatccgccgtgcgtttgtagctgaggagggttggcgtagtgtggccctcgattatcgtcaaattgaattacgtgtccttgcccatctttctggcgatgagaacctcatccgcgtgtttcaggaaggcaaagacattcacactcaaacggcaagctggatgtttggattatcagctgaagcgatcgatcctttgatgcgtcgtgcagcgaagaccatcaatttcggtgttctctacggtatgagtgcctttcgtttgtcgcaggaattaggcattccctatgaagaagctcaggcgttcattcagaaatactttcaaagctatcccaaagttaaagcatggatcgagaagactctccgtgaaggccgcacacgtggttacgtagagaccttatttggacgtcgccgctatgttcccgatttaaacgctcgcgtgaaaggcaagcgtgaagccgccgaacgcatggcgttcaacatgcctgtacagggcacggcagctgacctcatgaaacttgcaatggtgcgcctttttccacaattgcgtgaagttggtgcccgcatgctcttgcaggtccacgatgaactcttgttagaagcgccaaaagagcgtgcggaagaggtggcagccctcgcgaaagaagttatggaaggcgtgtggcccttagcggtgcctcttgaagtcgaagttggtattggcgaggattggctggctgccaaagga

SEQ ID NO: 4172 - protein, 841 aa, synthetic construct
  REGION 1..841: note = Variant of DNA polymerase I from Thermus sp. strain 2.9
MHHHHHHGGSGVLPVFEPKGRVLLVDGHHLAYRNFFALKGLTTSLGEPVQGVYGFAKSLLKALKEDGDVVIVVFDAKAPSFRHEAYEAYKAGRAPTPEDFPRQLALMKELVDLLGLERLEVPGFEADDVLATLAKKAEREGYEVQILTADRDLFQLLSPRISVLHPEGHRITPEWLWEKYGLRPEQWVDFRALAGDPSDNIPGVKGIGEKTALKLLKEWGSLENLLKNLDQVKPESVREKILAHLEDLKLSRELSRVRTDLPLEVDFGRRREPDWEGLKAFLERLEFGSLLHEFGLLESPLLAEEAPWPPPEGAFLGYRLSRPEPMWAELLALAASAQGRVYRAEDPHGALRGLFEVRGLLAKDLAVVALREGLDLPPTDDPMLLAYLLDPSNTTPEGVARRYGGEWTEDAAKRALLAERLHANLLGRLQGEERLLWLYEEVEKPLSRVLAHMEATGVKLDVAYLENLSLEVAAHMRRLEEEVFRLAGRSFRLNSRDQLERVLFDELGLPPIGKTEKTGKRSTSAAVLEALREVHPIVDKILQYRELAKLKGTYIDRLPALVHPKTGRLHTRFNQTATATGRLSSSDPNLQNIPVRTPLGQKIRRAFVAEEGWRSVALDYRQIELRVLAHLSGDENLIRVFQEGKDIHTQTASWMFGLSAEAIDPLMRRAAKTINFGVLYGMSAFRLSQELGIPYEEAQAFIQKYFQSYPKVKAWIEKTLREGRTRGYVETLFGRRRYVPDLNARVKGKREAAERMAFNMPVQGTAADLMKLAMVRLFPQLREVGARMLLQVHDELLLEAPKERAEEVAALAKEVMEGVWPLAVPLEVEVGIGEDWLAAKG

SEQ ID NO: 4173 - DNA, 2523 bp, synthetic construct
  misc_feature 1..2523: note = Variant of DNA polymerase I from Thermus sp. strain 2.9
  source 1..2523: mol_type = other DNA
atgcaccatcatcatcatcatggcggtagcggcgtgttaccggtgttcgagcctaaaggtcgcgtgcttctggttgatggccatcatctcgcgtatcgtaacttctttgccctgaaaggattaaccaccagcctgggcgagccggtacagggtgtctacggctttgcaaagtcgctcctgaaagctctgaaagaagacggtgatgtggtgattgttgtctttgatgcgaaagcgccaagttttcgccacgaagcgtacgaagcttacaaagccgggcgtgctccaacgccggaagactttcctcgccaattggcgcttatgaaggaattagtggatttgcttggcctcgaacgcttggaagttcccggtttcgaggcagacgacgtattagcgactctcgcaaagaaagccgaacgtgagggctatgaagtccagatcttgacagcagatcgcgatcttttccagcttttatctccgcgcatctcggtgttacacccggaagggcatcgtatcaccccggaatggctctgggagaaatatggtttgcgtcccgaacaatgggtggattttcgcgccttagcaggcgatccgagcgacaatattccgggagttaaaggtatcggcgagaagacggcgctcaagctccttaaagaatgggggtcgttggagaacttgcttaagaatttagatcaggtcaaaccagagtcagtgcgtgagaagattcttgctcacctcgaagacctcaaattaagccgcgaattgtcccgtgtacgcaccgatttgccgctcgaagttgatttcggtcgccgccgcgaacctgactgggagggtcttaaagcgtttttagagcgtcttgaatttggttcgctcttgcatgaattcggccttttagaaagcccgttactggccgaagaagcaccttggccaccgcccgagggcgcgtttttaggttaccgtttgagtcgcccggaaccgatgtgggccgaattactggctcttgcagcgtctgcccagggacgtgtgtatcgcgcggaagaccctcatggtgcgctccgcggcctcttcgaagtccgtggactccttgccaaagacttagctgttgttgcattgcgcgaaggtcttgatttacctccgactgatgatccaatgcttcttgcgtacctcttggacccgtcaaacacgacgcccgaaggcgtagcccgtcgttacggcggcgagtggaccgaagatgcagcgaaacgcgcgttattggccgaacgtttgcacgccaatttattaggacgtttgcaaggcgaggaacgtctcctctggctttacgaagaagtggagaaaccattgagtcgcgtgctcgcgcatatggaagctaccggtgtcaaattagacgtggcgtatttggagaatctcagccttgaagttgctgcccacatgcgccgcttggaggaagaagtattccgtttagcaggccgttcctttcgccttaactctcgcgatcagttagaacgtgtgttgttcgatgaacttggtctccctcctatcggcaagacagagaagaccggtaaacgtagcacttcagcggcggttttagaagctcttcgcgaagtccatcccattgtggacaagatcttgcagtaccgcgaactcgcgaaattgaaaggcacctatattgaccgtcttccggcattagtccacccgaaaacgggacgcctccatacccgcttcaaccaaacagccacggcgaccggtcgtttgtcctcctctgatccaaaccttcagaatattccagtacgtaccccattgggccagaagatccgccgtgcgtttgtagctgaggagggttggcgtttagtggccctcgattatcgtcaaattgaattacgtgtccttgcccatctttctggcgatgagaacctcatccgcgtgtttcaggaaggcaaagacattcacactcaaacggcaagctggatgtttggattatcagctgaagcgatcgatcctttgatgcgtcgtgcagcgaagaccatcctgttcggtgttctctacggtatgagtgcctttcgtttgtcgcaggaattaggcattccctatgaagaagctcaggcgttcattcagaaatactttcaaagctatcccaaagttaaagcatggatcgagaagactctccgtgaaggccgcacacgtggttacgtagagaccttatttggacgtcgccgctatgttcccgatttaaacgctcgcgtgaaaggcaagcgtgaagccgccgaacgcatggcgttcaacatgcctgtacagggcacggcagctgacctcatgaaacttgcaatggtgcgcctttttccacaattgcgtgaagttggtgcccgcatgctcttgcaggtccacgatgaactcttgttagaagcgccaaaagagcgtgcggaagaggtggcagccctcgcgaaagaagttatggaaggcgtgtggcccttagcggtgcctcttgaagtcgaagttggtattggcgaggattggctggctgccaaagga

SEQ ID NO: 4174 - protein, 841 aa, synthetic construct
  REGION 1..841: note = Variant of DNA polymerase I from Thermus sp. strain 2.9
MHHHHHHGGSGVLPVFEPKGRVLLVDGHHLAYRNFFALKGLTTSLGEPVQGVYGFAKSLLKALKEDGDVVIVVFDAKAPSFRHEAYEAYKAGRAPTPEDFPRQLALMKELVDLLGLERLEVPGFEADDVLATLAKKAEREGYEVQILTADRDLFQLLSPRISVLHPEGHRITPEWLWEKYGLRPEQWVDFRALAGDPSDNIPGVKGIGEKTALKLLKEWGSLENLLKNLDQVKPESVREKILAHLEDLKLSRELSRVRTDLPLEVDFGRRREPDWEGLKAFLERLEFGSLLHEFGLLESPLLAEEAPWPPPEGAFLGYRLSRPEPMWAELLALAASAQGRVYRAEDPHGALRGLFEVRGLLAKDLAVVALREGLDLPPTDDPMLLAYLLDPSNTTPEGVARRYGGEWTEDAAKRALLAERLHANLLGRLQGEERLLWLYEEVEKPLSRVLAHMEATGVKLDVAYLENLSLEVAAHMRRLEEEVFRLAGRSFRLNSRDQLERVLFDELGLPPIGKTEKTGKRSTSAAVLEALREVHPIVDKILQYRELAKLKGTYIDRLPALVHPKTGRLHTRFNQTATATGRLSSSDPNLQNIPVRTPLGQKIRRAFVAEEGWRLVALDYRQIELRVLAHLSGDENLIRVFQEGKDIHTQTASWMFGLSAEAIDPLMRRAAKTILFGVLYGMSAFRLSQELGIPYEEAQAFIQKYFQSYPKVKAWIEKTLREGRTRGYVETLFGRRRYVPDLNARVKGKREAAERMAFNMPVQGTAADLMKLAMVRLFPQLREVGARMLLQVHDELLLEAPKERAEEVAALAKEVMEGVWPLAVPLEVEVGIGEDWLAAKG

SEQ ID NO: 4175 - DNA, 2523 bp, synthetic construct
  misc_feature 1..2523: note = Variant of DNA polymerase I from Thermus sp. strain 2.9
  source 1..2523: mol_type = other DNA
atgcaccatcatcatcatcatggcggtagcggcgtgttaccggtgttcgagcctaaaggtcgcgtgcttctggttgatggccatcatctcgcgtatcgtaacttctttgccctgaaaggattaaccaccagcctgggcgagccggtacagggtgtctacggctttgcaaagtcgctcctgaaagctctgaaagaagacggtgatgtggtgattgttgtctttgatgcgaaagcgccaagttttcgccacgaagcgtacgaagcttacaaagccgggcgtgctccaacgccggaagactttcctcgccaattggcgcttatgaaggaattagtggatttgcttggcctcgaacgcttggaagttcccggtttcgaggcagacgacgtattagcgactctcgcaaagaaagccgaacgtgagggctatgaagtccagatcttgacagcagatcgcgatcttttccagcttttatctccgcgcatctcggtgttacacccggaagggcatcgtatcaccccggaatggctctgggagaaatatggtttgcgtcccgaacaatgggtggattttcgcgccttagcaggcgatccgagcgacaatattccgggagttaaaggtatcggcgagaagacggcgctcaagctccttaaagaatgggggtcgttggagaacttgcttaagaatttagatcaggtcaaaccagagtcagtgcgtgagaagattcttgctcacctcgaagacctcaaattaagccgcgaattgtcccgtgtacgcaccgatttgccgctcgaagttgatttcggtcgccgccgcgaacctgactgggagggtcttaaagcgtttttagagcgtcttgaatttggttcgctcttgcatgaattcggccttttagaaagcccgttactggccgaagaagcaccttggccaccgcccgagggcgcgtttttaggttaccgtttgagtcgcccggaaccgatgtgggccgaattactggctcttgcagcgtctgcccagggacgtgtgtatcgcgcggaagaccctcatggtgcgctccgcggcctcttcgaagtccgtggactccttgccaaagacttagctgttgttgcattgcgcgaaggtcttgatttacctccgactgatgatccaatgcttcttgcgtacctcttggacccgtcaaacacgacgcccgaaggcgtagcccgtcgttacggcggcgagtggaccgaagatgcagcgaaacgcgcgttattggccgaacgtttgcacgccaatttattaggacgtttgcaaggcgaggaacgtctcctctggctttacgaagaagtggagaaaccattgagtcgcgtgctcgcgcatatggaagctaccggtgtcaaattagacgtggcgtatttggagaatctcagccttgaagttgctgcccacatgcgccgcttggaggaagaagtacttcgtttagcaggccgttcctttcgccttaactctcgcgatcagttagaacgtgtgttgttcgatgaacttggtctccctcctatcggcaagacagagaagaccggtaaacgtagcacttcagcggcggttttagaagctcttcgcgaagtccatcccattgtggacaagatcttgcagtaccgcgaactcgcgaaattgaaaggcacctatattgaccgtcttccggcattagtccacccgaaaacgggacgcctccatacccgcttcaaccaaacagccacggcgaccggtcgtttgtcctcctctgatccaaaccttcagaatattccagtacgtaccccattgggccagaagatccgccgtgcgtttgtagctgaggagggttggcgtttagtggccctcgattatcgtcaaattgaattacgtgtccttgcccatctttctggcgatgagaacctcatccgcgtgtttcaggaaggcaaagacattcacactcaaacggcaagctggatgtttggattatcagctgaagcgatcgatcctttgatgcgtcgtgcagcgaagaccatcaatttcggtgttctctacggtatgagtgcctttcgtttgtcgcaggaattaggcattccctatgaagaagctcaggcgttcattcagaaatactttcaaagctatcccaaagttaaagcatggatcgagaagactctccgtgaaggccgcacacgtggttacgtagagaccttatttggacgtcgccgctatgttcccgatttaaacgctcgcgtgaaaggcaagcgtgaagccgccgaacgcatggcgttcaacatgcctgtacagggcacggcagctgacctcatgaaacttgcaatggtgcgcctttttccacaattgcgtgaagttggtgcccgcatgctcttgcaggtccacgatgaactcttgttagaagcgccaaaagagcgtgcggaagaggtggcagccctcgcgaaagaagttatggaaggcgtgtggcccttagcggtgcctcttgaagtcgaagttggtattggcgaggattggctggctgccaaagga

SEQ ID NO: 4176 - protein, 841 aa, synthetic construct
  REGION 1..841: note = Variant of DNA polymerase I from Thermus sp. strain 2.9
MHHHHHHGGSGVLPVFEPKGRVLLVDGHHLAYRNFFALKGLTTSLGEPVQGVYGFAKSLLKALKEDGDVVIVVFDAKAPSFRHEAYEAYKAGRAPTPEDFPRQLALMKELVDLLGLERLEVPGFEADDVLATLAKKAEREGYEVQILTADRDLFQLLSPRISVLHPEGHRITPEWLWEKYGLRPEQWVDFRALAGDPSDNIPGVKGIGEKTALKLLKEWGSLENLLKNLDQVKPESVREKILAHLEDLKLSRELSRVRTDLPLEVDFGRRREPDWEGLKAFLERLEFGSLLHEFGLLESPLLAEEAPWPPPEGAFLGYRLSRPEPMWAELLALAASAQGRVYRAEDPHGALRGLFEVRGLLAKDLAVVALREGLDLPPTDDPMLLAYLLDPSNTTPEGVARRYGGEWTEDAAKRALLAERLHANLLGRLQGEERLLWLYEEVEKPLSRVLAHMEATGVKLDVAYLENLSLEVAAHMRRLEEEVLRLAGRSFRLNSRDQLERVLFDELGLPPIGKTEKTGKRSTSAAVLEALREVHPIVDKILQYRELAKLKGTYIDRLPALVHPKTGRLHTRFNQTATATGRLSSSDPNLQNIPVRTPLGQKIRRAFVAEEGWRLVALDYRQIELRVLAHLSGDENLIRVFQEGKDIHTQTASWMFGLSAEAIDPLMRRAAKTINFGVLYGMSAFRLSQELGIPYEEAQAFIQKYFQSYPKVKAWIEKTLREGRTRGYVETLFGRRRYVPDLNARVKGKREAAERMAFNMPVQGTAADLMKLAMVRLFPQLREVGARMLLQVHDELLLEAPKERAEEVAALAKEVMEGVWPLAVPLEVEVGIGEDWLAAKG

SEQ ID NO: 4177 - DNA, 2523 bp, synthetic construct
  misc_feature 1..2523: note = Variant of DNA polymerase I from Thermus sp. strain 2.9
  source 1..2523: mol_type = other DNA
atgcaccatcatcatcatcatggcggtagcggcgtgttaccggtgttcgagcctaaaggtcgcgtgcttctggttgatggccatcatctcgcgtatcgtaacttctttgccctgaaaggattaaccaccagcctgggcgagccggtacagggtgtctacggctttgcaaagtcgctcctgaaagctctgaaagaagacggtgatgtggtgattgttgtctttgatgcgaaagcgccaagttttcgccacgaagcgtacgaagcttacaaagccgggcgtgctccaacgccggaagactttcctcgccaattggcgcttatgaaggaattagtggatttgcttggcctcgaacgcttggaagttcccggtttcgaggcagacgacgtattagcgactctcgcaaagaaagccgaacgtgagggctatgaagtccagatcttgacagcagatcgcgatcttttccagcttttatctccgcgcatctcggtgttacacccggaagggcatcgtatcaccccggaatggctctgggagaaatatggtttgcgtcccgaacaatgggtggattttcgcgccttagcaggcgatccgagcgacaatattccgggagttaaaggtatcggcgagaagacggcgctcaagctccttaaagaatgggggtcgttggagaacttgcttaagaatttagatcaggtcaaaccagagtcagtgcgtgagaagattcttgctcacctcgaagacctcaaattaagccgcgaattgtcccgtgtacgcaccgatttgccgctcgaagttgatttcggtcgccgccgcgaacctgactgggagggtcttaaagcgtttttagagcgtcttgaatttggttcgctcttgcatgaattcggccttttagaaagcccgttactggccgaagaagcaccttggccaccgcccgagggcgcgtttttaggttaccgtttgagtcgcccggaaccgatgtgggccgaattactggctcttgcagcgtctgcccagggacgtgtgtatcgcgcggaagaccctcatggtgcgctccgcggcctcttcgaagtccgtggactccttgccaaagacttagctgttgttgcattgcgcgaaggtcttgatttacctccgactgatgatccaatgcttcttgcgtacctcttggacccgtcaaacacgacgcccgaaggcgtagcccgtcgttacggcggcgagtggaccgaagatgcagcgaaacgcgcgttattggccgaacgtttgcacgccaatttattaggacgtttgcaaggcgaggaacgtctcctctggctttacgaagaagtggagaaaccattgagtcgcgtgctcgcgcatatggaagctaccggtgtcaaattagacgtggcgtatttggagaatctcagccttgaagttgctgcccacatgcgccgcttggaggaagaagtattccgtttagcaggcctgtcctttcgccttaactctcgcgatcagttagaacgtgtgttgttcgatgaacttggtctccctcctatcggcaagacagagaagaccggtaaacgtagcacttcagcggcggttttagaagctcttcgcgaagtccatcccattgtggacaagatcttgcagtaccgcgaactcgcgaaattgaaaggcacctatattgaccgtcttccggcattagtccacccgaaaacgggacgcctccatacccgcttcaaccaaacagccacggcgaccggtcgtttgtcctcctctgatccaaaccttcagaatattccagtacgtaccccattgggccagaagatccgccgtgcgtttgtagctgaggagggttggcgtttagtggccctcgattatcgtcaaattgaattacgtgtccttgcccatctttctggcgatgagaacctcatccgcgtgtttcaggaaggcaaagacattcacactcaaacggcaagctggatgtttggattatcagctgaagcgatcgatcctttgatgcgtcgtgcagcgaagaccatcaatttcggtgttctctacggtatgagtgcctttcgtttgtcgcaggaattaggcattccctatgaagaagctcaggcgttcattcagaaatactttcaaagctatcccaaagttaaagcatggatcgagaagactctccgtgaaggccgcacacgtggttacgtagagaccttatttggacgtcgccgctatgttcccgatttaaacgctcgcgtgaaaggcaagcgtgaagccgccgaacgcatggcgttcaacatgcctgtacagggcacggcagctgacctcatgaaacttgcaatggtgcgcctttttccacaattgcgtgaagttggtgcccgcatgctcttgcaggtccacgatgaactcttgttagaagcgccaaaagagcgtgcggaagaggtggcagccctcgcgaaagaagttatggaaggcgtgtggcccttagcggtgcctcttgaagtcgaagttggtattggcgaggattggctggctgccaaagga

SEQ ID NO: 4178 - protein, 841 aa, synthetic construct
  REGION 1..841: note = Variant of DNA polymerase I from Thermus sp. strain 2.9
MHHHHHHGGSGVLPVFEPKGRVLLVDGHHLAYRNFFALKGLTTSLGEPVQGVYGFAKSLLKALKEDGDVVIVVFDAKAPSFRHEAYEAYKAGRAPTPEDFPRQLALMKELVDLLGLERLEVPGFEADDVLATLAKKAEREGYEVQILTADRDLFQLLSPRISVLHPEGHRITPEWLWEKYGLRPEQWVDFRALAGDPSDNIPGVKGIGEKTALKLLKEWGSLENLLKNLDQVKPESVREKILAHLEDLKLSRELSRVRTDLPLEVDFGRRREPDWEGLKAFLERLEFGSLLHEFGLLESPLLAEEAPWPPPEGAFLGYRLSRPEPMWAELLALAASAQGRVYRAEDPHGALRGLFEVRGLLAKDLAVVALREGLDLPPTDDPMLLAYLLDPSNTTPEGVARRYGGEWTEDAAKRALLAERLHANLLGRLQGEERLLWLYEEVEKPLSRVLAHMEATGVKLDVAYLENLSLEVAAHMRRLEEEVFRLAGLSFRLNSRDQLERVLFDELGLPPIGKTEKTGKRSTSAAVLEALREVHPIVDKILQYRELAKLKGTYIDRLPALVHPKTGRLHTRFNQTATATGRLSSSDPNLQNIPVRTPLGQKIRRAFVAEEGWRLVALDYRQIELRVLAHLSGDENLIRVFQEGKDIHTQTASWMFGLSAEAIDPLMRRAAKTINFGVLYGMSAFRLSQELGIPYEEAQAFIQKYFQSYPKVKAWIEKTLREGRTRGYVETLFGRRRYVPDLNARVKGKREAAERMAFNMPVQGTAADLMKLAMVRLFPQLREVGARMLLQVHDELLLEAPKERAEEVAALAKEVMEGVWPLAVPLEVEVGIGEDWLAAKG

SEQ ID NO: 4179 - DNA, 2523 bp, synthetic construct
  misc_feature 1..2523: note = Variant of DNA polymerase I from Thermus sp. strain 2.9
  source 1..2523: mol_type = other DNA
atgcaccatcatcatcatcatggcggtagcggcgtgttaccggtgttcgagcctaaaggtcgcgtgcttctggttgatggccatcatctcgcgtatcgtaacttctttgccctgaaaggattaaccaccagcctgggcgagccggtacagggtgtctacggctttgcaaagtcgctcctgaaagctctgaaagaagacggtgatgtggtgattgttgtctttgatgcgaaagcgccaagttttcgccacgaagcgtacgaagcttacaaagccgggcgtgctccaacgccggaagactttcctcgccaattggcgcttatgaaggaattagtggatttgcttggcctcgaacgcttggaagttcccggtttcgaggcagacgacgtattagcgactctcgcaaagaaagccgaacgtgagggctatgaagtccagatcttgacagcagatcgcgatcttttccagcttttatctccgcgcatctcggtgttacacccggaagggcatcgtatcaccccggaatggctctgggagaaatatggtttgcgtcccgaacaatgggtggattttcgcgccttagcaggcgatccgagcgacaatattccgggagttaaaggtatcggcgagaagacggcgctcaagctccttaaagaatgggggtcgttggagaacttgcttaagaatttagatcaggtcaaaccagagtcagtgcgtgagaagattcttgctcacctcgaagacctcaaattaagccgcgaattgtcccgtgtacgcaccgatttgccgctcgaagttgatttcggtcgccgccgcgaacctgactgggagggtcttaaagcgtttttagagcgtcttgaatttggttcgctcttgcatgaattcggccttttagaaagcccgttactggccgaagaagcaccttggccaccgcccgagggcgcgtttttaggttaccgtttgagtcgcccggaaccgatgtgggccgaattactggctcttgcagcgtctgcccagggacgtgtgtatcgcgcggaagaccctcatggtgcgctccgcggcctcttcgaagtccgtggactccttgccaaagacttagctgttgttgcattgcgcgaaggtcttgatttacctccgactgatgatccaatgcttcttgcgtacctcttggacccgtcaaacacgacgcccgaaggcgtagcccgtcgttacggcggcgagtggaccgaagatgcagcgaaacgcgcgttattggccgaacgtttgcacgccaatttattaggacgtttgcaaggcgaggaacgtctcctctggctttacgaagaagtggagaaaccattgagtcgcgtgctcgcgcatatggaagctaccggtgtcaaattagacgtggcgtatttggagaatctcagccttgaagttgctgcccacatgcgccgcttggaggaagaagtattccgtttagcaggccgttcctggcgccttaactctcgcgatcagttagaacgtgtgttgttcgatgaacttggtctccctcctatcggcaagacagagaagaccggtaaacgtagcacttcagcggcggttttagaagctcttcgcgaagtccatcccattgtggacaagatcttgcagtaccgcgaactcgcgaaattgaaaggcacctatattgaccgtcttccggcattagtccacccgaaaacgggacgcctccatacccgcttcaaccaaacagccacggcgaccggtcgtttgtcctcctctgatccaaaccttcagaatattccagtacgtaccccattgggccagaagatccgccgtgcgtttgtagctgaggagggttggcgtttagtggccctcgattatcgtcaaattgaattacgtgtccttgcccatctttctggcgatgagaacctcatccgcgtgtttcaggaaggcaaagacattcacactcaaacggcaagctggatgtttggattatcagctgaagcgatcgatcctttgatgcgtcgtgcagcgaagaccatcaatttcggtgttctctacggtatgagtgcctttcgtttgtcgcaggaattaggcattccctatgaagaagctcaggcgttcattcagaaatactttcaaagctatcccaaagttaaagcatggatcgagaagactctccgtgaaggccgcacacgtggttacgtagagaccttatttggacgtcgccgctatgttcccgatttaaacgctcgcgtgaaaggcaagcgtgaagccgccgaacgcatggcgttcaacatgcctgtacagggcacggcagctgacctcatgaaacttgcaatggtgcgcctttttccacaattgcgtgaagttggtgcccgcatgctcttgcaggtccacgatgaactcttgttagaagcgccaaaagagcgtgcggaagaggtggcagccctcgcgaaagaagttatggaaggcgtgtggcccttagcggtgcctcttgaagtcgaagttggtattggcgaggattggctggctgccaaagga

SEQ ID NO: 4180 - protein, 841 aa, synthetic construct
  REGION 1..841: note = Variant of DNA polymerase I from Thermus sp. strain 2.9
MHHHHHHGGSGVLPVFEPKGRVLLVDGHHLAYRNFFALKGLTTSLGEPVQGVYGFAKSLLKALKEDGDVVIVVFDAKAPSFRHEAYEAYKAGRAPTPEDFPRQLALMKELVDLLGLERLEVPGFEADDVLATLAKKAEREGYEVQILTADRDLFQLLSPRISVLHPEGHRITPEWLWEKYGLRPEQWVDFRALAGDPSDNIPGVKGIGEKTALKLLKEWGSLENLLKNLDQVKPESVREKILAHLEDLKLSRELSRVRTDLPLEVDFGRRREPDWEGLKAFLERLEFGSLLHEFGLLESPLLAEEAPWPPPEGAFLGYRLSRPEPMWAELLALAASAQGRVYRAEDPHGALRGLFEVRGLLAKDLAVVALREGLDLPPTDDPMLLAYLLDPSNTTPEGVARRYGGEWTEDAAKRALLAERLHANLLGRLQGEERLLWLYEEVEKPLSRVLAHMEATGVKLDVAYLENLSLEVAAHMRRLEEEVFRLAGRSWRLNSRDQLERVLFDELGLPPIGKTEKTGKRSTSAAVLEALREVHPIVDKILQYRELAKLKGTYIDRLPALVHPKTGRLHTRFNQTATATGRLSSSDPNLQNIPVRTPLGQKIRRAFVAEEGWRLVALDYRQIELRVLAHLSGDENLIRVFQEGKDIHTQTASWMFGLSAEAIDPLMRRAAKTINFGVLYGMSAFRLSQELGIPYEEAQAFIQKYFQSYPKVKAWIEKTLREGRTRGYVETLFGRRRYVPDLNARVKGKREAAERMAFNMPVQGTAADLMKLAMVRLFPQLREVGARMLLQVHDELLLEAPKERAEEVAALAKEVMEGVWPLAVPLEVEVGIGEDWLAAKG

SEQ ID NO: 4181 - DNA, 2523 bp, synthetic construct
  misc_feature 1..2523: note = Variant of DNA polymerase I from Thermus sp. strain 2.9
  source 1..2523: mol_type = other DNA
atgcaccatcatcatcatcatggcggtagcggcgtgttaccggtgttcgagcctaaaggtcgcgtgcttctggttgatggccatcatctcgcgtatcgtaacttctttgccctgaaaggattaaccaccagcctgggcgagccggtacagggtgtctacggctttgcaaagtcgctcctgaaagctctgaaagaagacggtgatgtggtgattgttgtctttgatgcgaaagcgccaagttttcgccacgaagcgtacgaagcttacaaagccgggcgtgctccaacgccggaagactttcctcgccaattggcgcttatgaaggaattagtggatttgcttggcctcgaacgcttggaagttcccggtttcgaggcagacgacgtattagcgactctcgcaaagaaagccgaacgtgagggctatgaagtccagatcttgacagcagatcgcgatcttttccagcttttatctccgcgcatctcggtgttacacccggaagggcatcgtatcaccccggaatggctctgggagaaatatggtttgcgtcccgaacaatgggtggattttcgcgccttagcaggcgatccgagcgacaatattccgggagttaaaggtatcggcgagaagacggcgctcaagctccttaaagaatgggggtcgttggagaacttgcttaagaatttagatcaggtcaaaccagagtcagtgcgtgagaagattcttgctcacctcgaagacctcaaattaagccgcgaattgtcccgtgtacgcaccgatttgccgctcgaagttgatttcggtcgccgccgcgaacctgactgggagggtcttaaagcgtttttagagcgtcttgaatttggttcgctcttgcatgaattcggccttttagaaagcccgttactggccgaagaagcaccttggccaccgcccgagggcgcgtttttaggttaccgtttgagtcgcccggaaccgatgtgggccgaattactggctcttgcagcgtctgcccagggacgtgtgtatcgcgcggaagaccctcatggtgcgctccgcggcctcttcgaagtccgtggactccttgccaaagacttagctgttgttgcattgcgcgaaggtcttgatttacctccgactgatgatccaatgcttcttgcgtacctcttggacccgtcaaacacgacgcccgaaggcgtagcccgtcgttacggcggcgagtggaccgaagatgcagcgaaacgcgcgttattggccgaacgtttgcacgaaaaattattaggacgtttgcaaggcgaggaacgtctcctctggctttacgaagaagtggagaaaccattgagtcgcgtgctcgcgcatatggaagctaccggtgtcaaattagacgtggcgtatttggagaatctcagccttgaagttgctgcccacatgcgccgcttggaggaagaagtattccgtttagcaggccgttcctttcgccttaactctcgcgatcagttagaacgtgtgttgttcgatgaacttggtctccctcctatcggcaagacagagaagaccggtaaacgtagcacttcagcggcggttttagaagctcttcgcgaagtccatcccattgtggacaagatcttgcagtaccgcgaaatggcgaaattgaaaggcacctatattgaccgtcttccggcattagtccacccgaaaacgggacgcctccatacccgcttcaaccaaacagccacggcgaccggtcgtttgtcctcctctgatccaaaccttcagaatattccagtacgtaccccattgggccagaagatccgccgtgcgtttgtagctgaggagggttggcgtttagtggccctcgattatcgtcaaattgaattacgtgtccttgcccatctttctggcgatgagaacctcatccgcgtgtttcaggaaggcaaagacattcacactcaaacggcaagctggatgtttggattatcagctgaagcgatcgatcctttgatgcgtcgtgcagcgaagaccatcaatttcggtgttctctacggtatgagtgcctttcgtttgtcgcaggaattaggcattccctatgaagaagctcaggcgttcattcagaaatactttcaaagctatcccaaagttaaagcatggatcgagaagactctccgtgaaggccgcacacgtggttacgtagagaccttatttggacgtcgccgctatgttcccgatttaaacgctcgcgtgaaaggcaagcgtgaagccgccgaacgcatggcgttcaacatgcctgtacagggcacggcagctgacctcatgaaacttgcaatggtgcgcctttttccacaattgcgtgaagttggtgcccgcatgctcttgcaggtccacgatgaactcttgttagaagcgccaaaagagcgtgcggaagaggtggcagccctcgcgaaagaagttatggaaggcgtgtggcccttagcggtgcctcttgaagtcgaagttggtattggcgaggattggctggctgccaaagga

SEQ ID NO: 4182 - protein, 841 aa, synthetic construct
  REGION 1..841: note = Variant of DNA polymerase I from Thermus sp. strain 2.9
MHHHHHHGGSGVLPVFEPKGRVLLVDGHHLAYRNFFALKGLTTSLGEPVQGVYGFAKSLLKALKEDGDVVIVVFDAKAPSFRHEAYEAYKAGRAPTPEDFPRQLALMKELVDLLGLERLEVPGFEADDVLATLAKKAEREGYEVQILTADRDLFQLLSPRISVLHPEGHRITPEWLWEKYGLRPEQWVDFRALAGDPSDNIPGVKGIGEKTALKLLKEWGSLENLLKNLDQVKPESVREKILAHLEDLKLSRELSRVRTDLPLEVDFGRRREPDWEGLKAFLERLEFGSLLHEFGLLESPLLAEEAPWPPPEGAFLGYRLSRPEPMWAELLALAASAQGRVYRAEDPHGALRGLFEVRGLLAKDLAVVALREGLDLPPTDDPMLLAYLLDPSNTTPEGVARRYGGEWTEDAAKRALLAERLHEKLLGRLQGEERLLWLYEEVEKPLSRVLAHMEATGVKLDVAYLENLSLEVAAHMRRLEEEVFRLAGRSFRLNSRDQLERVLFDELGLPPIGKTEKTGKRSTSAAVLEALREVHPIVDKILQYREMAKLKGTYIDRLPALVHPKTGRLHTRFNQTATATGRLSSSDPNLQNIPVRTPLGQKIRRAFVAEEGWRLVALDYRQIELRVLAHLSGDENLIRVFQEGKDIHTQTASWMFGLSAEAIDPLMRRAAKTINFGVLYGMSAFRLSQELGIPYEEAQAFIQKYFQSYPKVKAWIEKTLREGRTRGYVETLFGRRRYVPDLNARVKGKREAAERMAFNMPVQGTAADLMKLAMVRLFPQLREVGARMLLQVHDELLLEAPKERAEEVAALAKEVMEGVWPLAVPLEVEVGIGEDWLAAKG

SEQ ID NO: 4183 - DNA, 2523 bp, synthetic construct
  misc_feature 1..2523: note = Variant of DNA polymerase I from Thermus sp. strain 2.9
  source 1..2523: mol_type = other DNA
atgcaccatcatcatcatcatggcggtagcggcgtgttaccggtgttcgagcctaaaggtcgcgtgcttctggttgatggccatcatctcgcgtatcgtaacttctttgccctgaaaggattaaccaccagcctgggcgagccggtacagggtgtctacggctttgcaaagtcgctcctgaaagctctgaaagaagacggtgatgtggtgattgttgtctttgatgcgaaagcgccaagttttcgccacgaagcgtacgaagcttacaaagccgggcgtgctccaacgccggaagactttcctcgccaattggcgcttatgaaggaattagtggatttgcttggcctcgaacgcttggaagttcccggtttcgaggcagacgacgtattagcgactctcgcaaagaaagccgaacgtgagggctatgaagtccagatcttgacagcagatcgcgatcttttccagcttttatctccgcgcatctcggtgttacacccggaagggcatcgtatcaccccggaatggctctgggagaaatatggtttgcgtcccgaacaatgggtggattttcgcgccttagcaggcgatccgagcgacaatattccgggagttaaaggtatcggcgagaagacggcgctcaagctccttaaagaatgggggtcgttggagaacttgcttaagaatttagatcaggtcaaaccagagtcagtgcgtgagaagattcttgctcacctcgaagacctcaaattaagccgcgaattgtcccgtgtacgcaccgatttgccgctcgaagttgatttcggtcgccgccgcgaacctgactgggagggtcttaaagcgtttttagagcgtcttgaatttggttcgctcttgcatgaattcggccttttagaaagcccgttactggccgaagaagcaccttggccaccgcccgagggcgcgtttttaggttaccgtttgagtcgcccggaaccgatgtgggccgaattactggctcttgcagcgtctgcccagggacgtgtgtatcgcgcggaagaccctcatggtgcgctccgcggcctcttcgaagtccgtggactccttgccaaagacttagctgttgttgcattgcgcgaaggtcttgatttacctccgactgatgatccaatgcttcttgcgtacctcttggacccgtcaaacacgacgcccgaaggcgtagcccgtcgttacggcggcgagtggaccgaagatgcagcgaaacgcgcgttattggccgaacgtttgcacgccaatttattaggacgtttgcaaggcgaggaacgtctcctctggctttacgaagaagtggagaaaccattgagtcgcgtgctcgcgcatatggaagctaccggtgtcaaattagacgtggcgtatttggagaatctcagccttgaagttgctgcccacatgcgccgcttggaggaagaagtattccgtttagcaggccgttcctttcgccttaactctcgcgatcagttagaacgtgtgttgttcgatgaacttggtctccctcctatcggcaagacagagaagaccggtaaacgtagcacttcagcggcggttttagaagctcttcgctgggtccatcccattgtggacaagatcttgcagtaccgcgaactcgcgaaattgaaaggcacctatattgaccgtcttccggcattagtccacccgaaaacgggacgcctccatacccgcttcaaccaaacagccacggcgaccggtcgtttgtcctcctctgatccaaaccttcagaatattccagtacgtaccccattgggccagaagatccgccgtgcgtttgtagctgaggagggttggcgtttagtggccctcgattatcgtcaaattgaattacgtgtccttgcccatctttctggcgatgagaacctcatccgcgtgtttcaggaaggcaaagacattcacactcaaacggcaagctggatgtttggattatcagctgaagcgatcgatcctttgatgcgtcgtgcagcgaagaccatcaatttcggtgttctctacggtatgagtgcctttcgtttgtcgcaggaattaggcattccctatgaagaagctcaggcgttcattcagaaatactttcaaagctatcccaaagttaaagcatggatcgagaagactctccgtgaaggccgcacacgtggttacgtagagaccttatttggacgtcgccgctatgttcccgatttaaacgctcgcgtgaaaggcaagcgtgaagccgccgaacgcatggcgttcaacatgcctgtacagggcacggcagctgacctcatgaaacttgcaatggtgcgcctttttccacaattgcgtgaagttggtgcccgcatgctcttgcaggtccacgatgaactcttgttagaagcgccaaaagagcgtgcggaagaggtggcagccctcgcgaaagaagttatggaaggcgtgtggcccttagcggtgcctcttgaagtcgaagttggtattggcgaggattggctggctgccaaagga

SEQ ID NO: 4184 - protein, 841 aa, synthetic construct
  REGION 1..841: note = Variant of DNA polymerase I from Thermus sp. strain 2.9
MHHHHHHGGSGVLPVFEPKGRVLLVDGHHLAYRNFFALKGLTTSLGEPVQGVYGFAKSLLKALKEDGDVVIVVFDAKAPSFRHEAYEAYKAGRAPTPEDFPRQLALMKELVDLLGLERLEVPGFEADDVLATLAKKAEREGYEVQILTADRDLFQLLSPRISVLHPEGHRITPEWLWEKYGLRPEQWVDFRALAGDPSDNIPGVKGIGEKTALKLLKEWGSLENLLKNLDQVKPESVREKILAHLEDLKLSRELSRVRTDLPLEVDFGRRREPDWEGLKAFLERLEFGSLLHEFGLLESPLLAEEAPWPPPEGAFLGYRLSRPEPMWAELLALAASAQGRVYRAEDPHGALRGLFEVRGLLAKDLAVVALREGLDLPPTDDPMLLAYLLDPSNTTPEGVARRYGGEWTEDAAKRALLAERLHANLLGRLQGEERLLWLYEEVEKPLSRVLAHMEATGVKLDVAYLENLSLEVAAHMRRLEEEVFRLAGRSFRLNSRDQLERVLFDELGLPPIGKTEKTGKRSTSAAVLEALRWVHPIVDKILQYRELAKLKGTYIDRLPALVHPKTGRLHTRFNQTATATGRLSSSDPNLQNIPVRTPLGQKIRRAFVAEEGWRLVALDYRQIELRVLAHLSGDENLIRVFQEGKDIHTQTASWMFGLSAEAIDPLMRRAAKTINFGVLYGMSAFRLSQELGIPYEEAQAFIQKYFQSYPKVKAWIEKTLREGRTRGYVETLFGRRRYVPDLNARVKGKREAAERMAFNMPVQGTAADLMKLAMVRLFPQLREVGARMLLQVHDELLLEAPKERAEEVAALAKEVMEGVWPLAVPLEVEVGIGEDWLAAKG

SEQ ID NO: 4185 - DNA, 2523 bp, synthetic construct
  misc_feature 1..2523: note = Variant of DNA polymerase I from Thermus sp. strain 2.9
  source 1..2523: mol_type = other DNA
atgcaccatcatcatcatcatggcggtagcggcgtgttaccggtgttcgagcctaaaggtcgcgtgcttctggttgatggccatcatctcgcgtatcgtaacttctttgccctgaaaggattaaccaccagcctgggcgagccggtacagggtgtctacggctttgcaaagtcgctcctgaaagctctgaaagaagacggtgatgtggtgattgttgtctttgatgcgaaagcgccaagttttcgccacgaagcgtacgaagcttacaaagccgggcgtgctccaacgccggaagactttcctcgccaattggcgcttatgaaggaattagtggatttgcttggcctcgaacgcttggaagttcccggtttcgaggcagacgacgtattagcgactctcgcaaagaaagccgaacgtgagggctatgaagtccagatcttgacagcagatcgcgatcttttccagcttttatctccgcgcatctcggtgttacacccggaagggcatcgtatcaccccggaatggctctgggagaaatatggtttgcgtcccgaacaatgggtggattttcgcgccttagcaggcgatccgagcgacaatattccgggagttaaaggtatcggcgagaagacggcgctcaagctccttaaagaatgggggtcgttggagaacttgcttaagaatttagatcaggtcaaaccagagtcagtgcgtgagaagattcttgctcacctcgaagacctcaaattaagccgcgaattgtcccgtgtacgcaccgatttgccgctcgaagttgatttcggtcgccgccgcgaacctgactgggagggtcttaaagcgtttttagagcgtcttgaatttggttcgctcttgcatgaattcggccttttagaaagcccgttactggccgaagaagcaccttggccaccgcccgagggcgcgtttttaggttaccgtttgagtcgcccggaaccgatgtgggccgaattactggctcttgcagcgtctgcccagggacgtgtgtatcgcgcggaagaccctcatggtgcgctccgcggcctcttcgaagtccgtggactccttgccaaagacttagctgttgttgcattgcgcgaaggtcttgatttacctccgactgatgatccaatgcttcttgcgtacctcttggacccgtcaaacacgacgcccgaaggcgtagcccgtcgttacggcggcgagtggaccgaagatgcagcgaaacgcgcgttattggccgaacgtttgcacgccaatttattaggacgtttgcaaggcgaggaacgtctcctctggctttacgaagaagtggagaaaccattgagtcgcgtgctcgcgcatatggaagctaccggtgtcaaattagacgtggcgtatttggagaatctcagccttgaagttgctgcccacatgcgccgcttggaggaagaagtattccgtttagcaggccgttcctttcgccttaactctcgcgatcagttagaacgtgtgttgttcgatgaacttggtctccctcctatcggcaagacagagaagaccggtaaacgtagcacttcagcggcggttttagaagctcttcgcgaagtccatcccattgtggacaagatcttgcagtaccgctgtctcgcgaaattgaaaggcacctatattgaccgtcttccggcattagtccacccgaaaacgggacgcctccatacccgcttcaaccaaacagccacggcgaccggtcgtttgtcctcctctgatccaaaccttcagaatattccagtacgtaccccattgggccagaagatccgccgtgcgtttgtagctgaggagggttggcgtttagtggccctcgattatcgtcaaattgaattacgtgtccttgcccatctttctggcgatgagaacctcatccgcgtgtttcaggaaggcaaagacattcacactcaaacggcaagctggatgtttggattatcagctgaagcgatcgatcctttgatgcgtcgtgcagcgaagaccatcaatttcggtgttctctacggtatgagtgcctttcgtttgtcgcaggaattaggcattccctatgaagaagctcaggcgttcattcagaaatactttcaaagctatcccaaagttaaagcatggatcgagaagactctccgtgaaggccgcacacgtggttacgtagagaccttatttggacgtcgccgctatgttcccgatttaaacgctcgcgtgaaaggcaagcgtgaagccgccgaacgcatggcgttcaacatgcctgtacagggcacggcagctgacctcatgaaacttgcaatggtgcgcctttttccacaattgcgtgaagttggtgcccgcatgctcttgcaggtccacgatgaactcttgttagaagcgccaaaagagcgtgcggaagaggtggcagccctcgcgaaagaagttatggaaggcgtgtggcccttagcggtgcctcttgaagtcgaagttggtattggcgaggattggctggctgccaaagga

SEQ ID NO: 4186 - protein, 841 aa, synthetic construct
  REGION 1..841: note = Variant of DNA polymerase I from Thermus sp. strain 2.9
MHHHHHHGGSGVLPVFEPKGRVLLVDGHHLAYRNFFALKGLTTSLGEPVQGVYGFAKSLLKALKEDGDVVIVVFDAKAPSFRHEAYEAYKAGRAPTPEDFPRQLALMKELVDLLGLERLEVPGFEADDVLATLAKKAEREGYEVQILTADRDLFQLLSPRISVLHPEGHRITPEWLWEKYGLRPEQWVDFRALAGDPSDNIPGVKGIGEKTALKLLKEWGSLENLLKNLDQVKPESVREKILAHLEDLKLSRELSRVRTDLPLEVDFGRRREPDWEGLKAFLERLEFGSLLHEFGLLESPLLAEEAPWPPPEGAFLGYRLSRPEPMWAELLALAASAQGRVYRAEDPHGALRGLFEVRGLLAKDLAVVALREGLDLPPTDDPMLLAYLLDPSNTTPEGVARRYGGEWTEDAAKRALLAERLHANLLGRLQGEERLLWLYEEVEKPLSRVLAHMEATGVKLDVAYLENLSLEVAAHMRRLEEEVFRLAGRSFRLNSRDQLERVLFDELGLPPIGKTEKTGKRSTSAAVLEALREVHPIVDKILQYRCLAKLKGTYIDRLPALVHPKTGRLHTRFNQTATATGRLSSSDPNLQNIPVRTPLGQKIRRAFVAEEGWRLVALDYRQIELRVLAHLSGDENLIRVFQEGKDIHTQTASWMFGLSAEAIDPLMRRAAKTINFGVLYGMSAFRLSQELGIPYEEAQAFIQKYFQSYPKVKAWIEKTLREGRTRGYVETLFGRRRYVPDLNARVKGKREAAERMAFNMPVQGTAADLMKLAMVRLFPQLREVGARMLLQVHDELLLEAPKERAEEVAALAKEVMEGVWPLAVPLEVEVGIGEDWLAAKG

SEQ ID NO: 4187 - DNA, 2523 bp, synthetic construct
  misc_feature 1..2523: note = Variant of DNA polymerase I from Thermus sp. strain 2.9
  source 1..2523: mol_type = other DNA
atgcaccatcatcatcatcatggcggtagcggcgtgttaccggtgttcgagcctaaaggtcgcgtgcttctggttgatggccatcatctcgcgtatcgtaacttctttgccctgaaaggattaaccaccagcctgggcgagccggtacagggtgtctacggctttgcaaagtcgctcctgaaagctctgaaagaagacggtgatgtggtgattgttgtctttgatgcgaaagcgccaagttttcgccacgaagcgtacgaagcttacaaagccgggcgtgctccaacgccggaagactttcctcgccaattggctcttatgaaggaattagtggatttgcttggcctcgaacgcttggaagttcccggtttcgaggcagacgacgtattagcgactctcgcaaagaaagccgaacgtgagggctatgaagtccagatcttgacagcagatcgcgatcttttccagcttttatctccgcgcatctcggtgttacacccggaagggcatcgtatcaccccggaatggctctgggagaaatatggtttgcgtcccgaacaatgggtggattttcgcgccttagcaggcgatccgagcgacaatattccgggagttaaaggtatcggcgagaagacggcgctcaagctccttaaagaatgggggtcgttggagaacttgcttaagaatttagatcaggtcaaaccagagtcagtgcgtgagaagattcttgctcacctcgaagacctcgagttaagccgcgaattgtcccgtgtacgcaccgatttgccgctcgaagttgatttcggtcgccgccgcgaacctgactgggagggtcttaaagcgtttttagagcgtcttgaatttggttcgctcttgcatgaattcggccttttagaaagcccgttactggccgaagaagcaccttggccaccgcccgagggcgcgtttttaggttaccgtttgagtcgcccggaaccgatgtgggccgaattactggctcttgcagcgtctgcccagggacgtgtgtatcgcgcggaagaccctcatggtgcgctccgcggcctcttcgaagtccgtggactccttgccaaagacttagctgttgttgcattgcgcgaaggtcttgatttacctccgactgatgatccaatgcttcttgcgtacctcttggacccgtcaaacacgacgcccgaaggcgtagcccgtcgttacggcggcgagtggaccgaagatgcagcgaaacgcgcgttattggccgaacgtttgcacgccaatttattaggacgtttgcaaggcgaggaacgtctcctctggctttacgaagaagtggagaaaccattgagtgtggtgctcggtcatatggaagctaccggtgtcaaattagacgtggcgtatttggagaatctcagccttgaagttgctgcccacatgcgccgcttggaggaagaagtattccgtttagcaggccgttcctttcgccttaactctcgcgatcagttagaacgtgtgttgttcgatgaacttggtctccctcctatcggcaagacagagaagaccggtaaacgtagcacttcagcggcggttttagaagctcttcgcgaagtccatcccattgtggacaagatcttgcagtaccgcgaaatggcgaaattgaaaggcacctatattgaccgtcttccggcattagtccacccgaaaacgggacgcctccatacccgcttcaaccaaacagccacggcgaccggtcgtttgtcctcctctgatccaaaccttcagaatattccagtacgtaccccattgggccagaagatccgccgtgcgtttgtagctgaggagggttggcgtttagtggccctcgattatcgtcaaattgaattacgtgtccttgcccatctttctggcgatgagaacctcatccgcgtgtttcaggaaggcaaagacattcacactcaaacggcaagctggatgtttggattaggcgctgaagcgatcgatcctttgatgcgtcgtgcagcgaagaccatcaatttcggtgttctctacggtatgagtgcctttcgtttgtcgcaggaattaggcattccctatgaagaagctcaggcgttcattcagaaatactttcaaagctatcccaaagttaaagcatggatcgagaagactctccgtgaaggccgccaccgtggttacgtagagaccttatttggacgtcgccgctatgttcccgatttaaacgctcgcgtgaaaggcaagcgtgaagccgccgaacgcatggcgttcaacatgcctgtacagggcacggcagctgacctcatgaaacttgcaatggtgcgcctttttccacaattgcgtgaagttggtgcccgcatgctcttgcaggtccacgatgaactcttgttagaagcgccaaaagagcgtgcggaagaggtggcagccctcgcgaaagaagttatggaaggcgtgtggcccttagcggtgcctcttgaagtcgaagttggtattggcgaggattggctggctgccaaagga

SEQ ID NO: 4188 - protein, 841 aa, synthetic construct
  REGION 1..841: note = Variant of DNA polymerase I from Thermus sp. strain 2.9
MHHHHHHGGSGVLPVFEPKGRVLLVDGHHLAYRNFFALKGLTTSLGEPVQGVYGFAKSLLKALKEDGDVVIVVFDAKAPSFRHEAYEAYKAGRAPTPEDFPRQLALMKELVDLLGLERLEVPGFEADDVLATLAKKAEREGYEVQILTADRDLFQLLSPRISVLHPEGHRITPEWLWEKYGLRPEQWVDFRALAGDPSDNIPGVKGIGEKTALKLLKEWGSLENLLKNLDQVKPESVREKILAHLEDLELSRELSRVRTDLPLEVDFGRRREPDWEGLKAFLERLEFGSLLHEFGLLESPLLAEEAPWPPPEGAFLGYRLSRPEPMWAELLALAASAQGRVYRAEDPHGALRGLFEVRGLLAKDLAVVALREGLDLPPTDDPMLLAYLLDPSNTTPEGVARRYGGEWTEDAAKRALLAERLHANLLGRLQGEERLLWLYEEVEKPLSVVLGHMEATGVKLDVAYLENLSLEVAAHMRRLEEEVFRLAGRSFRLNSRDQLERVLFDELGLPPIGKTEKTGKRSTSAAVLEALREVHPIVDKILQYREMAKLKGTYIDRLPALVHPKTGRLHTRFNQTATATGRLSSSDPNLQNIPVRTPLGQKIRRAFVAEEGWRLVALDYRQIELRVLAHLSGDENLIRVFQEGKDIHTQTASWMFGLGAEAIDPLMRRAAKTINFGVLYGMSAFRLSQELGIPYEEAQAFIQKYFQSYPKVKAWIEKTLREGRHRGYVETLFGRRRYVPDLNARVKGKREAAERMAFNMPVQGTAADLMKLAMVRLFPQLREVGARMLLQVHDELLLEAPKERAEEVAALAKEVMEGVWPLAVPLEVEVGIGEDWLAAKG

SEQ ID NO: 4189 - DNA, 2523 bp, synthetic construct
  misc_feature 1..2523: note = Variant of DNA polymerase I from Thermus sp. strain 2.9
  source 1..2523: mol_type = other DNA
catatgcaccatcatcatcatggcggtagcggcgtgttaccggtgttcgagcctaaaggtcgcgtgcttctggttgatggccatcatctcgcgtatcgtaacttctttgccctgaaaggattaaccaccagcctgggcgagccggtacagggtgtctacggctttgcaaagtcgctcctgaaagctctgaaagaagacggtgatgtggtgattgttgtctttgatgcgaaagcgccaagttttcgccacgaagcgtacgaagcttacaaagccgggcgtgctccaacgccggaagactttcctcgccaattggcgcttatgaaggaattagtggatttgcttggcctcgaacgcttggaagttcccggtttcgaggcagacgacgtattagcgactctcgcaaagaaagccgaacgtgagggctatgaagtccagatcttgacaggggatcgcgatcttttccagcttttatctccgcgcatctcggtgttacacccggaagggcatcgtatcaccccggaatggctctgggagaaatatggtttgcgtcccgaacaatgggtggattttcgcgccttagcaggcgatccgagcgacaatattccgggagttaaaggtatcggcgagaagacggcgctcaagctccttaaagaatgggggtcgttggagaacttgcttaagaatttagatcaggtcaaaccagagtcagtgcgtgagaagattcttgctcacctcgaagacctcaaattaagccgcgaattgtcccgtgtacgcaccgatttgccgctcgaagttgatttcggtcgccgccgcgaacctgactgggagggtcttaaagcgtttttagagcgtcttgaatttggttcgctcttgcatgaattcggccttttagaaagcccgttactggccgaagaagcaccttggccaccgcccgagggcgcgtttttaggttaccgtttgagtcgcccggaaccgatgtgggccgaattactggctcttgcagcgtctgcccagggacgtgtgtatcgcgcggaagaccctcatggtgcgctccgcggcctcttcgaagtccgtggactccttgccaaagacttagctgttgttgcattgcgcgaaggtcttgatttacctccgactgatgatccaatgcttcttgcgtacctcttggacccgtcaaacacgacgcccgaaggcgtagcccgtcgttacggcggcgagtggaccgaagatgcagcgaaacgcgcgttattggccgaacgtttgcacgccaatttattaggacgtttgcaaggcgaggaacgtctcctctggctttacgaagaagtggagaaaccattgagtcgcgtgctcgcgcatatggaagctaccggtgtcaaattagacgtggcgtatttggagaatctcagccttgaagttgctgcccacatgcgccgcttggaggaagaagtattccgtttagcaggccgttcctttcgccttaactctcgcgatcagttagaacgtgtgttgttcgatgaacttggtctccctcctatcggcaagacagagaagaccggtaaacgtagcacttcagcggcggttttagaagctcttcgcgaagtccatcccattgtggacaagatcttgcagtaccgcgaactcgcgaaattgaaaggcacctatattgaccgtcttccggcattagtccacccgaaaacgggacgcctccatacccgcttcaaccaaacagccacggcgaccggtcgtttgtcctcctctgatccaaaccttcagaatattccagtacgtaccccattgggccagaagatccgccgtgcgtttgtagctgaggagggttggcgtttagtggccctcgattatcgtcaaattgaattacgtgtccttgcccatctttctggcgatgagaacctcatccgcgtgtttcaggaaggcaaagacattcacactcaaacggcaagctggatgtttggattatcagctgaagcgatcgatcctttgatgcgtcgtgcagcgaagaccatcaatttcggtgttctctacggtatgagtgcctttcgtttgtcgcaggaattaggcattccctatgaagaagctcaggcgttcattcagaaatactttcaaagctatcccaaagttaaagcatggatcgagaagactctccgtgaaggccgcacacgtggttacgtagagaccttatttggacgtcgccgctatgttcccgatttaaacgctcgcgtgaaaggcaagcgtgaagccgccgaacgcatggcgttcaacatgcctgtacagggcacggcagctgacctcatgaaacttgcaatggtgcgcctttttccacaattgcgtgaagttggtgcccgcatgctcttgcaggtccacgatgaactcttgttagaagcgccaaaagagcgtgcggaagaggtggcagccctcgcgaaagaagttatggaaggcgtgtggcccttagcggtgcctcttgaagtcgaagttggtattggcgaggattggctggctgccaaagga

SEQ ID NO: 4190 - protein, 841 aa, synthetic construct
  REGION 1..841: note = Variant of DNA polymerase I from Thermus sp. strain 2.9
HMHHHHHGGSGVLPVFEPKGRVLLVDGHHLAYRNFFALKGLTTSLGEPVQGVYGFAKSLLKALKEDGDVVIVVFDAKAPSFRHEAYEAYKAGRAPTPEDFPRQLALMKELVDLLGLERLEVPGFEADDVLATLAKKAEREGYEVQILTGDRDLFQLLSPRISVLHPEGHRITPEWLWEKYGLRPEQWVDFRALAGDPSDNIPGVKGIGEKTALKLLKEWGSLENLLKNLDQVKPESVREKILAHLEDLKLSRELSRVRTDLPLEVDFGRRREPDWEGLKAFLERLEFGSLLHEFGLLESPLLAEEAPWPPPEGAFLGYRLSRPEPMWAELLALAASAQGRVYRAEDPHGALRGLFEVRGLLAKDLAVVALREGLDLPPTDDPMLLAYLLDPSNTTPEGVARRYGGEWTEDAAKRALLAERLHANLLGRLQGEERLLWLYEEVEKPLSRVLAHMEATGVKLDVAYLENLSLEVAAHMRRLEEEVFRLAGRSFRLNSRDQLERVLFDELGLPPIGKTEKTGKRSTSAAVLEALREVHPIVDKILQYRELAKLKGTYIDRLPALVHPKTGRLHTRFNQTATATGRLSSSDPNLQNIPVRTPLGQKIRRAFVAEEGWRLVALDYRQIELRVLAHLSGDENLIRVFQEGKDIHTQTASWMFGLSAEAIDPLMRRAAKTINFGVLYGMSAFRLSQELGIPYEEAQAFIQKYFQSYPKVKAWIEKTLREGRTRGYVETLFGRRRYVPDLNARVKGKREAAERMAFNMPVQGTAADLMKLAMVRLFPQLREVGARMLLQVHDELLLEAPKERAEEVAALAKEVMEGVWPLAVPLEVEVGIGEDWLAAKG

SEQ ID NO: 4191 - DNA, 2523 bp, synthetic construct
  misc_feature 1..2523: note = Variant of DNA polymerase I from Thermus sp. strain 2.9
  source 1..2523: mol_type = other DNA
atgcaccatcatcatcatcatggcggtagcggcgtgttaccggtgttcgagcctaaaggtcgcgtgcttctggttgatggccatcatctcgcgtatcgtaacttctttgccctgaaaggattaaccaccagcctgggcgagccggtacagggtgtctacggctttgcaaagtcgctcctgaaagctctgaaagaagacggtgatgtggtgattgttgtctttgatgcgaaagcgccaagttttcgccacgaagcgtacgaagcttacaaagccgggcgtgctccaacgccggaagactttcctcgccaattggcgcttatgaaggaattagtggatttgcttggcctcgaacgcttggaagttcccggtttcgaggcagacgacgtattagcgactctcgcaaagaaagccgaacgtgagggctatgaagtccagatcttgacagcagatcgcgatcttttccagcttttatctccgcgcatctcggtgttacacccggaagggcatcgtatcaccccggaatggctctgggagaaatatggtttgcgtcccgaacaatgggtggattttcgcgccttagcaggcgatccgagcgacaatattccgggagttaaaggtatcggcgagaagacggcgctcaagctccttaaagaatgggggtcgttggagaacttgcttaagaatttagatcaggtcaaaccagagtcagtgcgtgagaagattcttgctcacctcgaagacctcaaattaagccgcgaattgtcccgtgtacgcaccgatttgccgctcgaagttgatttcggtcgccgccgcgaacctgactgggagggtcttaaagcgtttttagagcgtcttgaatttggttcgctcttgcatgaattcggccttttagaaagcccgttactggccgaagaagcaccttggccaccgcccgagggcgcgtttttaggttaccgtttgagtcgcccggaaccgatgtgggccgaattactggctcttgcagcgtctgcccagggacgtgtgtatcgcgcggaagaccctcatggtgcgctccgcggcctcttcgaagtccgtggactccttgccaaagacttagctgttgttgcattgcgcgaaggtcttgatttacctccgactgatgatccaatgcttcttgcgtacctcttggacccgtcaaacacgacgcccgaaggcgtagcccgtcgttacggcggcgagtggaccgaagatgcagcgaaacgcgcgttattggccgaacgtttgcacgccaatttattaggacgtttgcaaggcgaggaacgtctcctctggctttacgaagaagtggagaaaccattgagtcgcgtgctcgcgcatatggaagctaccggtgtcaaattagacgtggcgtatttggagaatctcagccttgaagttgctgcccacatgcgccgcttggaggaagaagtattccgtttagcaggccgttcctttcgccttaactctcgcgatcagttagaacgtgtgttgttcgatgaacttggtctccctcctatcggcaagacagagaagaccggtaaacgtagcacttcagcggcggttttagaagctcttcgcgaagtcaatcccattgtggacaagatcttgcagtaccgcgaactcgcgaaattgaaaggcacctatattgaccgtcttccggcattagtccacccgaaaacgggacgcctccatacccgcttcaaccaaacagccacggcgaccggtcgtttgtcctcctctgatccaaaccttcagaatattccagtacgtaccccattgggccagaagatccgccgtgcgtttgtagctgaggagggttggcgtttagtggccctcgattatcgtcaaattgaattacgtgtccttgcccatctttctggcgatgagaacctcatccgcgtgtttcaggaaggcaaagacattcacactcaaacggcaagctggatgtttggattatcagctgaagcgatcgatcctttgatgcgtcgtgcagcgaagaccatcaatttcggtgttctctacggtatgagtgcctttcgtttgtcgcaggaattaggcattccctatgaagaagctcaggcgttcattcagaaatactttcaaagctatcccaaagttaaagcatggatcgagaagactctccgtgaaggccgcacacgtggttacgtagagaccttatttggacgtcgccgctatgttcccgatttaaacgctcgcgtgaaaggcaagcgtgaagccgccgaacgcatggcgttcaacatgcctgtacagggcacggcagctgacctcatgaaacttgcaatggtgcgcctttttccacaattgcgtgaagttggtgcccgcatgctcttgcaggtccacgatgaactcttgttagaagcgccaaaagagcgtgcggaagaggtggcagccctcgcgaaagaagttatggaaggcgtgtggcccttagcggtgcctcttgaagtcgaagttggtattggcgaggattggctggctgccaaagga

SEQ ID NO: 4192 - protein, 841 aa, synthetic construct
  REGION 1..841: note = Variant of DNA polymerase I from Thermus sp. strain 2.9
MHHHHHHGGSGVLPVFEPKGRVLLVDGHHLAYRNFFALKGLTTSLGEPVQGVYGFAKSLLKALKEDGDVVIVVFDAKAPSFRHEAYEAYKAGRAPTPEDFPRQLALMKELVDLLGLERLEVPGFEADDVLATLAKKAEREGYEVQILTADRDLFQLLSPRISVLHPEGHRITPEWLWEKYGLRPEQWVDFRALAGDPSDNIPGVKGIGEKTALKLLKEWGSLENLLKNLDQVKPESVREKILAHLEDLKLSRELSRVRTDLPLEVDFGRRREPDWEGLKAFLERLEFGSLLHEFGLLESPLLAEEAPWPPPEGAFLGYRLSRPEPMWAELLALAASAQGRVYRAEDPHGALRGLFEVRGLLAKDLAVVALREGLDLPPTDDPMLLAYLLDPSNTTPEGVARRYGGEWTEDAAKRALLAERLHANLLGRLQGEERLLWLYEEVEKPLSRVLAHMEATGVKLDVAYLENLSLEVAAHMRRLEEEVFRLAGRSFRLNSRDQLERVLFDELGLPPIGKTEKTGKRSTSAAVLEALREVNPIVDKILQYRELAKLKGTYIDRLPALVHPKTGRLHTRFNQTATATGRLSSSDPNLQNIPVRTPLGQKIRRAFVAEEGWRLVALDYRQIELRVLAHLSGDENLIRVFQEGKDIHTQTASWMFGLSAEAIDPLMRRAAKTINFGVLYGMSAFRLSQELGIPYEEAQAFIQKYFQSYPKVKAWIEKTLREGRTRGYVETLFGRRRYVPDLNARVKGKREAAERMAFNMPVQGTAADLMKLAMVRLFPQLREVGARMLLQVHDELLLEAPKERAEEVAALAKEVMEGVWPLAVPLEVEVGIGEDWLAAKG

SEQ ID NO: 4193 - DNA, 2523 bp, synthetic construct
  misc_feature 1..2523: note = Variant of DNA polymerase I from Thermus sp. strain 2.9
  source 1..2523: mol_type = other DNA
atgcaccatcatcatcatcatggcggtagcggcgtgttaccggtgttcgagcctaaaggtcgcgtgcttctggttgatggccatcatctcgcgtatcgtaacttctttgccctgaaaggattaaccaccagcctgggcgagccggtacagggtgtctacggctttgcaaagtcgctcctgaaagctctgaaagaagacggtgatgtggtgattgttgtctttgatgcgaaagcgccaagttttcgccacgaagcgtacgaagcttacaaagccgggcgtgctccaacgccggaagactttcctcgccaattggcgcttatgaaggaattagtggatttgcttggcctcgaacgcttggaagttcccggtttcgaggcagacgacgtattagcgactctcgcaaagaaagccgaacgtgagggctatgaagtccagatcttgacagcagatcgcgatcttttccagcttttatctccgcgcatctcggtgttacacccggaagggcatcgtatcaccccggaatggctctgggagaaatatggtttgcgtcccgaacaatgggtggattttcgcgccttagcaggcgatccgagcgacaatattccgggagttaaaggtatcggcgagaagacggcgctcaagctccttaaagaatgggggtcgttggagaacttgcttaagaatttagatcaggtcaaaccagagtcagtgcgtgagaagattcttgctcacctcgaagacctcaaattaagccgcgaattgtcccgtgtacgcaccgatttgccgctcgaagttgatttcggtcgccgccgcgaacctgactgggagggtcttaaagcgtttttagagcgtcttgaatttggttcgctcttgcatgaattcggccttttagaaagcccgttactggccgaagaagcaccttggccaccgcccgagggcgcgtttttaggttaccgtttgagtcgcccggaaccgatgtgggccgaattactggctcttgcagcgtctgcccagggacgtgtgtatcgcgcggaagaccctcatggtgcgctccgcggcctcttcgaagtccgtggactccttgccaaagacttagctgttgttgcattgcgcgaaggtcttgatttacctccgactgatgatccaatgcttcttgcgtacctcttggacccgtcaaacacgacgcccgaaggcgtagcccgtcgttacggcggcgagtggaccgaagatgcagcgaaacgcgcgttattggccgaacgtttgcacgccaatttattaggacgtttgcaaggcgaggaacgtctcctctggctttacgaagaagtggagaaaccattgagtcgcgtgctcgcgcatatggaagctaccggtgtcaaattagacgtggcgtatttggagaatctcagccttgaagttgctgcccacatgcgccgcttggaggaagaagtattccgtttagcaggccgttcctttcgccttaactctcgcgatcagttagaacgtgtgttgttcgatgaacttggtctccctcctatcggcaagacagagaagaccggtaaacgtagcacttcagcggcggttttagaagctcttcgcgaagtccatcccattgtggacaagatcttgcagtaccgcgaactcgcgaaattgaaaggcacctatattgaccgtcttccggcattagtccacccgaaaacgggacgcctccatacccgcttcaaccaaacagccacggcgaccggtcgtttgtcctcctctgatccaaaccttcagaatattccagtacgtaccccattgggccagaagatccgccgtgcgtttgtagctgaggagggttggcgtttagtggccctcgattatcgtcaaattgaattacgtgtccttgcccatctttctggcgatgagaacctcatccgcgtgtttcaggaaggcaaagacattcacactcaaacggcaagctggatgtttggattatcagctgaagcgatcgatcctttgatgcgtcgtgcagcgaagaccatcaatttcggtgttctctacggtatgagtgcctttcgtttgtcgcaggttttaggcattccctatgaagaagctcaggcgttcattcagaaatactttcaaagctatcccaaagttaaagcatggatcgagaagactctccgtgaaggccgcacacgtggttacgtagagaccttatttggacgtcgccgctatgttcccgatttaaacgctcgcgtgaaaggcaagcgtgaagccgccgaacgcatggcgttcaacatgcctgtacagggcacggcagctgacctcatgaaacttgcaatggtgcgcctttttccacaattgcgtgaagttggtgcccgcatgctcttgcaggtccacgatgaactcttgttagaagcgccaaaagagcgtgcggaagaggtggcagccctcgcgaaagaagttatggaaggcgtgtggcccttagcggtgcctcttgaagtcgaagttggtattggcgaggattggctggctgccaaagga

SEQ ID NO: 4194 - protein, 841 aa, synthetic construct
  REGION 1..841: note = Variant of DNA polymerase I from Thermus sp. strain 2.9
MHHHHHHGGSGVLPVFEPKGRVLLVDGHHLAYRNFFALKGLTTSLGEPVQGVYGFAKSLLKALKEDGDVVIVVFDAKAPSFRHEAYEAYKAGRAPTPEDFPRQLALMKELVDLLGLERLEVPGFEADDVLATLAKKAEREGYEVQILTADRDLFQLLSPRISVLHPEGHRITPEWLWEKYGLRPEQWVDFRALAGDPSDNIPGVKGIGEKTALKLLKEWGSLENLLKNLDQVKPESVREKILAHLEDLKLSRELSRVRTDLPLEVDFGRRREPDWEGLKAFLERLEFGSLLHEFGLLESPLLAEEAPWPPPEGAFLGYRLSRPEPMWAELLALAASAQGRVYRAEDPHGALRGLFEVRGLLAKDLAVVALREGLDLPPTDDPMLLAYLLDPSNTTPEGVARRYGGEWTEDAAKRALLAERLHANLLGRLQGEERLLWLYEEVEKPLSRVLAHMEATGVKLDVAYLENLSLEVAAHMRRLEEEVFRLAGRSFRLNSRDQLERVLFDELGLPPIGKTEKTGKRSTSAAVLEALREVHPIVDKILQYRELAKLKGTYIDRLPALVHPKTGRLHTRFNQTATATGRLSSSDPNLQNIPVRTPLGQKIRRAFVAEEGWRLVALDYRQIELRVLAHLSGDENLIRVFQEGKDIHTQTASWMFGLSAEAIDPLMRRAAKTINFGVLYGMSAFRLSQVLGIPYEEAQAFIQKYFQSYPKVKAWIEKTLREGRTRGYVETLFGRRRYVPDLNARVKGKREAAERMAFNMPVQGTAADLMKLAMVRLFPQLREVGARMLLQVHDELLLEAPKERAEEVAALAKEVMEGVWPLAVPLEVEVGIGEDWLAAKG

SEQ ID NO: 4195 - DNA, 2523 bp, synthetic construct
  misc_feature 1..2523: note = Variant of DNA polymerase I from Thermus sp. strain 2.9
  source 1..2523: mol_type = other DNA
atgcaccatcatcatcatcatggcggtagcggcgtgttaccggtgttcgagcctaaaggtcgcgtgcttctggttgatggccatcatctcgcgtatcgtaacttctttgccctgaaaggattaaccaccagcctgggcgagccggtacagggtgtctacggctttgcaaagtcgctcctgaaagctctgaaagaagacggtgatgtggtgattgttgtctttgatgcgaaagcgccaagttttcgccacgaagcgtacgaagcttacaaagccgggcgtgctccaacgccggaagactttcctcgccaattggcgcttatgaaggaattagtggatttgcttggcctcgaacgcttggaagttcccggtttcgaggcagacgacgtattagcgactctcgcaaagaaagccgaacgtgagggctatgaagtccagatcttgacagcagatcgcgatcttttccagcttttatctccgcgcatctcggtgttacacccggaagggcatcgtatcaccccggaatggctctgggagaaatatggtttgcgtcccgaacaatgggtggattttcgcgccttagcaggcgatccgagcgacaatattccgggagttaaaggtatcggcgagaagacggcgctcaagctccttaaagaatgggggtcgttggagaacttgcttaagaatttagatcaggtcaaaccagagtcagtgcgtgagaagattcttgctcacctcgaagacctcaaattaagccgcgaattgtcccgtgtacgcaccgatttgccgctcgaagttgatttcggtcgccgccgcgaacctgactgggagggtcttaaagcgtttttagagcgtcttgaatttggttcgctcttgcatgaattcggccttttagaaagcccgttactggccgaagaagcaccttggccaccgcccgagggcgcgtttttaggttaccgtttgagtcgcccggaaccgatgtgggccgaattactggctcttgcagcgtctgcccagggacgtgtgtatcgcgcggaagaccctcatggtgcgctccgcggcctcttcgaagtccgtggactccttgccaaagacttagctgttgttgcattgcgcgaaggtcttgatttacctccgactgatgatccaatgcttcttgcgtacctcttggacccgtcaaacacgacgcccgaaggcgtagcccgtcgttacggcggcgagtggaccgaagatgcagcgaaacgcgcgttattggccgaacgtttgcacgccaatttattaggacgtttgcaaggcgaggaacgtctcctctggctttacgaagaagtggagaaaccattgagtcgcgtgctcgcgcatatggaagctaccggtgtcaaattagacgtggcgtatttggagaatctcagccttgaagttgctgcccacatgcgccgcttggaggaagaagtattccgtttagcaggccgttcctttcgccttaactctcgcgatcagttagaacgtgtgttgttcgatgaacttggtctccctcctatcggcaagacagagaagaccggtaaacgtagcacttcagcggcggttttagaagctcttcgcgaagtccatcccattgtggacaagatcttgcagtaccgcgaactcgcgaaattgaaaggcacctatattgaccgtcttccggcattagtccacccgaaaacgggacgcctccatacccgcttcaaccaaacagccacggcgaccggtcgtttgtcctcctctgatccaaaccttcagaatattccagtacgtaccccattgggccagaagatccgccgtgcgtttgtagctgaggagggttggcgtttagtggccctcgattatcgtcaaattgaattacgtgtccttgcccatctttctggcgatgagaacctcatccgcgtgtttcaggaaggcaaagacattcacactcaaacggcaagctggatgtttggattatcagctgaagcgatcgatcctttgatgcgtcgtgcagcgaagaccatcaatttcggtgttctctacggtatgagtgcctttcgtttgtcgcaggaattaggcattccctatgaagaagctcaggcgttcattaggaaatactttcaaagctatcccaaagttaaagcatggatcgagaagactctccgtgaaggccgcacacgtggttacgtagagaccttatttggacgtcgccgctatgttcccgatttaaacgctcgcgtgaaaggcaagcgtgaagccgccgaacgcatggcgttcaacatgcctgtacagggcacggcagctgacctcatgaaacttgcaatggtgcgcctttttccacaattgcgtgaagttggtgcccgcatgctcttgcaggtccacgatgaactcttgttagaagcgccaaaagagcgtgcggaagaggtggcagccctcgcgaaagaagttatggaaggcgtgtggcccttagcggtgcctcttgaagtcgaagttggtattggcgaggattggctggctgccaaagga

SEQ ID NO: 4196 - protein, 841 aa, synthetic construct
  REGION 1..841: note = Variant of DNA polymerase I from Thermus sp. strain 2.9
MHHHHHHGGSGVLPVFEPKGRVLLVDGHHLAYRNFFALKGLTTSLGEPVQGVYGFAKSLLKALKEDGDVVIVVFDAKAPSFRHEAYEAYKAGRAPTPEDFPRQLALMKELVDLLGLERLEVPGFEADDVLATLAKKAEREGYEVQILTADRDLFQLLSPRISVLHPEGHRITPEWLWEKYGLRPEQWVDFRALAGDPSDNIPGVKGIGEKTALKLLKEWGSLENLLKNLDQVKPESVREKILAHLEDLKLSRELSRVRTDLPLEVDFGRRREPDWEGLKAFLERLEFGSLLHEFGLLESPLLAEEAPWPPPEGAFLGYRLSRPEPMWAELLALAASAQGRVYRAEDPHGALRGLFEVRGLLAKDLAVVALREGLDLPPTDDPMLLAYLLDPSNTTPEGVARRYGGEWTEDAAKRALLAERLHANLLGRLQGEERLLWLYEEVEKPLSRVLAHMEATGVKLDVAYLENLSLEVAAHMRRLEEEVFRLAGRSFRLNSRDQLERVLFDELGLPPIGKTEKTGKRSTSAAVLEALREVHPIVDKILQYRELAKLKGTYIDRLPALVHPKTGRLHTRFNQTATATGRLSSSDPNLQNIPVRTPLGQKIRRAFVAEEGWRLVALDYRQIELRVLAHLSGDENLIRVFQEGKDIHTQTASWMFGLSAEAIDPLMRRAAKTINFGVLYGMSAFRLSQELGIPYEEAQAFIRKYFQSYPKVKAWIEKTLREGRTRGYVETLFGRRRYVPDLNARVKGKREAAERMAFNMPVQGTAADLMKLAMVRLFPQLREVGARMLLQVHDELLLEAPKERAEEVAALAKEVMEGVWPLAVPLEVEVGIGEDWLAAKG

SEQ ID NO: 4197 - DNA, 2523 bp, synthetic construct
  misc_feature 1..2523: note = Variant of DNA polymerase I from Thermus sp. strain 2.9
  source 1..2523: mol_type = other DNA
atgcaccatcatcatcatcatggcggtagcggcgtgttaccggtgttcgagcctaaaggtcgcgtgcttctggttgatggccatcatctcgcgtatcgtaacttctttgccctgaaaggattaaccaccagcctgggcgagccggtacagggtgtctacggctttgcaaagtcgctcctgaaagctctgaaagaagacggtgatgtggtgattgttgtctttgatgcgaaagcgccaagttttcgccacgaagcgtacgaagcttacaaagccgggcgtgctccaacgccggaagactttcctcgccaattggcgcttatgaaggaattagtggatttgcttggcctcgaacgcttggaagttcccggtttcgaggcagacgacgtattagcgactctcgcaaagaaagccgaacgtgagggctatgaagtccagatcttgacagcagatcgcgatcttttccagcttttatctccgcgcatctcggtgttacacccggaagggcatcgtatcaccccggaatggctctgggagaaatatggtttgcgtcccgaacaatgggtggattttcgcgccttagcaggcgatccgagcgacaatattccgggagttaaaggtatcggcgagaagacggcgctcaagctccttaaagaatgggggtcgttggagaacttgcttaagaatttagatcaggtcaaaccagagtcagtgcgtgagaagattcttgctcacctcgaagacctcaaattaagccgcgaattgtcccgtgtacgcaccgatttgccgctcgaagttgatttcggtcgccgccgcgaacctgactgggagggtcttaaagcgtttttagagcgtcttgaatttggttcgctcttgcatgaattcggccttttagaaagcccgttactggccgaagaagcaccttggccaccgcccgagggcgcgtttttaggttaccgtttgagtcgcccggaaccgatgtgggccgaattactggctcttgcagcgtctgcccagggacgtgtgtatcgcgcggaagaccctcatggtgcgctccgcggcctcttcgaagtccgtggactccttgccaaagacttagctgttgttgcattgcgcgaaggtcttgatttacctccgactgatgatccaatgcttcttgcgtacctcttggacccgtcaaacacgacgcccgaaggcgtagcccgtcgttacggcggcgagtggaccgaagatgcagcgaaacgcgcgttattggccgaacgtttgcacgccaatttattaggacgtttgcaaggcgaggaacgtctcctctggctttacgaagaagtggagaaaccattgagtcgcgtgctcgcgcatatggaagctaccggtgtcaaattagacgtggcgtatttggagaatctcagccttgaagttgctgcccacatgcgccgcttggaggaagaagtattccgtttagcaggccgttcctttcgccttaactctcgcgatcagttagaacgtgtgttgttcgatgaacttggtctccctcctatcggcaagacagagaagaccggtaaacgtagcacttcagcggcggttttagaagctcttcgcgaagtcagtcccattgtggacaagatcttgcagtaccgcgaactcgcgaaattgaaaggcacctatattgaccgtcttccggcattagtccacccgaaaacgggacgcctccatacccgcttcaaccaaacagccacggcgaccggtcgtttgtcctcctctgatccaaaccttcagaatattccagtacgtaccccattgggccagaagatccgccgtgcgtttgtagctgaggagggttggcgtttagtggccctcgattatcgtcaaattgaattacgtgtccttgcccatctttctggcgatgagaacctcatccgcgtgtttcaggaaggcaaagacattcacactcaaacggcaagctggatgtttggattatcagctgaagcgatcgatcctttgatgcgtcgtgcagcgaagaccatcaatttcggtgttctctacggtatgagtgcctttcgtttgtcgcaggaattaggcattccctatgaagaagctcaggcgttcattcagaaatactttcaaagctatcccaaagttaaagcatggatcgagaagactctccgtgaaggccgcacacgtggttacgtagagaccttatttggacgtcgccgctatgttcccgatttaaacgctcgcgtgaaaggcaagcgtgaagccgccgaacgcatggcgttcaacatgcctgtacagggcacggcagctgacctcatgaaacttgcaatggtgcgcctttttccacaattgcgtgaagttggtgcccgcatgctcttgcaggtccacgatgaactcttgttagaagcgccaaaagagcgtgcggaagaggtggcagccctcgcgaaagaagttatggaaggcgtgtggcccttagcggtgcctcttgaagtcgaagttggtattggcgaggattggctggctgccaaagga

SEQ ID NO: 4198 - protein, 841 aa, synthetic construct
  REGION 1..841: note = Variant of DNA polymerase I from Thermus sp. strain 2.9
MHHHHHHGGSGVLPVFEPKGRVLLVDGHHLAYRNFFALKGLTTSLGEPVQGVYGFAKSLLKALKEDGDVVIVVFDAKAPSFRHEAYEAYKAGRAPTPEDFPRQLALMKELVDLLGLERLEVPGFEADDVLATLAKKAEREGYEVQILTADRDLFQLLSPRISVLHPEGHRITPEWLWEKYGLRPEQWVDFRALAGDPSDNIPGVKGIGEKTALKLLKEWGSLENLLKNLDQVKPESVREKILAHLEDLKLSRELSRVRTDLPLEVDFGRRREPDWEGLKAFLERLEFGSLLHEFGLLESPLLAEEAPWPPPEGAFLGYRLSRPEPMWAELLALAASAQGRVYRAEDPHGALRGLFEVRGLLAKDLAVVALREGLDLPPTDDPMLLAYLLDPSNTTPEGVARRYGGEWTEDAAKRALLAERLHANLLGRLQGEERLLWLYEEVEKPLSRVLAHMEATGVKLDVAYLENLSLEVAAHMRRLEEEVFRLAGRSFRLNSRDQLERVLFDELGLPPIGKTEKTGKRSTSAAVLEALREVSPIVDKILQYRELAKLKGTYIDRLPALVHPKTGRLHTRFNQTATATGRLSSSDPNLQNIPVRTPLGQKIRRAFVAEEGWRLVALDYRQIELRVLAHLSGDENLIRVFQEGKDIHTQTASWMFGLSAEAIDPLMRRAAKTINFGVLYGMSAFRLSQELGIPYEEAQAFIQKYFQSYPKVKAWIEKTLREGRTRGYVETLFGRRRYVPDLNARVKGKREAAERMAFNMPVQGTAADLMKLAMVRLFPQLREVGARMLLQVHDELLLEAPKERAEEVAALAKEVMEGVWPLAVPLEVEVGIGEDWLAAKG

SEQ ID NO: 4199 - DNA, 2523 bp, synthetic construct
  misc_feature 1..2523: note = Variant of DNA polymerase I from Thermus sp. strain 2.9
  source 1..2523: mol_type = other DNA
atgcaccatcatcatcatcatggcggtagcggcgtgttaccggtgttcgagcctaaaggtcgcgtgcttctggttgatggccatcatctcgcgtatcgtaacttctttgccctgaaaggattaaccaccagcctgggcgagccggtacagggtgtctacggctttgcaaagtcgctcctgaaagctctgaaagaagacggtgatgtggtgattgttgtctttgatgcgaaagcgccaagttttcgccacgaagcgtacgaagcttacaaagccgggcgtgctccaacgccggaagactttcctcgccaattggcgcttatgaaggaattagtggatttgcttggcctcgaacgcttggaagttcccggtttcgaggcagacgacgtattagcgactctcgcaaagaaagccgaacgtgagggctatgaagtccagatcttgacagcagatcgcgatcttttccagcttttatctccgcgcatctcggtgttacacccggaagggcatcgtatcaccccggaatggctctgggagaaatatggtttgcgtcccgaacaatgggtggattttcgcgccttagcaggcgatccgagcgacaatattccgggagttaaaggtatcggcgagaagacggcgctcaagctccttaaagaatgggggtcgttggagaacttgcttaagaatttagatcaggtcaaaccagagtcagtgcgtgagaagattcttgctcacctcgaagacctcaaattaagccgcgaattgtcccgtgtacgcaccgatttgccgctcgaagttgatttcggtcgccgccgcgaacctgactgggagggtcttaaagcgtttttagagcgtcttgaatttggttcgctcttgcatgaattcggccttttagaaagcccgttactggccgaagaagcaccttggccaccgcccgagggcgcgtttttaggttaccgtttgagtcgcccggaaccgatgtgggccgaattactggctcttgcagcgtctgcccagggacgtgtgtatcgcgcggaagaccctcatggtgcgctccgcggcctcttcgaagtccgtggactccttgccaaagacttagctgttgttgcattgcgcgaaggtcttgatttacctccgactgatgatccaatgcttcttgcgtacctcttggacccgtcaaacacgacgcccgaaggcgtagcccgtcgttacggcggcgagtggaccgaagatgcagcgaaacgcgcgttattggccgaacgtttgcacgccaatttattaggacgtttgcaaggcgaggaacgtctcctctggctttacgaagaagtggagaaaccattgagtcgcgtgctcgcgcatatggaagctaccggtgtcaaattagacgtggcgtatttggagaatctcagccttgaagttgctgcccacatgcgccgcttggaggaagaagtattccgtttagcaggccgttcctttcgccttaactctcgcgatcagttagaacgtgtgttgttcgatgaacttggtctccctcctatcggcaagacagagaagaccggtaaacgtagcacttcagcggcggttttagaagctcttcgcgaagtccatcccattgtggacaagatcttgcagtaccgcgaactcgcgaaattgaaaggcacctatattgaccgtcttccggcattagtccacccgaaaacgggacgcctccatacccgcttcaaccaaacagccacggcgaccggtcgtttgtcctcctctgatccaaaccttcagaatattccagtacgtaccccattgggccagaagatccgccgtgcgtttgtagctgaggagggttggcgtttagtggccctcgattatcgtcaaattgaattacgtgtccttgcccatctttctggcgatgagaacctcatccgcgtgtttcaggaaggcaaagacattcacactcaaacggcaagctggatgtttggattatcagctgaagcgatcgatcctttgatgcgtcgtgcagcgaagaccatcaatttcggtgttctctacggtatgagtgcctttcgtttgtcgcaggaattaggcattccctatgaagaagctcaggcgttcattcagaaatactttcaaagctatcccaaagttaaagcatggatcgagaagactctccgtgaaggccgcacacgtggttacgtagagaccttatttggacgtcgccgctatgttcccgatttagcggctcgcgtgaaaggcaagcgtgaagccgccgaacgcatggcgttcaacatgcctgtacagggcacggcagctgacctcatgaaacttgcaatggtgcgcctttttccacaattgcgtgaagttggtgcccgcatgctcttgcaggtccacgatgaactcttgttagaagcgccaaaagagcgtgcggaagaggtggcagccctcgcgaaagaagttatggaaggcgtgtggcccttagcggtgcctcttgaagtcgaagttggtattggcgaggattggctggctgccaaagga

SEQ ID NO: 4200 - protein, 841 aa, synthetic construct
  REGION 1..841: note = Variant of DNA polymerase I from Thermus sp. strain 2.9
MHHHHHHGGSGVLPVFEPKGRVLLVDGHHLAYRNFFALKGLTTSLGEPVQGVYGFAKSLLKALKEDGDVVIVVFDAKAPSFRHEAYEAYKAGRAPTPEDFPRQLALMKELVDLLGLERLEVPGFEADDVLATLAKKAEREGYEVQILTADRDLFQLLSPRISVLHPEGHRITPEWLWEKYGLRPEQWVDFRALAGDPSDNIPGVKGIGEKTALKLLKEWGSLENLLKNLDQVKPESVREKILAHLEDLKLSRELSRVRTDLPLEVDFGRRREPDWEGLKAFLERLEFGSLLHEFGLLESPLLAEEAPWPPPEGAFLGYRLSRPEPMWAELLALAASAQGRVYRAEDPHGALRGLFEVRGLLAKDLAVVALREGLDLPPTDDPMLLAYLLDPSNTTPEGVARRYGGEWTEDAAKRALLAERLHANLLGRLQGEERLLWLYEEVEKPLSRVLAHMEATGVKLDVAYLENLSLEVAAHMRRLEEEVFRLAGRSFRLNSRDQLERVLFDELGLPPIGKTEKTGKRSTSAAVLEALREVHPIVDKILQYRELAKLKGTYIDRLPALVHPKTGRLHTRFNQTATATGRLSSSDPNLQNIPVRTPLGQKIRRAFVAEEGWRLVALDYRQIELRVLAHLSGDENLIRVFQEGKDIHTQTASWMFGLSAEAIDPLMRRAAKTINFGVLYGMSAFRLSQELGIPYEEAQAFIQKYFQSYPKVKAWIEKTLREGRTRGYVETLFGRRRYVPDLAARVKGKREAAERMAFNMPVQGTAADLMKLAMVRLFPQLREVGARMLLQVHDELLLEAPKERAEEVAALAKEVMEGVWPLAVPLEVEVGIGEDWLAAKG

SEQ ID NO: 4201 - DNA, 2523 bp, synthetic construct
  misc_feature 1..2523: note = Variant of DNA polymerase I from Thermus sp. strain 2.9
  source 1..2523: mol_type = other DNA
atgcaccatcatcatcatcatggcggtagcggcgtgttaccggtgttcgagcctaaaggtcgcgtgcttctggttgatggccatcatctcgcgtatcgtaacttctttgccctgaaaggattaaccaccagcctgggcgagccggtacagggtgtctacggctttgcaaagtcgctcctgaaagctctgaaagaagacggtgatgtggtgattgttgtctttgatgcgaaagcgccaagttttcgccacgaagcgtacgaagcttacaaagccgggcgtgctccaacgccggaagactttcctcgccaattggcgcttatgaaggaattagtggatttgcttggcctcgaacgcttggaagttcccggtttcgaggcagacgacgtattagcgactctcgcaaagaaagccgaacgtgagggctatgaagtccagatcttgacagcagatcgcgatcttttccagcttttatctccgcgcatctcggtgttacacccggaagggcatcgtatcaccccggaatggctctgggagaaatatggtttgcgtcccgaacaatgggtggattttcgcgccttagcaggcgatccgagcgacaatattccgggagttaaaggtatcggcgagaagacggcgctcaagctccttaaagaatgggggtcgttggagaacttgcttaagaatttagatcaggtcaaaccagagtcagtgcgtgagaagattcttgctcacctcgaagacctcaaattaagccgcgaattgtcccgtgtacgcaccgatttgccgctcgaagttgatttcggtcgccgccgcgaacctgactgggagggtcttaaagcgtttttagagcgtcttgaatttggttcgctcttgcatgaattcggccttttagaaagcccgttactggccgaagaagcaccttggccaccgcccgagggcgcgtttttaggttaccgtttgagtcgcccggaaccgatgtgggccgaattactggctcttgcagcgtctgcccagggacgtgtgtatcgcgcggaagaccctcatggtgcgctccgcggcctcttcgaagtccgtggactccttgccaaagacttagctgttgttgcattgcgcgaaggtcttgatttacctccgactgatgatccaatgcttcttgcgtacctcttggacccgtcaaacgatacgcccgaaggcgtagcccgtcgttacggcggcgagtggaccgaagatgcagcgaaacgcgcgttattggccgaacgtttgcacgccaatttattaggacgtttgcaaggcgaggaacgtctcctctggctttacgaagaagtggagaaaccattgagtcgcgtgctcgcgcatatggaagctaccggtgtcaaattagacgtggcgtatttggagaatctcagccttgaagttgctgcccacatgcgccgcttggaggaagaagtattccgtttagcaggccgttcctttcgccttaactctcgcgatcagttagaacgtgtgttgttcgatgaacttggtctccctcctatcggcaagacagagaagaccggtaaacgtagcacttcagcggcggttttagaagctcttcgcgaagtccatcccattgtggacaagatcttgcagtaccgcgaactcgcgaaattgaaaggcacctatattgaccgtcttccggcattagtccacccgaaaacgggacgcctccatacccgcttcaaccaaacagccacggcgaccggtcgtttgtcctcctctgatccaaaccttcagaatattccagtacgtaccccattgggccagaagatccgccgtgcgtttgtagctgaggagggttggcgtttagtggccctcgattatcgtcaaattgaattacgtgtccttgcccatctttctggcgatgagaacctcatccgcgtgtttcaggaaggcaaagacattcacactcaaacggcaagctggatgtttggattatcagctgaagcgatcgatcctttgatgcgtcgtgcagcgaagaccatcaatttcggtgttctctacggtatgagtgcctttcgtttgtcgcaggaattaggcattccctatgaagaagctcaggcgttcattcagaaatactttcaaagctatcccaaagttaaagcatggatcgagaagactctccgtgaaggccgcacacgtggttacgtagagaccttatttggacgtcgccgctatgttcccgatttaaacgctcgcgtgaaaggcaagcgtgaagccgccgaacgcatggcgttcaacatgcctgtacagggcacggcagctgacctcatgaaacttgcaatggtgcgcctttttccacaattgcgtgaagttggtgcccgcatgctcttgcaggtccacgatgaactcttgttagaagcgccaaaagagcgtgcggaagaggtggcagccctcgcgaaagaagttatggaaggcgtgtggcccttagcggtgcctcttgaagtcgaagttggtattggcgaggattggctggctgccaaagga

SEQ ID NO: 4202 - protein, 841 aa, synthetic construct
  REGION 1..841: note = Variant of DNA polymerase I from Thermus sp. strain 2.9
MHHHHHHGGSGVLPVFEPKGRVLLVDGHHLAYRNFFALKGLTTSLGEPVQGVYGFAKSLLKALKEDGDVVIVVFDAKAPSFRHEAYEAYKAGRAPTPEDFPRQLALMKELVDLLGLERLEVPGFEADDVLATLAKKAEREGYEVQILTADRDLFQLLSPRISVLHPEGHRITPEWLWEKYGLRPEQWVDFRALAGDPSDNIPGVKGIGEKTALKLLKEWGSLENLLKNLDQVKPESVREKILAHLEDLKLSRELSRVRTDLPLEVDFGRRREPDWEGLKAFLERLEFGSLLHEFGLLESPLLAEEAPWPPPEGAFLGYRLSRPEPMWAELLALAASAQGRVYRAEDPHGALRGLFEVRGLLAKDLAVVALREGLDLPPTDDPMLLAYLLDPSNDTPEGVARRYGGEWTEDAAKRALLAERLHANLLGRLQGEERLLWLYEEVEKPLSRVLAHMEATGVKLDVAYLENLSLEVAAHMRRLEEEVFRLAGRSFRLNSRDQLERVLFDELGLPPIGKTEKTGKRSTSAAVLEALREVHPIVDKILQYRELAKLKGTYIDRLPALVHPKTGRLHTRFNQTATATGRLSSSDPNLQNIPVRTPLGQKIRRAFVAEEGWRLVALDYRQIELRVLAHLSGDENLIRVFQEGKDIHTQTASWMFGLSAEAIDPLMRRAAKTINFGVLYGMSAFRLSQELGIPYEEAQAFIQKYFQSYPKVKAWIEKTLREGRTRGYVETLFGRRRYVPDLNARVKGKREAAERMAFNMPVQGTAADLMKLAMVRLFPQLREVGARMLLQVHDELLLEAPKERAEEVAALAKEVMEGVWPLAVPLEVEVGIGEDWLAAKG

SEQ ID NO: 4203 - DNA, 2523 bp, synthetic construct
  misc_feature 1..2523: note = Variant of DNA polymerase I from Thermus sp. strain 2.9
  source 1..2523: mol_type = other DNA
atgcaccatcatcatcatcatggcggtagcggcgtgttaccggtgttcgagcctaaaggtcgcgtgcttctggttgatggccatcatctcgcgtatcgtaacttctttgccctgaaaggattaaccaccagcctgggcgagccggtacagggtgtctacggctttgcaaagtcgctcctgaaagctctgaaagaagacggtgatgtggtgattgttgtctttgatgcgaaagcgccaagttttcgccacgaagcgtacgaagcttacaaagccgggcgtgctccaacgccggaagactttcctcgccaattggcgcttatgaaggaattagtggatttgcttggcctcgaacgcttggaagttcccggtttcgaggcagacgacgtattagcgactctcgcaaagaaagccgaacgtgagggctatgaagtccagatcttgacagcagatcgcgatcttttccagcttttatctccgcgcatctcggtgttacacccggaagggcatcgtatcaccccggaatggctctgggagaaatatggtttgcgtcccgaacaatgggtggattttcgcgccttagcaggcgatccgagcgacaatattccgggagttaaaggtatcggcgagaagacggcgctcaagctccttaaagaatgggggtcgttggagaacttgcttaagaatttagatcaggtcaaaccagagtcagtgcgtgagaagattcttgctcacctcgaagacctcaaattaagccgcgaattgtcccgtgtacgcaccgatttgccgctcgaagttgatttcggtcgccgccgcgaacctgactgggagggtcttaaagcgtttttagagcgtcttgaatttggttcgctcttgcatgaattcggccttttagaaagcccgttactggccgaagaagcaccttggccaccgcccgagggcgcgtttttaggttaccgtttgagtcgcccggaaccgatgtgggccgaattactggctcttgcagcgtctgcccagggacgtgtgtatcgcgcggaagaccctcatggtgcgctccgcggcctcttcgaagtccgtggactccttgccaaagacttagctgttgttgcattgcgcgaaggtcttgatttacctccgactgatgatccaatgcttcttgcgtacctcttggacccgtcaaacacgacgcccgaaggcgtagcccgtcgttacggcggcgagtggaccgaagatgcagcgaaacgcgcgttattggccgaacgtttgcacgccaatttattaggacgtttgcaaggcgaggaacgtctcctctggctttacgaagaagtggagaaaccattgagtcgcgtgctcgcgcatatggaagctaccggtgtcaaattagacgtggcgtatttggagaatctcagccttgaagttgctgcccacatgcgccgcttggaggaagaagtattccgtttagcaggccgttcctttcgccttaactctcgcgatcagttagaacgtgtgttgttcgatgaacttggtctccctcctatcggcaagacagagaagaccggtaaacgtagcacttcagcggcggttttagaagctcttcgcgaagtccatcccattgtggacaagatcttgcagtaccgcgaactcgcgaaattgaaaggcacctatattgaccgtcttccggcattagtccacccgaaaacgggacgcctccatacccgcttcaaccaaacagccacggcgaccggtcgtttgtcctcctctgatccaaaccttcagaatattccagtacgtaccccattgggccagaagatccgccgtgcgtttgtagctgaggagggttggcgtttagtggccctcgattatcgtcaaattgaattacgtgtccttgcccatctttctggcgatgagaacctcatccgcgtgtttcaggaaggcaaagacattcacactcaaacggcaagctggatgtttggattatcagctgaagcgatcatgcctttgatgcgtcgtgcagcgaagaccatcaatttcggtgttctctacggtatgagtgcctttcgtttgtcgcaggaattaggcattccctatgaagaagctcaggcgttcattcagaaatactttcaaagctatcccaaagttaaagcatggatcgagaagactctccgtgaaggccgcacacgtggttacgtagagaccttatttggacgtcgccgctatgttcccgatttaaacgctcgcgtgaaaggcaagcgtgaagccgccgaacgcatggcgttcaacatgcctgtacagggcacggcagctgacctcatgaaacttgcaatggtgcgcctttttccacaattgcgtgaagttggtgcccgcatgctcttgcaggtccacgatgaactcttgttagaagcgccaaaagagcgtgcggaagaggtggcagccctcgcgaaagaagttatggaaggcgtgtggcccttagcggtgcctcttgaagtcgaagttggtattggcgaggattggctggctgccaaagga

SEQ ID NO: 4204 - protein, 841 aa, synthetic construct
  REGION 1..841: note = Variant of DNA polymerase I from Thermus sp. strain 2.9
MHHHHHHGGSGVLPVFEPKGRVLLVDGHHLAYRNFFALKGLTTSLGEPVQGVYGFAKSLLKALKEDGDVVIVVFDAKAPSFRHEAYEAYKAGRAPTPEDFPRQLALMKELVDLLGLERLEVPGFEADDVLATLAKKAEREGYEVQILTADRDLFQLLSPRISVLHPEGHRITPEWLWEKYGLRPEQWVDFRALAGDPSDNIPGVKGIGEKTALKLLKEWGSLENLLKNLDQVKPESVREKILAHLEDLKLSRELSRVRTDLPLEVDFGRRREPDWEGLKAFLERLEFGSLLHEFGLLESPLLAEEAPWPPPEGAFLGYRLSRPEPMWAELLALAASAQGRVYRAEDPHGALRGLFEVRGLLAKDLAVVALREGLDLPPTDDPMLLAYLLDPSNTTPEGVARRYGGEWTEDAAKRALLAERLHANLLGRLQGEERLLWLYEEVEKPLSRVLAHMEATGVKLDVAYLENLSLEVAAHMRRLEEEVFRLAGRSFRLNSRDQLERVLFDELGLPPIGKTEKTGKRSTSAAVLEALREVHPIVDKILQYRELAKLKGTYIDRLPALVHPKTGRLHTRFNQTATATGRLSSSDPNLQNIPVRTPLGQKIRRAFVAEEGWRLVALDYRQIELRVLAHLSGDENLIRVFQEGKDIHTQTASWMFGLSAEAIMPLMRRAAKTINFGVLYGMSAFRLSQELGIPYEEAQAFIQKYFQSYPKVKAWIEKTLREGRTRGYVETLFGRRRYVPDLNARVKGKREAAERMAFNMPVQGTAADLMKLAMVRLFPQLREVGARMLLQVHDELLLEAPKERAEEVAALAKEVMEGVWPLAVPLEVEVGIGEDWLAAKG

SEQ ID NO: 4205 - DNA, 2523 bp, synthetic construct
  misc_feature 1..2523: note = Variant of DNA polymerase I from Thermus sp. strain 2.9
  source 1..2523: mol_type = other DNA
atgcaccatcatcatcatcatggcggtagcggcgtgttaccggtgttcgagcctaaaggtcgcgtgcttctggttgatggccatcatctcgcgtatcgtaacttctttgccctgaaaggattaaccaccagcctgggcgagccggtacagggtgtctacggctttgcaaagtcgctcctgaaagctctgaaagaagacggtgatgtggtgattgttgtctttgatgcgaaagcgccaagttttcgccacgaagcgtacgaagcttacaaagccgggcgtgctccaacgccggaagactttcctcgccaattggcgcttatgaaggaattagtggatttgcttggcctcgaacgcttggaagttcccggtttcgaggcagacgacgtattagcgactctcgcaaagaaagccgaacgtgagggctatgaagtccagatcttgacagcagatcgcgatcttttccagcttttatctccgcgcatctcggtgttacacccggaagggcatcgtatcaccccggaatggctctgggagaaatatggtttgcgtcccgaacaatgggtggattttcgcgccttagcaggcgatccgagcgacaatattccgggagttaaaggtatcggcgagaagacggcgctcaagctccttaaagaatgggggtcgttggagaacttgcttaagaatttagatcaggtcaaaccagagtcagtgcgtgagaagattcttgctcacctcgaagacctcaaattaagccgcgaattgtcccgtgtacgcaccgatttgccgctcgaagttgatttcggtcgccgccgcgaacctgactgggagggtcttaaagcgtttttagagcgtcttgaatttggttcgctcttgcatgaattcggccttttagaaagcccgttactggccgaagaagcaccttggccaccgcccgagggcgcgtttttaggttaccgtttgagtcgcccggaaccgatgtgggccgaattactggctcttgcagcgtctgcccagggacgtgtgtatcgcgcggaagaccctcatggtgcgctccgcggcctcttcgaagtccgtggactccttgccaaagacttagctgttgttgcattgcgcagtggtcttgatttacctccgactgatgatccaatgcttcttgcgtacctcttggacccgtcaaacacgacgcccgaaggcgtagcccgtcgttacggcggcgagtggaccgaagatgcagcgaaacgcgcgttattggccgaacgtttgcacgccaatttattaggacgtttgcaaggcgaggaacgtctcctctggctttacgaagaagtggagaaaccattgagtcgcgtgctcgcgcatatggaagctaccggtgtcaaattagacgtggcgtatttggagaatctcagccttgaagttgctgcccacatgcgccgcttggaggaagaagtattccgtttagcaggccgttcctttcgccttaactctcgcgatcagttagaacgtgtgttgttcgatgaacttggtctccctcctatcggcaagacagagaagaccggtaaacgtagcacttcagcggcggttttagaagctcttcgcgaagtccatcccattgtggacaagatcttgcagtaccgcgaactcgcgaaattgaaaggcacctatattgaccgtcttccggcattagtccacccgaaaacgggacgcctccatacccgcttcaaccaaacagccacggcgaccggtcgtttgtcctcctctgatccaaaccttcagaatattccagtacgtaccccattgggccagaagatccgccgtgcgtttgtagctgaggagggttggcgtttagtggccctcgattatcgtcaaattgaattacgtgtccttgcccatctttctggcgatgagaacctcatccgcgtgtttcaggaaggcaaagacattcacactcaaacggcaagctggatgtttggattatcagctgaagcgatcgatcctttgatgcgtcgtgcagcgaagaccatcaatttcggtgttctctacggtatgagtgcctttcgtttgtcgcaggaattaggcattccctatgaagaagctcaggcgttcattcagaaatactttcaaagctatcccaaagttaaagcatggatcgagaagactctccgtgaaggccgcacacgtggttacgtagagaccttatttggacgtcgccgctatgttcccgatttaaacgctcgcgtgaaaggcaagcgtgaagccgccgaacgcatggcgttcaacatgcctgtacagggcacggcagctgacctcatgaaacttgcaatggtgcgcctttttccacaattgcgtgaagttggtgcccgcatgctcttgcaggtccacgatgaactcttgttagaagcgccaaaagagcgtgcggaagaggtggcagccctcgcgaaagaagttatggaaggcgtgtggcccttagcggtgcctcttgaagtcgaagttggtattggcgaggattggctggctgccaaagga

SEQ ID NO: 4206 - protein, 841 aa, synthetic construct
  REGION 1..841: note = Variant of DNA polymerase I from Thermus sp. strain 2.9
MHHHHHHGGSGVLPVFEPKGRVLLVDGHHLAYRNFFALKGLTTSLGEPVQGVYGFAKSLLKALKEDGDVVIVVFDAKAPSFRHEAYEAYKAGRAPTPEDFPRQLALMKELVDLLGLERLEVPGFEADDVLATLAKKAEREGYEVQILTADRDLFQLLSPRISVLHPEGHRITPEWLWEKYGLRPEQWVDFRALAGDPSDNIPGVKGIGEKTALKLLKEWGSLENLLKNLDQVKPESVREKILAHLEDLKLSRELSRVRTDLPLEVDFGRRREPDWEGLKAFLERLEFGSLLHEFGLLESPLLAEEAPWPPPEGAFLGYRLSRPEPMWAELLALAASAQGRVYRAEDPHGALRGLFEVRGLLAKDLAVVALRSGLDLPPTDDPMLLAYLLDPSNTTPEGVARRYGGEWTEDAAKRALLAERLHANLLGRLQGEERLLWLYEEVEKPLSRVLAHMEATGVKLDVAYLENLSLEVAAHMRRLEEEVFRLAGRSFRLNSRDQLERVLFDELGLPPIGKTEKTGKRSTSAAVLEALREVHPIVDKILQYRELAKLKGTYIDRLPALVHPKTGRLHTRFNQTATATGRLSSSDPNLQNIPVRTPLGQKIRRAFVAEEGWRLVALDYRQIELRVLAHLSGDENLIRVFQEGKDIHTQTASWMFGLSAEAIDPLMRRAAKTINFGVLYGMSAFRLSQELGIPYEEAQAFIQKYFQSYPKVKAWIEKTLREGRTRGYVETLFGRRRYVPDLNARVKGKREAAERMAFNMPVQGTAADLMKLAMVRLFPQLREVGARMLLQVHDELLLEAPKERAEEVAALAKEVMEGVWPLAVPLEVEVGIGEDWLAAKG

SEQ ID NO: 4207 - DNA, 2523 bp, synthetic construct
  misc_feature 1..2523: note = Variant of DNA polymerase I from Thermus sp. strain 2.9
  source 1..2523: mol_type = other DNA
atgcaccatcatcatcatcatggcggtagcggcgtgttaccggtgttcgagcctaaaggtcgcgtgcttctggttgatggccatcatctcgcgtatcgtaacttctttgccctgaaaggattaaccaccagcctgggcgagccggtacagggtgtctacggctttgcaaagtcgctcctgaaagctctgaaagaagacggtgatgtggtgattgttgtctttgatgcgaaagcgccaagttttcgccacgaagcgtacgaagcttacaaagccgggcgtgctccaacgccggaagactttcctcgccaattggcgcttatgaaggaattagtggatttgcttggcctcgaacgcttggaagttcccggtttcgaggcagacgacgtattagcgactctcgcaaagaaagccgaacgtgagggctatgaagtccagatcttgacagcagatcgcgatcttttccagcttttatctccgcgcatctcggtgttacacccggaagggcatcgtatcaccccggaatggctctgggagaaatatggtttgcgtcccgaacaatgggtggattttcgcgccttagcaggcgatccgagcgacaatattccgggagttaaaggtatcggcgagaagacggcgctcaagctccttaaagaatgggggtcgttggagaacttgcttaagaatttagatcaggtcaaaccagagtcagtgcgtgagaagattcttgctcacctcgaagacctcaaattaagccgcgaattgtcccgtgtacgcaccgatttgccgctcgaagttgatttcggtcgccgccgcgaacctgactgggagggtcttaaagcgtttttagagcgtcttgaatttggttcgctccagcatgaattcggccttttagaaagcccgttactggccgaagaagcaccttggccaccgcccgagggcgcgtttttaggttaccgtttgacccgcccggaaccgatgtgggccgaattactggctcttgcagcgtctgcccagggacgtgtgtatcgcgcggaagaccctcatggtgcgctccgcggcctcttcgaagtccgtggactccttgccaaagacttagctgttgttgcattgcgcgaaggtcttgatttacctccgactgatgatccaatgcttcttgcgtacctcttggacccgtcaaacacgacgcccgaaggcgtagcccgtcgttacggcggcgagtggaccgaagatgcagcgaaacgcgcgttattggccgaacgtttgcacgagaatttactgggacgtttgcaaggcgaggaacgtctcctctggctttacgaagaagtggagaaaccattgagtcgcgtgctcgcgcatatggaagctaccggtgtcaaattagacgtggcgtatttggagaatctcagccttgaagttgctgcccacatgcgccgcttggaggaagaagtattccgtttagcaggccgttcctttcgccttaactctcgcgatcagttagaacgtgtgttgttcgatgaacttggtctccctcctatcggcaagacagagaagaccggtaaacgtagcacttcagcggcggttttagaagctcttcgcgaagtccatcccattgtggacaagatcttgcagtaccgcgaactcgcgaaattgaaaggcacctatattgaccgtcttccggcattagtccacccgaaaacgggacgcctccatacccgcttcaaccaaacagccacggcgaccggtcgtttgtcctcctctgatccaaaccttcagaatattccagtacgtaccccattgggccagaagatccgccgtgcgtttgtagctgaggagggttggcgtttagtggccctcgattatcgtcaaattgaattacgtgtccttgcccatctttctggcgatgagaacctcatccgcgtgtttcaggaaggcaaagacattcacactcaaacggcaagctggatgtttggattaagcgctgaagcgatcgatcctttgatgcgtcgtgcagcgaagaccatcaatttcggtgttctctacggtatgagtgcctttcgtttgtcgcaggaattaggcattccctatgaagaagctcaggcgttcattcagaaatactttcaaagctatcccaaagttaaagcatggatcgagaagactctccgtgaaggccgccaccgtggttacgtagagaccttatttggacgtcgccgctatgttcccgatttaaacgctcgcgtgaaaggcaagcgtgaagccgccgaacgcatggcgttcaacatgcctgtacagggcacggcagctgacctcatgaaacttgcaatggtgcgcctttttccacaattgcgtgaagttggtgcccgcatgctcttgcaggtccacgatgaactcttgttagaagcgccaaaagagcgtgcggaagaggtggcagccctcgcgaaagaagttatggaaggcgtgtggcccttagcggtgcctcttgaagtcgaagttggtattggcgaggattggctggctgccaaagga

SEQ ID NO: 4208 - protein, 841 aa, synthetic construct
  REGION 1..841: note = Variant of DNA polymerase I from Thermus sp. strain 2.9
MHHHHHHGGSGVLPVFEPKGRVLLVDGHHLAYRNFFALKGLTTSLGEPVQGVYGFAKSLLKALKEDGDVVIVVFDAKAPSFRHEAYEAYKAGRAPTPEDFPRQLALMKELVDLLGLERLEVPGFEADDVLATLAKKAEREGYEVQILTADRDLFQLLSPRISVLHPEGHRITPEWLWEKYGLRPEQWVDFRALAGDPSDNIPGVKGIGEKTALKLLKEWGSLENLLKNLDQVKPESVREKILAHLEDLKLSRELSRVRTDLPLEVDFGRRREPDWEGLKAFLERLEFGSLQHEFGLLESPLLAEEAPWPPPEGAFLGYRLTRPEPMWAELLALAASAQGRVYRAEDPHGALRGLFEVRGLLAKDLAVVALREGLDLPPTDDPMLLAYLLDPSNTTPEGVARRYGGEWTEDAAKRALLAERLHENLLGRLQGEERLLWLYEEVEKPLSRVLAHMEATGVKLDVAYLENLSLEVAAHMRRLEEEVFRLAGRSFRLNSRDQLERVLFDELGLPPIGKTEKTGKRSTSAAVLEALREVHPIVDKILQYRELAKLKGTYIDRLPALVHPKTGRLHTRFNQTATATGRLSSSDPNLQNIPVRTPLGQKIRRAFVAEEGWRLVALDYRQIELRVLAHLSGDENLIRVFQEGKDIHTQTASWMFGLSAEAIDPLMRRAAKTINFGVLYGMSAFRLSQELGIPYEEAQAFIQKYFQSYPKVKAWIEKTLREGRHRGYVETLFGRRRYVPDLNARVKGKREAAERMAFNMPVQGTAADLMKLAMVRLFPQLREVGARMLLQVHDELLLEAPKERAEEVAALAKEVMEGVWPLAVPLEVEVGIGEDWLAAKG

SEQ ID NO: 4209 - DNA, 2523 bp, synthetic construct
  misc_feature 1..2523: note = Variant of DNA polymerase I from Thermus sp. strain 2.9
  source 1..2523: mol_type = other DNA
atgcaccatcatcatcatcatggcggtagcggcgtgttaccggtgttcgagcataaaggtcgcgtgcttctggttgatggccatcatctcgcgtatcgtaacttctttgccctgaaaggattaaccaccagcctgggcgagccggtacagggtgtctacggctttgcaaagtcgctcctgaaagctctgaaagaagacggtgatgtggtgattgttgtctttgatgcgaaagcgccaagttttcgccacgaagcgtacgaagcttacaaagccgggcgtgctccaacgccggaagactttcctcgccaattggcgcttatgaaggaattagtggatttgcttggcctcgaacgcttggaagttcccggtttcgaggcagacgacgtattagcgactctcgcaaagaaagccgaacgtgagggctatgaagtccagatcttgacagcagatcgcgatcttttccagcttttatctccgcgcatctcggtgttacacccggaagggcatcgtatcaccccggaatggctctgggagaaatatggtttgcgtcccgaacaatgggtggattttcgcgccttagcaggcgatccgagcgacaatattccgggagttaaaggtatcggcgagaagacggcgctcaagctccttaaagaatgggggtcgttggagaacttgcttaagaatttagatcaggtcaaaccagagtcagtgcgtgagaagattcttgctcacctcgaagacctcaaattaagccgcgaattgtcccgtgtacgcaccgatttgccgctcgaagttgatttcggtcgccgccgcgaacctgactgggagggtcttaaagcgtttttagagcgtcttgaatttggttcgctccagcatgaattcggccttttagaaagcccgttactggccgaagaagcaccttggccaccgcccgagggcgcgtttttaggttaccgtttgagtcgcccggaaccgatgtgggccgaattactggctcttgcagcgtctgcccagggacgtgtgtatcgcgcggaagaccctcatggtgcgctccgcggcctcttcgaagtccgtggactccttgccaaagacttagctgttgttgcattgcgcgaaggtcttgatttacctccgactgatgatccaatgcttcttgcgtacctcttggacccgtcaaacacgacgcccgaaggcgtagcccgtcgttacggcggcgagtggaccgaagatgcagcgaaacgcgcgttattggccgaacgtttgcacgaaaatttattaggacgtttgcaaggcgaggaacgtctcctctggctttacgaagaagtggagaaaccattgagtcgcgtgctcgcgcatatggaagctaccggtgtcaaattagacgtggcgtatttggagaatctcagccttgaagttgctgcccacatgcgccgcttggaggaagaagtattccgtttagcaggccgttcctttcgccttaactctcgcgatcagttagaacgtgtgttgttcgatgaacttggtctccctcctatcggcaagacagagaagaccggtaaacgtagcacttcacgcgcggttttagacgctcttcgcgaagtccatcccattgtggacaagatcttgcagtaccgcgaactcgcgaaattgaaaggcacctatattgaccgtcttccggcattagtccacccgaaaacgggacgcctccatacccgcttcaaccaaacagccacggcgaccggtcgtttgtcctcctctgatccaaaccttcagaatattccagtacgtaccccattgggccagaagatccgccgtgcgtttgtagctgaggagggttggcgtttagtggccctcgattatcgtcaaattgaattacgtgtccttgcccatctttctggcgatgagaacctcatccgcgtgtttcaggaaggcaaagacattcacactcaaacggcaagctggatgtttggattaagtgctgaagcgatcgatcctttgatgcgtcgtgcagcgaagaccatcaatttcggtgttctctacggtatgagtgcatttcgtttgtcgcaggaattaggcattccctatgaagaagctcaggcgttcattcagaaatactttcaaagctatcccaaagttaaagcatggatcgagaagactctccgtgaaggccgcacacgtggttacgtagagaccttatttggacgtcgccgctatgttcccgatttaaacgctcgcgtgaaaggcaagcgtgaagccgccgaacgcatggcgttcaacatgcctgtacagggcacggcagctgacctcatgaaacttgcaatggtgcgcctttttccacaattgcgtgaagttggtgcccgcatgctcttgcaggtccacgatgaactcttgttagaagcgccaaaagagcgtgcggaagaggtggcagccctcgcgaaagaagttatggaaggcgtgtggcccttagcggtgcctcttgaagtcgaagttggtattggcgaggattggctggctgccaaagga

SEQ ID NO: 4210 - protein, 841 aa, synthetic construct
  REGION 1..841: note = Variant of DNA polymerase I from Thermus sp. strain 2.9
MHHHHHHGGSGVLPVFEHKGRVLLVDGHHLAYRNFFALKGLTTSLGEPVQGVYGFAKSLLKALKEDGDVVIVVFDAKAPSFRHEAYEAYKAGRAPTPEDFPRQLALMKELVDLLGLERLEVPGFEADDVLATLAKKAEREGYEVQILTADRDLFQLLSPRISVLHPEGHRITPEWLWEKYGLRPEQWVDFRALAGDPSDNIPGVKGIGEKTALKLLKEWGSLENLLKNLDQVKPESVREKILAHLEDLKLSRELSRVRTDLPLEVDFGRRREPDWEGLKAFLERLEFGSLQHEFGLLESPLLAEEAPWPPPEGAFLGYRLSRPEPMWAELLALAASAQGRVYRAEDPHGALRGLFEVRGLLAKDLAVVALREGLDLPPTDDPMLLAYLLDPSNTTPEGVARRYGGEWTEDAAKRALLAERLHENLLGRLQGEERLLWLYEEVEKPLSRVLAHMEATGVKLDVAYLENLSLEVAAHMRRLEEEVFRLAGRSFRLNSRDQLERVLFDELGLPPIGKTEKTGKRSTSRAVLDALREVHPIVDKILQYRELAKLKGTYIDRLPALVHPKTGRLHTRFNQTATATGRLSSSDPNLQNIPVRTPLGQKIRRAFVAEEGWRLVALDYRQIELRVLAHLSGDENLIRVFQEGKDIHTQTASWMFGLSAEAIDPLMRRAAKTINFGVLYGMSAFRLSQELGIPYEEAQAFIQKYFQSYPKVKAWIEKTLREGRTRGYVETLFGRRRYVPDLNARVKGKREAAERMAFNMPVQGTAADLMKLAMVRLFPQLREVGARMLLQVHDELLLEAPKERAEEVAALAKEVMEGVWPLAVPLEVEVGIGEDWLAAKG

SEQ ID NO: 4211 - DNA, 2523 bp, synthetic construct
  misc_feature 1..2523: note = Variant of DNA polymerase I from Thermus sp. strain 2.9
  source 1..2523: mol_type = other DNA
atgcaccatcatcatcatcatggcggtagcggcgtgttaccggtgttcgagcctaaaggtcgcgtgcttctggttgatggccatcatctcgcgtatcgtaacttctttgccctgaaaggattaaccaccagcctgggcgagccggtacagggtgtctacggctttgcaaagtcgctcctgaaagctctgaaagaagacggtgatgtggtgattgttgtctttgatgcgaaagcgccaagttttcgccacgaagcgtacgaagcttacaaagccgggcgtgctccaacgccggaagactttcctcgccaattggcgcttatgaaggaattagtggatttgcttggcctcgaacgcttggaagttcccggtttcgaggcagacgacgtattagcgactctcgcaaagaaagccgaacgtgagggctatgaagtccagatcttgacagcagatcgcgatcttttccagcttttatctccgcgcatctcggtgttacacccggaagggcatcgtatcaccccggaatggctctgggagaaatatggtttgcgtcccgaacaatgggtggattttcgcgccttagcaggcgatccgagcgacaatattccgggagttaaaggtatcggcgagaagacggcgctcaagctccttaaagaatgggggtcgttggagaacttgcttaagaatttagatcaggtcaaaccagagtcagtgcgtgagaagattcttgctcacctcgaagacctcaaattaagccgcgaattgtcccgtgtacgcaccgatttgccgctcgaagttgatttcggtcgccgccgcgaacctgactgggagggtcttaaagcgtttttagagcgtcttgaatttggttcgctcttgcatgaattcggccttttagaaagcccgttactggccgaagaagcaccttggccaccgcccgagggcgcgtttttaggttaccgtttgagtcgcccggaaccgatgtgggccgaattactggctcttgcagcgtctgcccagggacgtgtgtatcgcgcggaagaccctcatggtgcgctccgcggcctcttcgaagtccgtggactccttgccaaagacttagctgttgttgcattgcgcgaaggtcttgatttacctccgactgatgatccaatgcttcttgcgtacctcttggacccgtcaaacacgacgcccgaaggcgtagcccgtcgttacggcggcgagtggaccgaagatgcagcgaaacgcgcgttattggccgaacgtttgcacgccaatttattaggacgtttgcaaggcgaggaacgtctcctctggctttacgaagaagtggagaaaccattgagtcgcgtgctcgcgcatatggaagctaccggtgtcaaattagacgtggcgtatttggagaatctcagccttgaagttgctgcccacatgcgccgcttggaggaagaagtattccgtttagcaggccgttcctttcgccttaactctcgcgatcagttagaacgtgtgttgttcgatgaacttggtctccctcctatcggcaagacagagaagaccggtaaacgtagcacttcagcggcggttttagaagctcttcgcgaagtccatcccattgtggacaagatcttgcagtaccgcgaactcgcgaaattgaaaggcacctatattgaccgtcttccggcattagtccacccgaaaacgggacgcctccatacccgcttcaaccaaacagccacggcgaccggtcgtttgtcctcctctgatccaaaccttcagaatattccagtacgtaccccattggcgcagaagatccgccgtgcgtttgtagctgaggagggttggcgtttagtggccctcgattatcgtcaaattgaattacgtgtccttgcccatctttctggcgatgagaacctcatccgcgtgtttcaggaaggcaaagacattcacactcaaacggcaagctggatgtttggattatcagctgaagcgatcgatcctttgatgcgtcgtgcagcgaagaccatcaatttcggtgttctctacggtatgagtgcctttcgtttgtcgcaggaattaggcattccctatgaagaagctcaggcgttcattcagaaatactttcaaagctatcccaaagttaaagcatggatcgagaagactctccgtgaaggccgcacacgtggttacgtagagaccttatttggacgtcgccgctatgttcccgatttaaacgctcgcgtgaaaggcaagcgtgaagccgccgaacgcatggcgttcaacatgcctgtacagggcacggcagctgacctcatgaaacttgcaatggtgcgcctttttccacaattgcgtgaagttggtgcccgcatgctcttgcaggtccacgatgaactcttgttagaagcgccaaaagagcgtgcggaagaggtggcagccctcgcgaaagaagttatggaaggcgtgtggcccttagcggtgcctcttgaagtcgaagttggtattggcgaggattggctggctgccaaagga

SEQ ID NO: 4212 - protein, 841 aa, synthetic construct
  REGION 1..841: note = Variant of DNA polymerase I from Thermus sp. strain 2.9
MHHHHHHGGSGVLPVFEPKGRVLLVDGHHLAYRNFFALKGLTTSLGEPVQGVYGFAKSLLKALKEDGDVVIVVFDAKAPSFRHEAYEAYKAGRAPTPEDFPRQLALMKELVDLLGLERLEVPGFEADDVLATLAKKAEREGYEVQILTADRDLFQLLSPRISVLHPEGHRITPEWLWEKYGLRPEQWVDFRALAGDPSDNIPGVKGIGEKTALKLLKEWGSLENLLKNLDQVKPESVREKILAHLEDLKLSRELSRVRTDLPLEVDFGRRREPDWEGLKAFLERLEFGSLLHEFGLLESPLLAEEAPWPPPEGAFLGYRLSRPEPMWAELLALAASAQGRVYRAEDPHGALRGLFEVRGLLAKDLAVVALREGLDLPPTDDPMLLAYLLDPSNTTPEGVARRYGGEWTEDAAKRALLAERLHANLLGRLQGEERLLWLYEEVEKPLSRVLAHMEATGVKLDVAYLENLSLEVAAHMRRLEEEVFRLAGRSFRLNSRDQLERVLFDELGLPPIGKTEKTGKRSTSAAVLEALREVHPIVDKILQYRELAKLKGTYIDRLPALVHPKTGRLHTRFNQTATATGRLSSSDPNLQNIPVRTPLAQKIRRAFVAEEGWRLVALDYRQIELRVLAHLSGDENLIRVFQEGKDIHTQTASWMFGLSAEAIDPLMRRAAKTINFGVLYGMSAFRLSQELGIPYEEAQAFIQKYFQSYPKVKAWIEKTLREGRTRGYVETLFGRRRYVPDLNARVKGKREAAERMAFNMPVQGTAADLMKLAMVRLFPQLREVGARMLLQVHDELLLEAPKERAEEVAALAKEVMEGVWPLAVPLEVEVGIGEDWLAAKG

SEQ ID NO: 4213 - DNA, 2523 bp, synthetic construct
  misc_feature 1..2523: note = Variant of DNA polymerase I from Thermus sp. strain 2.9
  source 1..2523: mol_type = other DNA
atgcaccatcatcatcatcatggcggtagcggcgtgttaccggtgttcgagcctaaaggtcgcgtgcttctggttgatggccatcatctcgcgtatcgtaacttctttgccctgaaaggattaaccaccagcctgggcgagccggtacagggtgtctacggctttgcaaagtcgctcctgaaagctctgaaagaagacggtgatgtggtgattgttgtctttgatgcgaaagcgccaagttttcgccacgaagcgtacgaagcttacaaagccgggcgtgctccaacgccggaagactttcctcgccaattggcgcttatgaaggaattagtggatttgcttggcctcgaacgcttggaagttcccggtttcgaggcagacgacgtattagcgactctcgcaaagaaagccgaacgtgagggctatgaagtccagatcttgacagcagatcgcgatcttttccagcttttatctccgcgcatctcggtgttacacccggaagggcatcgtatcaccccggaatggctctgggagaaatatggtttgcgtcccgaacaatgggtggattttcgcgccttagcaggcgatccgagcgacaatattccgggagttaaaggtatcggcgagaagacggcgctcaagctccttaaagaatgggggtcgttggagaacttgcttaagaatttagatcaggtcaaaccagagtcagtgcgtgagaagattcttgctcacctcgaagacctcaaattaagccgcgaattgtcccgtgtacgcaccgatttgccgctcgaagttgatttcggtcgccgccgcgaacctgactgggagggtcttaaagcgtttttagagcgtcttgaatttggttcgctcttgcatgaattcggccttttagaaagcccgttactggccgaagaagcaccttggccaccgcccgagggcgcgtttttaggttaccgtttgagtcgcccggaaccgatgtgggccgaattactggctcttgcagcgtctgcccagggacgtgtgtatcgcgcggaagaccctcatggtgcgctccgcggcctcttcgaagtccgtggactccttgccaaagacttagctgttgttgcattgcgcgaaggtcttgatttacctccgactgatgatccaatgcttcttgcgtacctcttggacccgtcaaacacgacgcccgaaggcgtagcccgtcgttacggcggcgagtggaccgaagatgcagcgaaacgcgcgttattggccgaacgtttgcacgccaatttattaggacgtttgcaaggcgaggaacgtctcctctggctttacgaagaagtggagaaaccattgagtcgcgtgctcgcgcatatggaagctaccggtgtcaaattagacgtggcgtatttggagaatctcagccttgaagttgctgcccacatgcgccgcttggaggaagaagtattccgtttagcaggccgttcctttcgccttaactctcgcgatcagttagaacgtgtgttgttcgatgaacttggtctccctcctatcggcaagacagagaagaccggtaaacgtagcacttcagcggcggttttagaagctcttcgcgaagtccatcccattgtggacaagatcttgcagtaccgcgaactcgcgaaattgaaaggcacctatattgaccgtcttccggcattagtccacccgaaaacgggacgcctccatacccgcttcaaccaaacagccacggcgaccggtcgtttgtcctcctctgatccaaaccttcagaatattccagtacgtaccccattgggccagaagatccgccgtgcgtttgtagctgaggagggttggcgtttagtggccctcgattatcgtcaaattgaaattcgtgtccttgcccatctttctggcgatgagaacctcatccgcgtgtttcaggaaggcaaagacattcacactcaaacggcaagctggatgtttggattatcagctgaagcgatcgatcctttgatgcgtcgtgcagcgaagaccatcaatttcggtgttctctacggtatgagtgcctttcgtttgtcgcaggaattaggcattccctatgaagaagctcaggcgttcattcagaaatactttcaaagctatcccaaagttaaagcatggatcgagaagactctccgtgaaggccgcacacgtggttacgtagagaccttatttggacgtcgccgctatgttcccgatttaaacgctcgcgtgaaaggcaagcgtgaagccgccgaacgcatggcgttcaacatgcctgtacagggcacggcagctgacctcatgaaacttgcaatggtgcgcctttttccacaattgcgtgaagttggtgcccgcatgctcttgcaggtccacgatgaactcttgttagaagcgccaaaagagcgtgcggaagaggtggcagccctcgcgaaagaagttatggaaggcgtgtggcccttagcggtgcctcttgaagtcgaagttggtattggcgaggattggctggctgccaaagga

SEQ ID NO: 4214 - protein, 841 aa, synthetic construct
  REGION 1..841: note = Variant of DNA polymerase I from Thermus sp. strain 2.9
MHHHHHHGGSGVLPVFEPKGRVLLVDGHHLAYRNFFALKGLTTSLGEPVQGVYGFAKSLLKALKEDGDVVIVVFDAKAPSFRHEAYEAYKAGRAPTPEDFPRQLALMKELVDLLGLERLEVPGFEADDVLATLAKKAEREGYEVQILTADRDLFQLLSPRISVLHPEGHRITPEWLWEKYGLRPEQWVDFRALAGDPSDNIPGVKGIGEKTALKLLKEWGSLENLLKNLDQVKPESVREKILAHLEDLKLSRELSRVRTDLPLEVDFGRRREPDWEGLKAFLERLEFGSLLHEFGLLESPLLAEEAPWPPPEGAFLGYRLSRPEPMWAELLALAASAQGRVYRAEDPHGALRGLFEVRGLLAKDLAVVALREGLDLPPTDDPMLLAYLLDPSNTTPEGVARRYGGEWTEDAAKRALLAERLHANLLGRLQGEERLLWLYEEVEKPLSRVLAHMEATGVKLDVAYLENLSLEVAAHMRRLEEEVFRLAGRSFRLNSRDQLERVLFDELGLPPIGKTEKTGKRSTSAAVLEALREVHPIVDKILQYRELAKLKGTYIDRLPALVHPKTGRLHTRFNQTATATGRLSSSDPNLQNIPVRTPLGQKIRRAFVAEEGWRLVALDYRQIEIRVLAHLSGDENLIRVFQEGKDIHTQTASWMFGLSAEAIDPLMRRAAKTINFGVLYGMSAFRLSQELGIPYEEAQAFIQKYFQSYPKVKAWIEKTLREGRTRGYVETLFGRRRYVPDLNARVKGKREAAERMAFNMPVQGTAADLMKLAMVRLFPQLREVGARMLLQVHDELLLEAPKERAEEVAALAKEVMEGVWPLAVPLEVEVGIGEDWLAAKG

SEQ ID NO: 4215 - DNA, 2523 bp, synthetic construct
  misc_feature 1..2523: note = Variant of DNA polymerase I from Thermus sp. strain 2.9
  source 1..2523: mol_type = other DNA
atgcaccatcatcatcatcatggcggtagcggcgtgttaccggtgttcgagcctaaaggtcgcgtgcttctggttgatggccatcatctcgcgtatcgtaacttctttgccctgaaaggattaaccaccagcctgggcgagccggtacagggtgtctacggctttgcaaagtcgctcctgaaagctctgaaagaagacggtgatgtggtgattgttgtctttgatgcgaaagcgccaagttttcgccacgaagcgtacgaagcttacaaagccgggcgtgctccaacgccggaagactttcctcgccaattggcgcttatgaaggaattagtggatttgcttggcctcgaacgcttggaagttcccggtttcgaggcagacgacgtattagcgactctcgcaaagaaagccgaacgtgagggctatgaagtccagatcttgacagcagatcgcgatcttttccagcttttatctccgcgcatctcggtgttacacccggaagggcatcgtatcaccccggaatggctctgggagaaatatggtttgcgtcccgaacaatgggtggattttcgcgccttagcaggcgatccgagcgacaatattccgggagttaaaggtatcggcgagaagacggcgctcaagctccttaaagaatgggggtcgttggagaacttgcttaagaatttagatcaggtcaaaccagagtcagtgcgtgagaagattcttgctcacctcgaagacctcaaattaagccgcgaattgtcccgtgtacgcaccgatttgccgctcgaagttgatttcggtcgccgccgcgaacctgactgggagggtcttaaagcgtttttagagcgtcttgaatttggttcgctcttgcatgaattcggccttttagaaagcccgttactggccgaagaagcaccttggccaccgcccgagggcgcgtttttaggttaccgtttgagtcgcccggaaccgatgtgggccgaattactggctcttgcagcgtctgcccagggacgtgtgtatcgcgcggaagaccctcatggtgcgctccgcggcctcttcgaagtccgtggactccttgccaaagacttagctgttgttgcattgcgcgaaggtcttgatttacctccgactgatgatccaatgcttcttgcgtacctcttggacccgtcaaacacgacgcccgaaggcgtagcccgtcgttacggcggcgagtggaccgaagatgcagcgaaacgcgcgttattggccgaacgtttgcacgccaatttattaggacgtttgcaaggcgaggaacgtctcctctggctttacgaagaagtggagaaaccattgagtcgcgtgctcgcgcatatggaagctaccggtgtcaaattagacgtggcgtatttggagaatctcagccttgaagttgctgcccacatgcgccgcttggaggaagaagtattccgtttagcaggccgttcctttcgccttaactctcgcgattgtttagaacgtgtgttgttcgatgaacttggtctccctcctatcggcaagacagagaagaccggtaaacgtagcacttcagcggcggttttagaagctcttcgcgaagtccatcccattgtggacaagatcttgcagtaccgcgaactcgcgaaattgaaaggcacctatattgaccgtcttccggcattagtccacccgaaaacgggacgcctccatacccgcttcaaccaaacagccacggcgaccggtcgtttgtcctcctctgatccaaaccttcagaatattccagtacgtaccccattgggccagaagatccgccgtgcgtttgtagctgaggagggttggcgtttagtggccctcgattatcgtcaaattgaattacgtgtccttgcccatctttctggcgatgagaacctcatccgcgtgtttcaggaaggcaaagacattcacactcaaacggcaagctggatgtttggattatcagctgaagcgatcgatcctttgatgcgtcgtgcagcgaagaccatcaatttcggtgttctctacggtatgagtgcctttcgtttgtcgcaggaattaggcattccctatgaagaagctcaggcgttcattcagaaatactttcaaagctatcccaaagttaaagcatggatcgagaagactctccgtgaaggccgcacacgtggttacgtagagaccttatttggacgtcgccgctatgttcccgatttaaacgctcgcgtgaaaggcaagcgtgaagccgccgaacgcatggcgttcaacatgcctgtacagggcacggcagctgacctcatgaaacttgcaatggtgcgcctttttccacaattgcgtgaagttggtgcccgcatgctcttgcaggtccacgatgaactcttgttagaagcgccaaaagagcgtgcggaagaggtggcagccctcgcgaaagaagttatggaaggcgtgtggcccttagcggtgcctcttgaagtcgaagttggtattggcgaggattggctggctgccaaagga

SEQ ID NO: 4216 - protein, 841 aa, synthetic construct
  REGION 1..841: note = Variant of DNA polymerase I from Thermus sp. strain 2.9
MHHHHHHGGSGVLPVFEPKGRVLLVDGHHLAYRNFFALKGLTTSLGEPVQGVYGFAKSLLKALKEDGDVVIVVFDAKAPSFRHEAYEAYKAGRAPTPEDFPRQLALMKELVDLLGLERLEVPGFEADDVLATLAKKAEREGYEVQILTADRDLFQLLSPRISVLHPEGHRITPEWLWEKYGLRPEQWVDFRALAGDPSDNIPGVKGIGEKTALKLLKEWGSLENLLKNLDQVKPESVREKILAHLEDLKLSRELSRVRTDLPLEVDFGRRREPDWEGLKAFLERLEFGSLLHEFGLLESPLLAEEAPWPPPEGAFLGYRLSRPEPMWAELLALAASAQGRVYRAEDPHGALRGLFEVRGLLAKDLAVVALREGLDLPPTDDPMLLAYLLDPSNTTPEGVARRYGGEWTEDAAKRALLAERLHANLLGRLQGEERLLWLYEEVEKPLSRVLAHMEATGVKLDVAYLENLSLEVAAHMRRLEEEVFRLAGRSFRLNSRDCLERVLFDELGLPPIGKTEKTGKRSTSAAVLEALREVHPIVDKILQYRELAKLKGTYIDRLPALVHPKTGRLHTRFNQTATATGRLSSSDPNLQNIPVRTPLGQKIRRAFVAEEGWRLVALDYRQIELRVLAHLSGDENLIRVFQEGKDIHTQTASWMFGLSAEAIDPLMRRAAKTINFGVLYGMSAFRLSQELGIPYEEAQAFIQKYFQSYPKVKAWIEKTLREGRTRGYVETLFGRRRYVPDLNARVKGKREAAERMAFNMPVQGTAADLMKLAMVRLFPQLREVGARMLLQVHDELLLEAPKERAEEVAALAKEVMEGVWPLAVPLEVEVGIGEDWLAAKG

SEQ ID NO: 4217 - DNA, 2523 bp, synthetic construct
  misc_feature 1..2523: note = Variant of DNA polymerase I from Thermus sp. strain 2.9
  source 1..2523: mol_type = other DNA
atgcaccatcatcatcatcatggcggtagcggcgtgttaccggtgttcgagcataaaggtcgcgtgcttctggttgatggccatcatctcgcgtatcgtaacttctttgccctgaaaggattaaccaccagcctgggcgagccggtacagggtgtctacggctttgcaaagtcgctcctgaaagctctgaaagaagacggtgatgtggtgattgttgtctttgatgcgaaagcgccaagttttcgccacgaagcgtacgaagcttacaaagccgggcgtgctccaacgccggaagactttcctcgccaattggcgcttatgaaggaattagtggatttgcttggcctcgaacgcttggaagttcccggtttcgaggcagacgacgtattagcgactctcgcaaagaaagccgaacgtgagggctatgaagtccagatcttgacagcagatcgcgatcttttccagcttttatctccgcgcatctcggtgttacacccggaagggcatcgtatcaccccggaatggctctgggagaaatatggtttgcgtcccgaacaatgggtggattttcgcgccttagcaggcgatccgagcgacaatattccgggagttaaaggtatcggcgagaagacggcgctcaagctccttaaagaatgggggtcgttggagaacttgcttaagaatttagatcaggtcaaaccagagtcagtgcgtgagaagattcttgctcacctcgaagacctcaagttaagccgcgaattgtcccgtgtacgcaccgatttgccgctcgaagttgatttcggtcgccgccgcgaacctgactgggagggtcttaaagcgtttttagagcgtcttgaatttggttcgctcttgcatgaattcggccttttagaaagcccgttactggccgaagaagcaccttggccaccgcccgagggcgcgtttttaggttaccgtttgagtcgcccggaaccgatgtgggccgaattactggctcttgcagcgtctgcccagggacgtgtgtatcgcgcggaagaccctcatggtgcgctccgcggcctcttcgaagtccgtggactccttgccaaagacttagctgttgttgcattgcgcgaaggtcttgatttacctccgactgatgatccaatgcttcttgcgtacctcttggacccgtcaaacacgacgcccgaaggcgtagcccgtcgttacggcggcgagtggaccgaagatgcagcgaaacgcgcgttattggccgaacgtttgcacgcgaatttactgggacgtttgcaaggcgaggaacgtctcctctggctttacgaagaagtggagaaaccattgagtcgcgtgctcgcgcatatggaagctaccggtgtcaaattagacgtggcgtatttggagaatctcagccttgaagttgctgcccacatgcgccgcttggaggaagaagtagtccgtttagcaggccgttcctttcgccttaactctcgcgatcagttagaacgtgtgttgttcgatgaacttggtctccctcctatcggcaagacagagaagaccggtaaacgtagcacttcagcggcggttttagaagctcttcgcgaagtccatcccattgtggacaagatcttgcagtaccgcgaactcgcgaaattgaaaggcacctatattgaccgtcttccggcattagtccacccgaaaacgggacgcctccatacccgcttcaaccaaacagccacggcgaccggtcgtttgtcctcctctgatccaaaccttcagaatattccagtacgtaccccattgggccagaagatccgccgtgcgtttgtagctgaggagggttggcgtttagtggccctcgattatcgtcaaattgaattacgtgtccttgcccatctttctggcgatgagaacctcatccgcgtgtttcaagaaggcaaagacattcacactcaaacggcaagctggatgtttggattatcagctgaagcgatcgatcctttgatgcgtcgtgcagcgaagaccatcaatttcggtgttctctacggtatgagtgcctttcgtttgtcgcaggaattaggcattccctatgaagaagctcaggcgttcattcagaaatactttcaaagctatcccaaagttaaagcatggatcgagaagactctccgtgaaggccgcacacgtggttacgtagagaccttatttggacgtcgccgctatgttcccgatttaaacgcccgcgtgaaaggcaagcgtgaagccgccgaacgcatggcgttcaacatgcctgtacagggcacggcagctgacctcatgaaacttgcaatggtgcgcctttttccacaattgcgtgaagttggtgcccgcatgctcttgcaggtccacgatgaactcttgttagaagcgccaaaagagcgtgcggaagaggtggcagccctcgcgaaagaagttatggaaggcgtgtggcccttagcggtgcctcttgaagtcgaagttggtattggcgaggattggctggctgccaaagga

SEQ ID NO: 4218 - protein, 841 aa, synthetic construct
  REGION 1..841: note = Variant of DNA polymerase I from Thermus sp. strain 2.9
MHHHHHHGGSGVLPVFEHKGRVLLVDGHHLAYRNFFALKGLTTSLGEPVQGVYGFAKSLLKALKEDGDVVIVVFDAKAPSFRHEAYEAYKAGRAPTPEDFPRQLALMKELVDLLGLERLEVPGFEADDVLATLAKKAEREGYEVQILTADRDLFQLLSPRISVLHPEGHRITPEWLWEKYGLRPEQWVDFRALAGDPSDNIPGVKGIGEKTALKLLKEWGSLENLLKNLDQVKPESVREKILAHLEDLKLSRELSRVRTDLPLEVDFGRRREPDWEGLKAFLERLEFGSLLHEFGLLESPLLAEEAPWPPPEGAFLGYRLSRPEPMWAELLALAASAQGRVYRAEDPHGALRGLFEVRGLLAKDLAVVALREGLDLPPTDDPMLLAYLLDPSNTTPEGVARRYGGEWTEDAAKRALLAERLHANLLGRLQGEERLLWLYEEVEKPLSRVLAHMEATGVKLDVAYLENLSLEVAAHMRRLEEEVVRLAGRSFRLNSRDQLERVLFDELGLPPIGKTEKTGKRSTSAAVLEALREVHPIVDKILQYRELAKLKGTYIDRLPALVHPKTGRLHTRFNQTATATGRLSSSDPNLQNIPVRTPLGQKIRRAFVAEEGWRLVALDYRQIELRVLAHLSGDENLIRVFQEGKDIHTQTASWMFGLSAEAIDPLMRRAAKTINFGVLYGMSAFRLSQELGIPYEEAQAFIQKYFQSYPKVKAWIEKTLREGRTRGYVETLFGRRRYVPDLNARVKGKREAAERMAFNMPVQGTAADLMKLAMVRLFPQLREVGARMLLQVHDELLLEAPKERAEEVAALAKEVMEGVWPLAVPLEVEVGIGEDWLAAKG

SEQ ID NO: 4219 - DNA, 2523 bp, synthetic construct
  misc_feature 1..2523: note = Variant of DNA polymerase I from Thermus sp. strain 2.9
  source 1..2523: mol_type = other DNA
atgcaccatcatcatcatcatggcggtagcggcgtgttaccggtgttcgagcctaaaggtcgcgtgcttctggttgatggccatcatctcgcgtatcgtaacttctttgccctgaaaggattaaccaccagcctgggcgagccggtacagggtgtctacggctttgcaaagtcgctcctgaaagctctgaaagaagacggtgatgtggtgattgttgtctttgatgcgaaagcgccaagttttcgccacgaagcgtacgaagcttacaaagccgggcgtgctccaacgccggaagactttcctcgccaattggcgcttatgaaggaattagtggatttgcttggcctcgaacgcttggaagttcccggtttcgaggcagacgacgtattagcgactctcgcaaagaaagccgaagatgagggctatgaagtccagatcttgacagcagatcgcgatcttttccagcttttatctccgcgcatctcggtgttacacccggaagggcatcgtatcaccccggaatggctctgggagaaatatggtttgcgtcccgaacaatgggtggattttcgcgccttagcaggcgatccgagcgacaatattccgggagttaaaggtatcggcgagaagacggcgctcaagctccttaaagaatgggggtcgttggagaacttgcttaagaatttagatcaggtcaaaccagagtcagtgcgtgagaagattcttgctcacctcgaagacctcgagttaagccgcgaattgtcccgtgtacgcaccgatttgccgctcgaagttgatttcggtcgccgccgcgaacctgactgggagggtcttaaagcgtttttagagcgtcttgaatttggttcgctccagcatgaattcggccttttagaaagcccgttactggccgaagaagcaccttggccaccgcccgagggcgcgtttttaggttaccgtttgacccgcccggaaccgatgtgggccgaattactggctcttgcagcgtctgcccagggacgtgtgtatcgcgcggaagaccctcatggtgcgctccgcggcctcttcgaagtccgtggactccttgccaaagacttagctgttgttgcattgcgcgaaggtcttgatttacctccgactgatgatccaatgcttcttgcgtacctcttggacccgtcaaacacgacgcccgaaggcgtagcccgtcgttacggcggcgagtggaccgaagatgcagcgaaacgcgcgttattggccgaacgtttgcacgccaatttattaggacgtttgcaaggcgaggagcgtctcctctggctttacgaagaagtggagaaaccattgagtcgcgtgctcgcgcatatggaagctaccggtgtcaaattagacgtggcgtatttggagaatctcagccttgaagttgctgcccacatgcgccgcttggaggaagaagtagtccgtttagcaggccgttcctttcgccttaactctcgcgatcagttagaacgtgtgttgttcgatgaacttggtctccctcctatcggcaagacagagaagaccggtaaacgtagcacttcagcggcggttttagaagctcttcgcgaagtccatcccattgtggacaagatcttgcagtaccgcgaactcgcgaaattgaaaggcacctatattgaccgtcttccggcattagtccacccgaaaacgggacgcctccatacccgcttcaaccaaacagccacggcgaccggtcgtttgtcctcctctgatccaaaccttcagaatattccagtacgtaccccattgggccagaagatccgccgtgcgtttgtagctgaggagggttggcgtttagtggccctcgattatcgtcaaattgaattacgtgtccttgcccatctttctggcgatgagaacctcatccgcgtgtttcaagaaggcaaagacattcacactcaaacggcaagctggatgtttggattatcagctgaagcgatcgatcctttgatgcgtcgtgcagcgaagacgatcaatttcggtgttctctacggtatgagtgcctttcgtttgtcgcaggagttaggcattcccaaagaagaagctcaggcgttcattcagaaatactttcaaagctatcccaaagttaaagcatggatcgagaagactctccgtgaaggccgccaccgtggttacgtagagaccttatttggacgtcgccgctatgttcccgatttaaacgctcgcgtgaaaggcaagcgtgaagccgccgaacgcatggcgttcaacatgcctgtacagggcacggcagctgacctcatgaaacttgcaatggtgcgcctttttccacaattgcgtgaagttggtgcccgcatgctcttgcaggtccacgatgaactcttgttagaagcgccaaaagagcgtgcggaagaggtggcagccctcgcgaaagaagttatggaaggcgtgtggcccttagcggtgcctcttgaagtcgaagttggtattggcgaggattggctggctgccaaagga

SEQ ID NO: 4220 - protein, 841 aa, synthetic construct
  REGION 1..841: note = Variant of DNA polymerase I from Thermus sp. strain 2.9
MHHHHHHGGSGVLPVFEPKGRVLLVDGHHLAYRNFFALKGLTTSLGEPVQGVYGFAKSLLKALKEDGDVVIVVFDAKAPSFRHEAYEAYKAGRAPTPEDFPRQLALMKELVDLLGLERLEVPGFEADDVLATLAKKAEDEGYEVQILTADRDLFQLLSPRISVLHPEGHRITPEWLWEKYGLRPEQWVDFRALAGDPSDNIPGVKGIGEKTALKLLKEWGSLENLLKNLDQVKPESVREKILAHLEDLELSRELSRVRTDLPLEVDFGRRREPDWEGLKAFLERLEFGSLQHEFGLLESPLLAEEAPWPPPEGAFLGYRLTRPEPMWAELLALAASAQGRVYRAEDPHGALRGLFEVRGLLAKDLAVVALREGLDLPPTDDPMLLAYLLDPSNTTPEGVARRYGGEWTEDAAKRALLAERLHANLLGRLQGEERLLWLYEEVEKPLSRVLAHMEATGVKLDVAYLENLSLEVAAHMRRLEEEVVRLAGRSFRLNSRDQLERVLFDELGLPPIGKTEKTGKRSTSAAVLEALREVHPIVDKILQYRELAKLKGTYIDRLPALVHPKTGRLHTRFNQTATATGRLSSSDPNLQNIPVRTPLGQKIRRAFVAEEGWRLVALDYRQIELRVLAHLSGDENLIRVFQEGKDIHTQTASWMFGLSAEAIDPLMRRAAKTINFGVLYGMSAFRLSQELGIPKEEAQAFIQKYFQSYPKVKAWIEKTLREGRHRGYVETLFGRRRYVPDLNARVKGKREAAERMAFNMPVQGTAADLMKLAMVRLFPQLREVGARMLLQVHDELLLEAPKERAEEVAALAKEVMEGVWPLAVPLEVEVGIGEDWLAAKG

SEQ ID NO: 4221 - DNA, 2523 bp, synthetic construct
  misc_feature 1..2523: note = Variant of DNA polymerase I from Thermus sp. strain 2.9
  source 1..2523: mol_type = other DNA
atgcaccatcatcatcatcatggcggtagcggcgtgttaccggtgttcgagcctaaaggtcgcgtgcttctggttgatggccatcatctcgcgtatcgtaacttctttgccctgaaaggattaaccaccagcctgggcgagccggtacagggtgtctacggctttgcaaagtcgctcctgaaagctctgaaagaagacggtgatgtggtgattgttgtctttgatgcgaaagcgccaagttttcgccacgaagcgtacgaagcttacaaagccgggcgtgctccaacgccggaagactttcctcgccaattggcgcttatgaaggaattagtggatttgcttggcctcgaacgcttggaagttcccggtttcgaggcagacgacgtattagcgactctcgcaaagaaagccgaacgtgagggctatgaagtccagatcttgacagcagatcgcgatcttttccagcttttatctccgcgcatctcggtgttacacccggaagggcatcgtatcaccccggaatggctctgggagaaatatggtttgcgtcccgaacaatgggtggattttcgcgccttagcaggcgatccgagcgacaatattccgggagttaaaggtatcggcgagaagacggcgctcaagctccttaaagaatgggggtcgttggagaacttgcttaagaatttagatcaggtcaaaccagagtcagtgcgtgagaagattcttgctcacctcgaagacctcaaattaagccgcgaattgtcccgtgtacgcaccgatttgccgctcgaagttgatttcggtcgccgccgcgaacctgactgggagggtcttaaagcgtttttagagcgtcttgaatttggttcgctcctgcatgaattcggccttttagaaagcccgttactggccgaagaagcaccttggccaccgcccgagggcgcgtttttaggttaccgtttgagtcgcccggaaccgatgtgggccgaattactggctcttgcagcgtctgcccagggacgtgtgtatcgcgcggaagaccctcatggtgcgctccgcggcctcttcgaagtccgtggactccttgccaaagacttagctgttgttgcattgcgcgaaggtcttgatttacctccgactgatgatccaatgcttcttgcgtacctcttggacccgtcaaacacgacgcccgaaggcgtagcccgtcgttacggcggcgagtggaccgaagatgcagcgaaacgcgcgttattggccgaacgtttgcacgaaaatttattaggacgtttgcaaggcgaggaacgtctcctctggctttacgaagaagtggagaaaccattgagtcgcgtgctcgcgcatatggaagctaccggtgtcaaattagacgtggcgtatttggagaatctcagccttgaagttgctgcccacatgcgccgcttggaggaagaagtattccgtttagcaggccgttcctttcgccttaactctcgcgatcagttagaacgtgtgttgttcgatgaacttggtctccctcctatcggcaagacagagaagaccggtaaacgtagcacttcagcagcggttttagacgctcttcgcgaagtccatcccattgtggacaagatcttgcagtaccgcgaactcgcgaaattgaaaggcacctatattgaccgtcttccggcattagtccacccgaaaacgggacgcctccatacccgcttcaaccaaacagccacggcgaccggtcgtttgtcctcctctgatccaaaccttcagaatattccagtacgtaccccattgggccagaagatccgccgtgcgtttgtagctgaggagggttggcgtttagtggccctcgattatcgtcaaattgaattacgtgtccttgcccatctttctggcgatgagaacctcatccgcgtgtttcaggaaggcaaagacattcacactcaaacggcaagctggatgtttggattaagtgctgaagcgatcgatcctttgatgcgtcgtgcagcgaagaccatcaatttcggtgttctctacggtatgagtccatttcgtttgtcgcaggaattaggcattccctatgaagaagctcaggcgttcattcagaaatactttcaaagctatcccaaagttaaagcatggatcgagaagactctccgtgaaggccgcacacgtggttacgtagagaccttatttggacgtcgccgctatgttcccgatttaaacgctcgcgtgaaaggcaagcgtgaagccgccgaacgcatggcgttcaacatgcctgtacagggcacggcagctgacctcatgaaacttgcaatggtgcgcctttttccacaattgcgtgaagttggtgcccgcatgctcttgcaggtccacgatgaactcttgttagaagcgccaaaagagcgtgcggaagaggtggcagccctcgcgaaagaagttatggaaggcgtgtggcccttagcggtgcctcttgaagtcgaagttggtattggcgaggattggctggctgccaaagga

SEQ ID NO: 4222 - protein, 841 aa, synthetic construct
  REGION 1..841: note = Variant of DNA polymerase I from Thermus sp. strain 2.9
MHHHHHHGGSGVLPVFEPKGRVLLVDGHHLAYRNFFALKGLTTSLGEPVQGVYGFAKSLLKALKEDGDVVIVVFDAKAPSFRHEAYEAYKAGRAPTPEDFPRQLALMKELVDLLGLERLEVPGFEADDVLATLAKKAEREGYEVQILTADRDLFQLLSPRISVLHPEGHRITPEWLWEKYGLRPEQWVDFRALAGDPSDNIPGVKGIGEKTALKLLKEWGSLENLLKNLDQVKPESVREKILAHLEDLKLSRELSRVRTDLPLEVDFGRRREPDWEGLKAFLERLEFGSLLHEFGLLESPLLAEEAPWPPPEGAFLGYRLSRPEPMWAELLALAASAQGRVYRAEDPHGALRGLFEVRGLLAKDLAVVALREGLDLPPTDDPMLLAYLLDPSNTTPEGVARRYGGEWTEDAAKRALLAERLHENLLGRLQGEERLLWLYEEVEKPLSRVLAHMEATGVKLDVAYLENLSLEVAAHMRRLEEEVFRLAGRSFRLNSRDQLERVLFDELGLPPIGKTEKTGKRSTSAAVLDALREVHPIVDKILQYRELAKLKGTYIDRLPALVHPKTGRLHTRFNQTATATGRLSSSDPNLQNIPVRTPLGQKIRRAFVAEEGWRLVALDYRQIELRVLAHLSGDENLIRVFQEGKDIHTQTASWMFGLSAEAIDPLMRRAAKTINFGVLYGMSPFRLSQELGIPYEEAQAFIQKYFQSYPKVKAWIEKTLREGRTRGYVETLFGRRRYVPDLNARVKGKREAAERMAFNMPVQGTAADLMKLAMVRLFPQLREVGARMLLQVHDELLLEAPKERAEEVAALAKEVMEGVWPLAVPLEVEVGIGEDWLAAKG

SEQ ID NO: 4223 - DNA, 2523 bp, synthetic construct
  misc_feature 1..2523: note = Variant of DNA polymerase I from Thermus sp. strain 2.9
  source 1..2523: mol_type = other DNA
atgcaccatcatcatcatcatggcggtagcggcgtgttaccggtgttcgagcctaaaggtcgcgtgcttctggttgatggccatcatctcgcgtatcgtaacttctttgccctgaaaggattaaccaccagcctgggcgagccggtacagggtgtctacggctttgcaaagtcgctcctgaaagctctgaaagaagacggtgatgtggtgattgttgtctttgatgcgaaagcgccaagttttcgccacgaagcgtacgaagcttacaaagccgggcgtgctccaacgccggaagactttcctcgccaattggcgcttatgaaggaattagtggatttgcttggcctcgaacgcttggaagttcccggtttcgaggcagacgacgtattagcgactctcgcaaagaaagccgaacgcgagggctatgaagtccagatcttgacagcagatcgcgatcttttccagcttttatctccgcgcatctcggtgttacacccggaagggcatcgtatcaccccggaatggctctgggagaaatatggtttgcgtcccgaacaatgggtggattttcgcgccttagcaggcgatccgagcgacaatattccgggagttaaaggtatcggcgagaagacggcgctcaagctccttaaagaatgggggtcgttggagaacttgcttaagaatttagatcaggtcaaaccagagtcagtgcgtgagaagattcttgctcacctcgaagacctcaaattaagccgcgaattgtcccgtgtacgcaccgatttgccgctcgaagttgatttcggtcgccgccgcgaacctgactgggagggtcttaaagcgtttttagagcgtcttgaatttggttcgctcttgcatgaattcggccttttagaaagcccgttactggccgaagaagcaccttggccaccgcccgagggcgcgtttttaggttaccgtttgagtcgcccggaaccgatgtgggccgaattactggctcttgcagcgtctgcccagggacgtgtgtatcgcgcggaagaccctcatggtgcgctccgcggcctcttcgaagtccgtggactccttgccaaagacttagctgttgttgcattgcgcgaaggtcttgatttacctccgactgatgatccaatgcttcttgcgtacctcttggacccgtcaaacacgacgcccgaaggcgtagcccgtcgttacggcggcgagtggaccgaagatgcagcgaaacgcgcgttattggccgaacgtttgcacgagaatttattaggacgtttgcaaggcgaggaacgtctcctctggctttacgaagaagtggagaaaccattgagtcgcgtgctcgcgcatatggaagctaccggtgtcaaattagacgtggcgtatttggagaatctcagccttgaagttgctgcccacatgcgccgcttggaggaagaagtagttcgtttagcaggccgttcctttcgccttaactctcgcgatcagttagaacgtgtgttgttcgatgaacttggtctccctcctatcggcaagacagagaagaccggtaaacgtagcacttcagcggcggttttagaagctcttcgcgaagtccatcccattgtggacaagatcttgcagtaccgcgaactcgcgaaattgaaaggcacctatattgaccgtcttccggcattagtccacccgaaaacgggacgcctccatacccgcttcaaccaaacagccacggcgaccggtcgtttgtcctcctctgatccaaaccttcagaatattccagtacgtaccccattgggccagaagatccgccgtgcgtttgtagctgaggagggttggcgtttagtggccctcgattatcgtcaaattgaattacgtgtccttgcccatctttctggcgatgagaacctcatccgcgtgtttcaggaaggcaaagacattcacactcaaacggcaagctggatgtttggattatcagctgaagcgatcgatcctttgatgcgtcgtgcagcgaagaagatcaatttcggtgttctctacggtatgagtgcctttcgtttgtcgcaggaattaggcattccctatgaagaagctcaggcgttcattcagaaatactttcaaagctatcccaaagttaaagcatggatcgagaagactctccgtgaaggccgcacacgtggttacgtagagaccttatttggacgtcgccgctatgttcccgatttaaacgctcgcgtgaaaggcaagcgtgaagccgccgaacgcatggcgttcaacatgcctgtacagggcacggcagctgacctcatgaaacttgcaatggtgcgcctttttccacaattgcgtgaagttggtgcccgcatgctcttgcaggtccacgatgaactcttgttagaagcgccaaaagagcgtgcggaagaggtggcagccctcgcgaaagaagttatggaaggcgtgtggcccttagcggtgcctcttgaagtcgaagttggtattggcgaggattggctggctgccaaagga

SEQ ID NO: 4224 - protein, 841 aa, synthetic construct
  REGION 1..841: note = Variant of DNA polymerase I from Thermus sp. strain 2.9
MHHHHHHGGSGVLPVFEPKGRVLLVDGHHLAYRNFFALKGLTTSLGEPVQGVYGFAKSLLKALKEDGDVVIVVFDAKAPSFRHEAYEAYKAGRAPTPEDFPRQLALMKELVDLLGLERLEVPGFEADDVLATLAKKAEREGYEVQILTADRDLFQLLSPRISVLHPEGHRITPEWLWEKYGLRPEQWVDFRALAGDPSDNIPGVKGIGEKTALKLLKEWGSLENLLKNLDQVKPESVREKILAHLEDLKLSRELSRVRTDLPLEVDFGRRREPDWEGLKAFLERLEFGSLLHEFGLLESPLLAEEAPWPPPEGAFLGYRLSRPEPMWAELLALAASAQGRVYRAEDPHGALRGLFEVRGLLAKDLAVVALREGLDLPPTDDPMLLAYLLDPSNTTPEGVARRYGGEWTEDAAKRALLAERLHENLLGRLQGEERLLWLYEEVEKPLSRVLAHMEATGVKLDVAYLENLSLEVAAHMRRLEEEVVRLAGRSFRLNSRDQLERVLFDELGLPPIGKTEKTGKRSTSAAVLEALREVHPIVDKILQYRELAKLKGTYIDRLPALVHPKTGRLHTRFNQTATATGRLSSSDPNLQNIPVRTPLGQKIRRAFVAEEGWRLVALDYRQIELRVLAHLSGDENLIRVFQEGKDIHTQTASWMFGLSAEAIDPLMRRAAKKINFGVLYGMSAFRLSQELGIPYEEAQAFIQKYFQSYPKVKAWIEKTLREGRTRGYVETLFGRRRYVPDLNARVKGKREAAERMAFNMPVQGTAADLMKLAMVRLFPQLREVGARMLLQVHDELLLEAPKERAEEVAALAKEVMEGVWPLAVPLEVEVGIGEDWLAAKG

SEQ ID NO: 4225 - DNA, 2523 bp, synthetic construct
  misc_feature 1..2523: note = Variant of DNA polymerase I from Thermus sp. strain 2.9
  source 1..2523: mol_type = other DNA
atgcaccatcatcatcatcatggcggtagcggcgtgttaccggtgttcgagcctaaaggtcgcgtgcttctggttgatggccatcatctcgcgtatcgtaacttctttgccctgaaaggattaaccaccagcctgggcgagccggtacagggtgtctacggctttgcaaagtcgctcctgaaagctctgaaagaagacggtgatgtggtgattgttgtctttgatgcgaaagcgccaagttttcgccacgaagcgtacgaagcttacaaagccgggcgtgctccaacgccggaagactttcctcgccaattggcgcttatgaaggaattagtggatttgcttggcctcgaacgcttggaagttcccggtttcgaggcagacgacgtattagcgactctcgcaaagaaagccgaacgtgagggctatgaagtccagatcttgacagcagatcgcgatcttttccagcttttatctccgcgcatctcggtgttacacccggaagggcatcgtatcaccccggaatggctctgggagaaatatggtttgcgtcccgaacaatgggtggattttcgcgccttagcaggcgatccgagcgacaatattccgggagttaaaggtatcggcgagaagacggcgctcaagctccttaaagaatgggggtcgttggagaacttgcttaagaatttagatcaggtcaaaccagagtcagtgcgtgagaagattcttgctcacctcgaagacctcaaattaagccgcgaattgtcccgtgtacgcaccgatttgccgctcgaagttgatttcggtcgccgccgcgaacctgactgggagggtcttaaagcgtttttagagcgtcttgaatttggttcgctcttgcatgaattcggccttttagaaagcccgttactggccgaagaagcaccttggccaccgcccgagggcgcgtttttaggttaccgtttgagtcgcccggaaccgatgtgggccgaattactggctcttgcagcgtctgcccagggacgtgtgtatcgcgcggaagaccctcatggtgcgctccgcggcctcttcgaagtccgtggactccttgccaaagacttagctgttgttgcattgcgcgaaggtcttgatttacctccgactgatgatccaatgcttcttgcgtacctcttggacccgtcaaacacgacgcccgaaggcgtagcccgtcgttacggcggcgagtggaccgaagatgcagcgaaacgcgcgttattggccgaacgtttgcacgccaatttattaggacgtttgcaaggcgaggaacgtctcctctggctttacgaagaagtggagaaaccattgagtcgcgtgctcgcgcatatggaagctaccggtgtcaaattagacgtggcgtatttggagaatctcagccttgaaacggctgcccacatgcgccgcttggaggaagaagtattccgtttagcaggccgttcctttcgccttaactctcgcgatcagttagaacgtgtgttgttcgatgaacttggtctccctcctatcggcaagacagagaagaccggtaaacgtagcacttcagcggcggttttagaagctcttcgcgaagtccatcccattgtggacaagatcttgcagtaccgcgaactcgcgaaattgaaaggcacctatattgaccgtcttccggcattagtccacccgaaaacgggacgcctccatacccgcttcaaccaaacagccacggcgaccggtcgtttgtcctcctctgatccaaaccttcagaatattccagtacgtaccccattgggccagaagatccgccgtgcgtttgtagctgaggagggttggcgtttagtggccctcgattatcgtcaaattgaattacgtgtccttgcccatctttctggcgatgagaacctcatccgcgtgtttcaggaaggcaaagacattcacactcaaacggcaagctggatgtttggattatcagctgaagcgatcgatcctttgatgcgtcgtgcagcgaagaccatcaatttcggtgttctctacggtatgagtgcctttcgtttgtcgcaggaattaggcattccctatgaagaagctcaggcgttcattcagaaatactttcaaagctatcccaaagttaaagcatggatcgagaagactctccgtgaaggccgcacacgtggttacgtagagaccttatttggacgtcgccgctatgttcccgatttaaacgctcgcgtgaaaggcaagcgtgaagccgccgaacgcatggcgttcaacatgcctgtacagggcacggcagctgacctcatgaaacttgcaatggtgcgcctttttccacaattgcgtgaagttggtgcccgcatgctcttgcaggtccacgatgaactcttgttagaagcgccaaaagagcgtgcggaagaggtggcagccctcgcgaaagaagttatggaaggcgtgtggcccttagcggtgcctcttgaagtcgaagttggtattggcgaggattggctggctgccaaagga

SEQ ID NO: 4226 - protein, 841 aa, synthetic construct
  REGION 1..841: note = Variant of DNA polymerase I from Thermus sp. strain 2.9
MHHHHHHGGSGVLPVFEPKGRVLLVDGHHLAYRNFFALKGLTTSLGEPVQGVYGFAKSLLKALKEDGDVVIVVFDAKAPSFRHEAYEAYKAGRAPTPEDFPRQLALMKELVDLLGLERLEVPGFEADDVLATLAKKAEREGYEVQILTADRDLFQLLSPRISVLHPEGHRITPEWLWEKYGLRPEQWVDFRALAGDPSDNIPGVKGIGEKTALKLLKEWGSLENLLKNLDQVKPESVREKILAHLEDLKLSRELSRVRTDLPLEVDFGRRREPDWEGLKAFLERLEFGSLLHEFGLLESPLLAEEAPWPPPEGAFLGYRLSRPEPMWAELLALAASAQGRVYRAEDPHGALRGLFEVRGLLAKDLAVVALREGLDLPPTDDPMLLAYLLDPSNTTPEGVARRYGGEWTEDAAKRALLAERLHANLLGRLQGEERLLWLYEEVEKPLSRVLAHMEATGVKLDVAYLENLSLETAAHMRRLEEEVFRLAGRSFRLNSRDQLERVLFDELGLPPIGKTEKTGKRSTSAAVLEALREVHPIVDKILQYRELAKLKGTYIDRLPALVHPKTGRLHTRFNQTATATGRLSSSDPNLQNIPVRTPLGQKIRRAFVAEEGWRLVALDYRQIELRVLAHLSGDENLIRVFQEGKDIHTQTASWMFGLSAEAIDPLMRRAAKTINFGVLYGMSAFRLSQELGIPYEEAQAFIQKYFQSYPKVKAWIEKTLREGRTRGYVETLFGRRRYVPDLNARVKGKREAAERMAFNMPVQGTAADLMKLAMVRLFPQLREVGARMLLQVHDELLLEAPKERAEEVAALAKEVMEGVWPLAVPLEVEVGIGEDWLAAKG

SEQ ID NO: 4227 - DNA, 2523 bp, synthetic construct
  misc_feature 1..2523: note = Variant of DNA polymerase I from Thermus sp. strain 2.9
  source 1..2523: mol_type = other DNA
atgcaccatcatcatcatcatggcggtagcggcgtgttaccggtgttcgagcctaaaggtcgcgtgcttctggttgatggccatcatctcgcgtatcgtaacttctttgccctgaaaggattaaccaccagcctgggcgagccggtacagggtgtctacggctttgcaaagtcgctcctgaaagctctgaaagaagacggtgatgtggtgattgttgtctttgatgcgaaagcgccaagttttcgccacgaagcgtacgaagcttacaaagccgggcgtgctccaacgccggaagactttcctcgccaattggcgcttatgaaggaattagtggatttgcttggcctcgaacgcttggaagttcccggtttcgaggcagacgacgtattagcgactctcgcaaagaaagccgaacgtgagggctatgaagtccagatcttgacagcagatcgcgatcttttccagcttttatctccgcgcatctcggtgttacacccggaagggcatcgtatcaccccggaatggctctgggagaaatatggtttgcgtcccgaacaatgggtggattttcgcgccttagcaggcgatccgagcgacaatattccgggagttaaaggtatcggcgagaagacggcgctcaagctccttaaagaatgggggtcgttggagaacttgcttaagaatttagatcaggtcaaaccagagtcagtgcgtgagaagattcttgctcacctcgaagacctcaaattaagccgcgaattgtcccgtgtacgcaccgatttgccgctcgaagttgatttcggtcgccgccgcgaacctgactgggagggtcttaaagcgtttttagagcgtcttgaatttggttcgctcttgcatgaattcggccttttagaaagcgggttactggccgaagaagcaccttggccaccgcccgagggcgcgtttttaggttaccgtttgagtcgcccggaaccgatgtgggccgaattactggctcttgcagcgtctgcccagggacgtgtgtatcgcgcggaagaccctcatggtgcgctccgcggcctcttcgaagtccgtggactccttgccaaagacttagctgttgttgcattgcgcgaaggtcttgatttacctccgactgatgatccaatgcttcttgcgtacctcttggacccgtcaaacacgacgcccgaaggcgtagcccgtcgttacggcggcgagtggaccgaagatgcagcgaaacgcgcgttattggccgaacgtttgcacgccaatttattaggacgtttgcaaggcgaggaacgtctcctctggctttacgaagaagtggagaaaccattgagtcgcgtgctcgcgcatatggaagctaccggtgtcaaattagacgtggcgtatttggagaatctcagccttgaagttgctgcccacatgcgccgcttggaggaagaagtattccgtttagcaggccgttcctttcgccttaactctcgcgatcagttagaacgtgtgttgttcgatgaacttggtctccctcctatcggcaagacagagaagaccggtaaacgtagcacttcagcggcggttttagaagctcttcgcgaagtccatcccattgtggacaagatcttgcagtaccgcgaactcgcgaaattgaaaggcacctatattgaccgtcttccggcattagtccacccgaaaacgggacgcctccatacccgcttcaaccaaacagccacggcgaccggtcgtttgtcctcctctgatccaaaccttcagaatattccagtacgtaccccattgggccagaagatccgccgtgcgtttgtagctgaggagggttggcgtttagtggccctcgattatcgtcaaattgaattacgtgtccttgcccatctttctggcgatgagaacctcatccgcgtgtttcaggaaggcaaagacattcacactcaaacggcaagctggatgtttggattatcagctgaagcgatcgatcctttgatgcgtcgtgcagcgaagaccatcaatttcggtgttctctacggtatgagtgcctttcgtttgtcgcaggaattaggcattccctatgaagaagctcaggcgttcattcagaaatactttcaaagctatcccaaagttaaagcatggatcgagaagactctccgtgaaggccgcacacgtggttacgtagagaccttatttggacgtcgccgctatgttcccgatttaaacgctcgcgtgaaaggcaagcgtgaagccgccgaacgcatggcgttcaacatgcctgtacagggcacggcagctgacctcatgaaacttgcaatggtgcgcctttttccacaattgcgtgaagttggtgcccgcatgctcttgcaggtccacgatgaactcttgttagaagcgccaaaagagcgtgcggaagaggtggcagccctcgcgaaagaagttatggaaggcgtgtggcccttagcggtgcctcttgaagtcgaagttggtattggcgaggattggctggctgccaaagga

SEQ ID NO: 4228 - protein, 841 aa, synthetic construct
  REGION 1..841: note = Variant of DNA polymerase I from Thermus sp. strain 2.9
MHHHHHHGGSGVLPVFEPKGRVLLVDGHHLAYRNFFALKGLTTSLGEPVQGVYGFAKSLLKALKEDGDVVIVVFDAKAPSFRHEAYEAYKAGRAPTPEDFPRQLALMKELVDLLGLERLEVPGFEADDVLATLAKKAEREGYEVQILTADRDLFQLLSPRISVLHPEGHRITPEWLWEKYGLRPEQWVDFRALAGDPSDNIPGVKGIGEKTALKLLKEWGSLENLLKNLDQVKPESVREKILAHLEDLKLSRELSRVRTDLPLEVDFGRRREPDWEGLKAFLERLEFGSLLHEFGLLESGLLAEEAPWPPPEGAFLGYRLSRPEPMWAELLALAASAQGRVYRAEDPHGALRGLFEVRGLLAKDLAVVALREGLDLPPTDDPMLLAYLLDPSNTTPEGVARRYGGEWTEDAAKRALLAERLHANLLGRLQGEERLLWLYEEVEKPLSRVLAHMEATGVKLDVAYLENLSLEVAAHMRRLEEEVFRLAGRSFRLNSRDQLERVLFDELGLPPIGKTEKTGKRSTSAAVLEALREVHPIVDKILQYRELAKLKGTYIDRLPALVHPKTGRLHTRFNQTATATGRLSSSDPNLQNIPVRTPLGQKIRRAFVAEEGWRLVALDYRQIELRVLAHLSGDENLIRVFQEGKDIHTQTASWMFGLSAEAIDPLMRRAAKTINFGVLYGMSAFRLSQELGIPYEEAQAFIQKYFQSYPKVKAWIEKTLREGRTRGYVETLFGRRRYVPDLNARVKGKREAAERMAFNMPVQGTAADLMKLAMVRLFPQLREVGARMLLQVHDELLLEAPKERAEEVAALAKEVMEGVWPLAVPLEVEVGIGEDWLAAKG

SEQ ID NO: 4229 - DNA, 2523 bp, synthetic construct
  misc_feature 1..2523: note = Variant of DNA polymerase I from Thermus sp. strain 2.9
  source 1..2523: mol_type = other DNA
atgcaccatcatcatcatcatggcggtagcggcgtgttaccggtgttcgagcctaaaggtcgcgtgcttctggttgatggccatcatctcgcgtatcgtaacttctttgccctgaaaggattaaccaccagcctgggcgagccggtacagggtgtctacggctttgcaaagtcgctcctgaaagctctgaaagaagacggtgatgtggtgattgttgtctttgatgcgaaagcgccaagttttcgccacgaagcgtacgaagcttacaaagccgggcgtgctccaacgccggaagactttcctcgccaattggcgcttatgaaggaattagtggatttgcttggcctcgaacgcttggaagttcccggtttcgaggcagacgacgtattagcgactctcgcaaagaaagccgaacgtgagggctatgaagtccagatcttgacagcagatcgcgatcttttccagcttttatctccgcgcatctcggtgttacacccggaagggcatcgtatcaccccggaatggctctgggagaaatatggtttgcgtcccgaacaatgggtggattttcgcgccttagcaggcgatccgagcgacaatattccgggagttaaaggtatcggcgagaagacggcgctcaagctccttaaagaatgggggtcgttggagaacttgcttaagaatttagatcaggtcaaaccagagtcagtgcgtgagaagattcttgctcacctcgaagacctcaaattaagccgcgaattgtcccgtgtacgcaccgatttgccgctcgaagttgatttcggtcgccgccgcgaacctgactgggagggtcttaaagcgtttttagagcgtcttgaatttggttcgctcttgcatgaattcggccttttagaaagcccgttactggccgaagaagcaccttggccaccgcccgagggcgcgtttttaggttaccgtttgagtcgcccggaaccgatgtgggccgaattactggctcttgcagcgtctgcccagggacgtgtgtatcgcgcggaagaccctcatggtgcgctccgcggcctcttcgaagtccgtggactccttgccaaagacttagctgttgttgcattgcgcgaaggtcttgatttacctccgactgatgatccaatgcttcttgcgtacctcttggacccgtcaaacacgacgcccgaaggcgtagcccgtcgttacggcggcgagtggaccgaagatgcagcgaaacgcgcgttattggccgaacgtttgcacgccaatttattaggacgtttgcaaggcgaggaacgtctcctctggctttacgaagaagtggagaaaccattgagtcgcgtgctcgcgcatatggaagctaccggtgtcaaattagacgtggcgtatttggagaatctcagccttgaagttgctgcccacatgcgccgcttggaggaagaagtattccgtttagcaggccgttcctttcgccttaactctcgcgatcagttagaacgtgtgttgttcgatgaacttggtctccctcctatcggcaagacagagaagaccggtaaacgtagcacttcagcggcggttttagaagctcttcgcgaagtccatcccattgtggacaagatcttgcagtaccgcgaactcgcgaaattgaaaggcacctatattgaccgtcttccggcattagtccacccgaaaacgggacgcctccatacccgcttcaaccaaacagccacggcgaccggtcgtttgtcctcctctgatccaaaccttcagaatattccagtacgtaccccattgggccagaagatccgccgtgcgtttgtagctgaggagggttggcgtttagtggccctcgattatcgtcaaattgaattacgtgtccttgcccatctttctggcgatgagaacctcatccgcgtgtttcaggaaggcaaagacattcacactcaaacggcaagctggatgtttggattatcagctgaagcgatcgatcctttgatgcgtcgtgcagcgaagaccatcaatttcggtgttctctacggtatgagtgcctttcgtttgtcgcaggaattaggcattccctatgaaagtgctcaggcgttcattcagaaatactttcaaagctatcccaaagttaaagcatggatcgagaagactctccgtgaaggccgcacacgtggttacgtagagaccttatttggacgtcgccgctatgttcccgatttaaacgctcgcgtgaaaggcaagcgtgaagccgccgaacgcatggcgttcaacatgcctgtacagggcacggcagctgacctcatgaaacttgcaatggtgcgcctttttccacaattgcgtgaagttggtgcccgcatgctcttgcaggtccacgatgaactcttgttagaagcgccaaaagagcgtgcggaagaggtggcagccctcgcgaaagaagttatggaaggcgtgtggcccttagcggtgcctcttgaagtcgaagttggtattggcgaggattggctggctgccaaagga

SEQ ID NO: 4230 - protein, 841 aa, synthetic construct
  REGION 1..841: note = Variant of DNA polymerase I from Thermus sp. strain 2.9
MHHHHHHGGSGVLPVFEPKGRVLLVDGHHLAYRNFFALKGLTTSLGEPVQGVYGFAKSLLKALKEDGDVVIVVFDAKAPSFRHEAYEAYKAGRAPTPEDFPRQLALMKELVDLLGLERLEVPGFEADDVLATLAKKAEREGYEVQILTADRDLFQLLSPRISVLHPEGHRITPEWLWEKYGLRPEQWVDFRALAGDPSDNIPGVKGIGEKTALKLLKEWGSLENLLKNLDQVKPESVREKILAHLEDLKLSRELSRVRTDLPLEVDFGRRREPDWEGLKAFLERLEFGSLLHEFGLLESPLLAEEAPWPPPEGAFLGYRLSRPEPMWAELLALAASAQGRVYRAEDPHGALRGLFEVRGLLAKDLAVVALREGLDLPPTDDPMLLAYLLDPSNTTPEGVARRYGGEWTEDAAKRALLAERLHANLLGRLQGEERLLWLYEEVEKPLSRVLAHMEATGVKLDVAYLENLSLEVAAHMRRLEEEVFRLAGRSFRLNSRDQLERVLFDELGLPPIGKTEKTGKRSTSAAVLEALREVHPIVDKILQYRELAKLKGTYIDRLPALVHPKTGRLHTRFNQTATATGRLSSSDPNLQNIPVRTPLGQKIRRAFVAEEGWRLVALDYRQIELRVLAHLSGDENLIRVFQEGKDIHTQTASWMFGLSAEAIDPLMRRAAKTINFGVLYGMSAFRLSQELGIPYESAQAFIQKYFQSYPKVKAWIEKTLREGRTRGYVETLFGRRRYVPDLNARVKGKREAAERMAFNMPVQGTAADLMKLAMVRLFPQLREVGARMLLQVHDELLLEAPKERAEEVAALAKEVMEGVWPLAVPLEVEVGIGEDWLAAKG

SEQ ID NO: 4231 - DNA, 2523 bp, synthetic construct
  misc_feature 1..2523: note = Variant of DNA polymerase I from Thermus sp. strain 2.9
  source 1..2523: mol_type = other DNA
atgcaccatcatcatcatcatggcggtagcggcgtgttaccggtgttcgagcctaaaggtcgcgtgcttctggttgatggccatcatctcgcgtatcgtaacttctttgccctgaaaggattaaccaccagcctgggcgagccggtacagggtgtctacggctttgcaaagtcgctcctgaaagctctgaaagaagacggtgatgtggtgattgttgtctttgatgcgaaagcgccaagttttcgccacgaagcgtacgaagcttacaaagccgggcgtgctccaacgccggaagactttcctcgccaattgtttcttatgaaggaattagtggatttgcttggcctcgaacgcttggaagttcccggtttcgaggcagacgacgtattagcgactctcgcaaagaaagccgaagatgagggctatgaagtccagatcttgacagcagatcgcgatcttttccagcttttatctccgcgcatctcggtgttacacccggaagggcatcgtatcaccccggaatggctctgggagaaatatggtttgcgtcccgaacaatgggtggattttcgcgccttagcaggcgatccgagcgacaatattccgggagttaaaggtatcggcgagaagacggcgctcaagctccttaaagaatgggggtcgttggagaacttgcttaagaatttagatcaggtcaaaccagagtcagtgcgtgagaagattcttgctcacctcgaagacctcaagttaagccgcgaattgtcccgtgtacgcaccgatttgccgctcgaagttgatttcggtcgccgccgcgaacctgactgggagggtcttaaagcgtttttagagcgtcttgaatttggttcgctccagcatgaattcggccttttagaaagcccgttagtggccgaagaagcaccttggccaccgcccgagggcgcgtttttaggttaccgtttgagtcgcccggaaccgatgtgggccgaattactggctcttgcagcgtctgcccagggacgtgtgtatcgcgcggaagaccctcatggtgcgctccgcggcctcttcgaagtccgtggactccttgccaaagacttagctgttgttgcattgcgcgaaggtcttgatttacctccgactgatgatccaatgcttcttgcgtacctcttggacccgtcaaacacgacgcccgaaggcgtagcccgtcgttacggcggcgagtggaccgaagatgcagcgaaacgcgcgttattggccgaacgtttgcacgagaatttattaggacgtttgcaaggcgaggaacgtctcctctggctttacgaagaagtggagaaaccattgagtcgcgtgctcgcgcatatggaagctaccggtgtcaaattagacgtggcgtatttggagaatctcagccttgaagttgctgcccacatgcgccgcttggaggaagaagtagtccgtttagcaggccgttcctttcgccttaactctcgcgatcagttagaacgtgtgttgttcgatgaacttggtctccctcctatcggcaagacagagaagaccggtaaacgtagcacttcagcggcggttttagaggctcttcgcgaagtccatcccattgtggacaagatcttgcagtaccgcgaaatggcgaaattgaaaggcacctatattgaccgtcttccggcattagtccacccgaaaacgggacgcctccatacccgcttcaaccaaacagccacggcgaccggtcgtttgtcctcctctgatccaaaccttcagaatattccagtacgtaccccattgggccagaagatccgccgtgcgtttgtagctgaggagggttggcgtttagtggccctcgattatcgtcaaattgaattacgtgtccttgcccatctttctggcgatgagaacctcatccgcgtgtttcaagaaggcaaagacattcacactcaaacggcaagctggatgtttggattatcagctgaagcgatcgatcctttgatgcgtcgtgcagcgaagaccatcaatttcggtgttctctacggtatgagtgcctttcgtttgtcgcaggaattaggcattccctatgaagaagctcaggcgttcattcagaaatactttcaaagctatcccaaagttaaagcatggatcgagaagactctccgtgaaggccgccaccgtggttacgtagagaccttatttggacgtcgccgctatgttcccgatttaaacgctcgcgtgaaaggcaagcgtgaagccgccgaacgcatggcgttcaacatgcctgtacagggcacggcagctgacctcatgaaacttgcaatggtgcgcctttttccacaattgcgtgaagttggtgcccgcatgctcttgcaggtccacgatgaactcttgttagaagcgccaaaagagcgtgcggaagaggtggcagccctcgcgaaagaagttatggaaggcgtgtggcccttagcggtgcctcttgaagtcgaagttggtattggcgaggattggctggctgccaaagga

SEQ ID NO: 4232 - protein, 841 aa, synthetic construct
  REGION 1..841: note = Variant of DNA polymerase I from Thermus sp. strain 2.9
MHHHHHHGGSGVLPVFEPKGRVLLVDGHHLAYRNFFALKGLTTSLGEPVQGVYGFAKSLLKALKEDGDVVIVVFDAKAPSFRHEAYEAYKAGRAPTPEDFPRQLFLMKELVDLLGLERLEVPGFEADDVLATLAKKAEDEGYEVQILTADRDLFQLLSPRISVLHPEGHRITPEWLWEKYGLRPEQWVDFRALAGDPSDNIPGVKGIGEKTALKLLKEWGSLENLLKNLDQVKPESVREKILAHLEDLKLSRELSRVRTDLPLEVDFGRRREPDWEGLKAFLERLEFGSLQHEFGLLESPLVAEEAPWPPPEGAFLGYRLSRPEPMWAELLALAASAQGRVYRAEDPHGALRGLFEVRGLLAKDLAVVALREGLDLPPTDDPMLLAYLLDPSNTTPEGVARRYGGEWTEDAAKRALLAERLHENLLGRLQGEERLLWLYEEVEKPLSRVLAHMEATGVKLDVAYLENLSLEVAAHMRRLEEEVVRLAGRSFRLNSRDQLERVLFDELGLPPIGKTEKTGKRSTSAAVLEALREVHPIVDKILQYREMAKLKGTYIDRLPALVHPKTGRLHTRFNQTATATGRLSSSDPNLQNIPVRTPLGQKIRRAFVAEEGWRLVALDYRQIELRVLAHLSGDENLIRVFQEGKDIHTQTASWMFGLSAEAIDPLMRRAAKTINFGVLYGMSAFRLSQELGIPYEEAQAFIQKYFQSYPKVKAWIEKTLREGRHRGYVETLFGRRRYVPDLNARVKGKREAAERMAFNMPVQGTAADLMKLAMVRLFPQLREVGARMLLQVHDELLLEAPKERAEEVAALAKEVMEGVWPLAVPLEVEVGIGEDWLAAKG

SEQ ID NO: 4233 - DNA, 2523 bp, synthetic construct
  misc_feature 1..2523: note = Variant of DNA polymerase I from Thermus sp. strain 2.9
  source 1..2523: mol_type = other DNA
atgcaccatcatcatcatcatggcggtagcggcgtgttaccggtgttcgagcctaaaggtcgcgtgcttctggttgatggccatcatctcgcgtatcgtaacttctttgccctgaaaggattaaccaccagcctgggcgagccggtacagggtgtctacggctttgcaaagtcgctcctgaaagctctgaaagaagacggtgatgtggtgattgttgtctttgatgcgaaagcgccaagttttcgccacgaagcgtacgaagcttacaaagccgggcgtgctccaacgccggaagactttcctcgccaattgtttcttatgaaggaattagtggatttgcttggcctcgaacgcttggaagttcccggtttcgaggcagacgacgtattagcgactctcgcaaagaaagccgaacgtgagggctatgaagtccagatcttgacagcagatcgcgatcttttccagcttttatctccgcgcatctcggtgttacacccggaagggcatcgtatcaccccggaatggctctgggagaaatatggtttgcgtcccgaacaatgggtggattttcgcgccttagcaggcgatccgagcgacaatattccgggagttaaaggtatcggcgagaagacggcgctcaagctccttaaagaatgggggtcgttggagaacttgcttaagaatttagatcaggtcaaaccagagtcagtgcgtgagaagattcttgctcacctcgaagacctcaagttaagccgcgaattgtcccgtgtacgcaccgatttgccgctcgaagttgatttcggtcgccgccgcgaacctgactgggagggtcttaaagcgtttttagagcgtcttgaatttggttcgctcctgcatgaattcggccttttagaaagcccgttactggccgaagaagcaccttggccaccgcccgagggcgcgtttttaggttaccgtttgacccgcccggaaccgatgtgggccgaattactggctcttgcagcgtctgcccagggacgtgtgtatcgcgcggaagaccctcatggtgcgctccgcggcctcttcgaagtccgtggactccttgccaaagacttagctgttgttgcattgcgcgaaggtcttgatttacctccgactgatgatccaatgcttcttgcgtacctcttggacccgtcaaacacgacgcccgaaggcgtagcccgtcgttacggcggcgagtggaccgaagatgcagcgaaacgcgcgttattggccgaacgtttgcacgcgaatttactgggacgtttgcaaggcgaggaacgtctcctctggctttacgaagaagtggagaaaccattgagtcgcgtgctcgcgcatatggaagctaccggtgtcaaattagacgtggcgtatttggagaatctcagccttgaagttgctgcccacatgcgccgcttggaggaagaagtattccgtttagcaggccgttcctttcgccttaactctcgcgatcagttagaaaaagtgttgttcgatgaacttggtctccctcctatcggcaagacagagaagaccggtaaacgtagcacttcagcggcggttttagaagctcttcgcgaagtccatcccattgtggacaagatcttgcagtaccgcgaactcgcgaaattgaaaggcacctatattgaccgtcttccggcattagtccacccgaaaacgggacgcctccatacccgcttcaaccaaacagccacggcgaccggtcgtttgtcctcctctgatccaaaccttcagaatattccagtacgtacccctttgggccagaagatccgccgtgcgtttgtagctgaggagggttggcgtttagtggccctcgattatcgtcaaattgaattacgtgtccttgcccatctttctggcgatgagaacctcatccgcgtgtttcaagaaggcaaagacattcacactcaaacggcaagctggatgtttggattatcagctgaagcgatcgatcctttgatgcgtcgtgcagcgaagacgatcaatttcggtgttctctacggtatgagtgcctttcgtttgtcgcaggaattaggcattccctatgaagaagctcaggcgttcattcagaaatactttcaaagctatcccaaagttaaagcatggatcgagaagactctccgtgaaggccgcacacgtggttacgtagagaccttatttggacgtcgccgctatgttcccgatttaaacgctcgcgtgaaaggcaagcgtgaagccgccgaacgcatggcgttcaacatgcctgtacagggcacggcagctgacctcatgaaacttgcaatggtgcgcctttttccacaattgcgtgaagttggtgcccgcatgctcttgcaggtccacgatgaactcttgttagaagcgccaaaagagcgtgcggaagaggtggcagccctcgcgaaagaagttatggaaggcgtgtggcccttagcggtgcctcttgaagtcgaagttggtattggcgaggattggctggctgccaaagga

SEQ ID NO: 4234 - protein, 841 aa, synthetic construct
  REGION 1..841: note = Variant of DNA polymerase I from Thermus sp. strain 2.9
MHHHHHHGGSGVLPVFEPKGRVLLVDGHHLAYRNFFALKGLTTSLGEPVQGVYGFAKSLLKALKEDGDVVIVVFDAKAPSFRHEAYEAYKAGRAPTPEDFPRQLFLMKELVDLLGLERLEVPGFEADDVLATLAKKAEREGYEVQILTADRDLFQLLSPRISVLHPEGHRITPEWLWEKYGLRPEQWVDFRALAGDPSDNIPGVKGIGEKTALKLLKEWGSLENLLKNLDQVKPESVREKILAHLEDLKLSRELSRVRTDLPLEVDFGRRREPDWEGLKAFLERLEFGSLLHEFGLLESPLLAEEAPWPPPEGAFLGYRLTRPEPMWAELLALAASAQGRVYRAEDPHGALRGLFEVRGLLAKDLAVVALREGLDLPPTDDPMLLAYLLDPSNTTPEGVARRYGGEWTEDAAKRALLAERLHANLLGRLQGEERLLWLYEEVEKPLSRVLAHMEATGVKLDVAYLENLSLEVAAHMRRLEEEVFRLAGRSFRLNSRDQLEKVLFDELGLPPIGKTEKTGKRSTSAAVLEALREVHPIVDKILQYRELAKLKGTYIDRLPALVHPKTGRLHTRFNQTATATGRLSSSDPNLQNIPVRTPLGQKIRRAFVAEEGWRLVALDYRQIELRVLAHLSGDENLIRVFQEGKDIHTQTASWMFGLSAEAIDPLMRRAAKTINFGVLYGMSAFRLSQELGIPYEEAQAFIQKYFQSYPKVKAWIEKTLREGRTRGYVETLFGRRRYVPDLNARVKGKREAAERMAFNMPVQGTAADLMKLAMVRLFPQLREVGARMLLQVHDELLLEAPKERAEEVAALAKEVMEGVWPLAVPLEVEVGIGEDWLAAKG

SEQ ID NO: 4235 - DNA, 2523 bp, synthetic construct
  misc_feature 1..2523: note = Variant of DNA polymerase I from Thermus sp. strain 2.9
  source 1..2523: mol_type = other DNA
atgcaccatcatcatcatcatggcggtagcggcgtgttaccggtgttcgagcctaaaggtcgcgtgcttctggttgatggccatcatctcgcgtatcgtaacttctttgccctgaaaggattaaccaccagcctgggcgagccggtacagggtgtctacggctttgcaaagtcgctcctgaaagctctgaaagaagacggtgatgtggtgattgttgtctttgatgcgaaagcgccaagttttcgccacgaagcgtacgaagcttacaaagccgggcgtgctccaacgccggaagactttcctcgccaattggcgcttatgaaggaattagtggatttgcttggcctcgaacgcttggaagttcccggtttcgaggcagacgacgtattagcgactctcgcaaagaaagccgaacgtgagggctatgaagtccagatcttgacagcagatcgcgatcttttccagcttttatctccgcgcatctcggtgttacacccggaagggcatcgtatcaccccggaatggctctgggagaaatatggtttgcgtcccgaacaatgggtggattttcgcgccttagcaggcgatccgagcgacagtattccgggagttaaaggtatcggcgagaagacggcgctcaagctccttaaagaatgggggtcgttggagaacttgcttaagaatttagatcaggtcaaaccagagtcagtgcgtgagaagattcttgctcacctcgaagacctcaaattaagccgcgaattgtcccgtgtacgcaccgatttgccgctcgaagttgatttcggtcgccgccgcgaacctgactgggagggtcttaaagcgtttttagagcgtcttgaatttggttcgctcttgcatgaattcggccttttagaaagcccgttactggccgaagaagcaccttggccaccgcccgagggcgcgtttttaggttaccgtttgagtcgcccggaaccgatgtgggccgaattactggctcttgcagcgtctgcccagggacgtgtgtatcgcgcggaagaccctcatggtgcgctccgcggcctcttcgaagtccgtggactccttgccaaagacttagctgttgttgcattgcgcgaaggtcttgatttacctccgactgatgatccaatgcttcttgcgtacctcttggacccgtcaaacacgacgcccgaaggcgtagcccgtcgttacggcggcgagtggaccgaagatgcagcgaaacgcgcgttattggccgaacgtttgcacgccaatttattaggacgtttgcaaggcgaggaacgtctcctctggctttacgaagaagtggagaaaccattgagtcgcgtgctcgcgcatatggaagctaccggtgtcaaattagacgtggcgtatttggagaatctcagccttgaagttgctgcccacatgcgccgcttggaggaagaagtattccgtttagcaggccgttcctttcgccttaactctcgcgatcagttagaacgtgtgttgttcgatgaacttggtctccctcctatcggcaagacagagaagaccggtaaacgtagcacttcagcggcggttttagaagctcttcgcgaagtccatcccattgtggacaagatcttgcagtaccgcgaactcgcgaaattgaaaggcacctatattgaccgtcttccggcattagtccacccgaaaacgggacgcctccatacccgcttcaaccaaacagggacggcgaccggtcgtttgtcctcctctgatccaaaccttcagaatattccagtacgtaccccattgggccagaagatccgccgtgcgtttgtagctgaggagggttggcgtttagtggccctcgattatcgtcaaattgaattacgtgtccttgcccatctttctggcgatgagaacctcatccgcgtgtttcaggaaggcaaagacattcacactcaaacggcaagctggatgtttggattatcagctgaagcgatcgatcctttgatgcgtcgtgcagcgaagaccatcaatttcggtgttctctacggtatgagtgcctttcgtttgtcgcaggaattaggcattccctatgaagaagctcaggcgttcattcagaaatactttcaaagctatcccaaagttaaagcatggatcgagaagactctccgtgaaggccgcacacgtggttacgtagagaccttatttggacgtcgccgctatgttcccgatttaaacgctcgcgtgaaaggcaagcgtgaagccgccgaacgcatggcgttcaacatgcctgtacagggcacggcagctgacctcatgaaacttgcaatggtgcgcctttttccacaattgcgtgaagttggtgcccgcatgctcttgcaggtccacgatgaactcttgttagaagcgccaaaagagcgtgcggaagaggtggcagccctcgcgaaagaagttatggaaggcgtgtggcccttagcggtgcctcttgaagtcgaagttggtattggcgaggattggctggctgccaaagga

SEQ ID NO: 4236 - protein, 841 aa, synthetic construct
  REGION 1..841: note = Variant of DNA polymerase I from Thermus sp. strain 2.9
MHHHHHHGGSGVLPVFEPKGRVLLVDGHHLAYRNFFALKGLTTSLGEPVQGVYGFAKSLLKALKEDGDVVIVVFDAKAPSFRHEAYEAYKAGRAPTPEDFPRQLALMKELVDLLGLERLEVPGFEADDVLATLAKKAEREGYEVQILTADRDLFQLLSPRISVLHPEGHRITPEWLWEKYGLRPEQWVDFRALAGDPSDSIPGVKGIGEKTALKLLKEWGSLENLLKNLDQVKPESVREKILAHLEDLKLSRELSRVRTDLPLEVDFGRRREPDWEGLKAFLERLEFGSLLHEFGLLESPLLAEEAPWPPPEGAFLGYRLSRPEPMWAELLALAASAQGRVYRAEDPHGALRGLFEVRGLLAKDLAVVALREGLDLPPTDDPMLLAYLLDPSNTTPEGVARRYGGEWTEDAAKRALLAERLHANLLGRLQGEERLLWLYEEVEKPLSRVLAHMEATGVKLDVAYLENLSLEVAAHMRRLEEEVFRLAGRSFRLNSRDQLERVLFDELGLPPIGKTEKTGKRSTSAAVLEALREVHPIVDKILQYRELAKLKGTYIDRLPALVHPKTGRLHTRFNQTGTATGRLSSSDPNLQNIPVRTPLGQKIRRAFVAEEGWRLVALDYRQIELRVLAHLSGDENLIRVFQEGKDIHTQTASWMFGLSAEAIDPLMRRAAKTINFGVLYGMSAFRLSQELGIPYEEAQAFIQKYFQSYPKVKAWIEKTLREGRTRGYVETLFGRRRYVPDLNARVKGKREAAERMAFNMPVQGTAADLMKLAMVRLFPQLREVGARMLLQVHDELLLEAPKERAEEVAALAKEVMEGVWPLAVPLEVEVGIGEDWLAAKG

SEQ ID NO: 4237 - DNA, 2523 bp, synthetic construct
  misc_feature 1..2523: note = Variant of DNA polymerase I from Thermus sp. strain 2.9
  source 1..2523: mol_type = other DNA
atgcaccatcatcatcatcatggcggtagcggcgtgttaccggtgttcgagcctaaaggtcgcgtgcttctggttgatggccatcatctcgcgtatcgtaacttctttgccctgaaaggattaaccaccagcctgggcgagccggtacagggtgtctacggctttgcaaagtcgctcctgaaagctctgaaagaagacggtgatgtggtgattgttgtctttgatgcgaaagcgccaagttttcgccacgaagcgtacgaagcttacaaagccgggcgtgctccaacgccggaagactttcctcgccaattggcgcttatgaaggaattagtggatttgcttggcctcgaacgcttggaagttcccggtttcgaggcagacgacgtattagcgactctcgcaaagaaagccgaacgtgagggctatgaagtccagatcttgacagcagatcgcgatcttttccagcttttatctccgcgcatctcggtgttacacccggaagggcatcgtatcaccccggaatggctctgggagaaatatggtttgcgtcccgaacaatgggtggattttcgcgccttagcaggcgatccgagcgacaatattccgggagttaaaggtatcggcgagaagacggcgctcaagctccttaaagaatgggggtcgttggagaacttgcttaagaatttagatcaggtcaaaccagagtcagtgcgtgagaagattcttgctcacctcgaagacctcaaattaagccgcgaattgtcccgtgtacgcaccgatttgccgctcgaagttgatttcggtcgccgccgcgaacctgactgggagggtcttaaagcgtttttagagcgtcttgaatttggttcgctcttgcatgaattcggccttttagaaagcccgttactggccgaagaagcaccttggccaccgcccgagggcgcgtttttaggttaccgtttgagtcgcccggaaccgatgtgggccgaattactggctcttgcagcgtctgcccagggacgtgtgtatcgcgcggaagaccctcatggtgcgctccgcggcctcttcgaagtccgtggactccttgccaaagacttagctgttgttgcattgcgcgaaggtcttgatttacctccgactgatgatccaatgcttcttgcgtacctcttggacccgtcaaacacgacgcccgaaggcgtagcccgtcgttacggcggcgagtggaccgaagatgcagcgaaacgcgcgttattggccgaacgtttgcacgccaatttattaggacgtttgcaaggcgaggaacgtctcctctggctttacgaagaagtggagaaaccattgagtcgcgtgctcgcgcatatggaagctaccggtgtcaaattagacgtggcgtatttggagaatctcagccttgaagttgctgcccacatgcgccgcttggaggaagaagtattccgtttagcaggccgttcctttcgccttaactctcgcgatcagttagaactggtgttgttcgatgaacttggtctccctcctatcggcaagacagagaagaccggtaaacgtagcacttcagcggcggttttagaagctcttcgcgaagtccatcccattgtggacaagatcttgcagtaccgcgaactcgcgaaattgaaaggcacctatattgaccgtcttccggcattagtccacccgaaaacgggacgcctccatacccgcttcaaccaaacagccacggcgaccggtcgtttgtcctcctctgatccaaaccttcagaatattccagtacgtaccccattgggccagaagatccgccgtgcgtttgtagctgaggagggttggcgtttagtggccctcgattatcgtcaaattgaattacgtgtccttgcccatctttctggcgatgagaacctcatccgcgtgtttcaggaaggcaaagacattcacactcaaacggcaagctggatgtttggattatcagctgaagcgatcgatcctttgatgcgtcgtgcagcgaagaccatcaatttcggtgttctctacggtatgagtgcctttcgtttgtcgcaggaattaggcattccctatgaagaagctcaggcgttcattcagaaatactttcaaagctatcccaaagttaaagcatggatcgagaagactctccgtgaaggccgcacacgtggttacgtagagaccttatttggacgtcgccgctatgttcccgatttaaacgctcgcgtgaaaggcaagcgtgaagccgccgaacgcatggcgttcaacatgcctgtacagggcacggcagctgacctcatgaaacttgcaatggtgcgcctttttccacaattgcgtgaagttggtgcccgcatgctcttgcaggtccacgatgaactcttgttagaagcgccaaaagagcgtgcggaagaggtggcagccctcgcgaaagaagttatggaaggcgtgtggcccttagcggtgcctcttgaagtcgaagttggtattggcgaggattggctggctgccaaagga

SEQ ID NO: 4238 - protein, 841 aa, synthetic construct
  REGION 1..841: note = Variant of DNA polymerase I from Thermus sp. strain 2.9
MHHHHHHGGSGVLPVFEPKGRVLLVDGHHLAYRNFFALKGLTTSLGEPVQGVYGFAKSLLKALKEDGDVVIVVFDAKAPSFRHEAYEAYKAGRAPTPEDFPRQLALMKELVDLLGLERLEVPGFEADDVLATLAKKAEREGYEVQILTADRDLFQLLSPRISVLHPEGHRITPEWLWEKYGLRPEQWVDFRALAGDPSDNIPGVKGIGEKTALKLLKEWGSLENLLKNLDQVKPESVREKILAHLEDLKLSRELSRVRTDLPLEVDFGRRREPDWEGLKAFLERLEFGSLLHEFGLLESPLLAEEAPWPPPEGAFLGYRLSRPEPMWAELLALAASAQGRVYRAEDPHGALRGLFEVRGLLAKDLAVVALREGLDLPPTDDPMLLAYLLDPSNTTPEGVARRYGGEWTEDAAKRALLAERLHANLLGRLQGEERLLWLYEEVEKPLSRVLAHMEATGVKLDVAYLENLSLEVAAHMRRLEEEVFRLAGRSFRLNSRDQLELVLFDELGLPPIGKTEKTGKRSTSAAVLEALREVHPIVDKILQYRELAKLKGTYIDRLPALVHPKTGRLHTRFNQTATATGRLSSSDPNLQNIPVRTPLGQKIRRAFVAEEGWRLVALDYRQIELRVLAHLSGDENLIRVFQEGKDIHTQTASWMFGLSAEAIDPLMRRAAKTINFGVLYGMSAFRLSQELGIPYEEAQAFIQKYFQSYPKVKAWIEKTLREGRTRGYVETLFGRRRYVPDLNARVKGKREAAERMAFNMPVQGTAADLMKLAMVRLFPQLREVGARMLLQVHDELLLEAPKERAEEVAALAKEVMEGVWPLAVPLEVEVGIGEDWLAAKG

SEQ ID NO: 4239 - DNA, 2523 bp, synthetic construct
  misc_feature 1..2523: note = Variant of DNA polymerase I from Thermus sp. strain 2.9
  source 1..2523: mol_type = other DNA
atgcaccatcatcatcatcatggcggtagcggcgtgttaccggtgttcgagcctaaaggtcgcgtgcttctggttgatggccatcatctcgcgtatcgtaacttctttgccctgaaaggattaaccaccagcctgggcgagccggtacagggtgtctacggctttgcaaagtcgctcctgaaagctctgaaagaagacggtgatgtggtgattgttgtctttgatgcgaaagcgccaagttttcgccacgaagcgtacgaagcttacaaagccgggcgtgctccaacgccggaagactttcctcgccaattggcgcttatgaaggaattagtggatttgcttggcctcgaacgcttggaagttcccggtttcgaggcagacgacgtattagcgactctcgcaaagaaagccgaacgtgagggctatgaagtccagatcttgacagcagatcgcgatcttttccagcttttatctccgcgcatctcggtgttacacccggaagggcatcgtatcaccccggaatggctctgggagaaatatggtttgcgtcccgaacaatgggtggattttcgcgccttagcaggcgatccgagcgacaatattccgggagttaaaggtatcggcgagaagacggcgctcaagctccttaaagaatgggggtcgttggagaacttgcttaagaatttagatcaggtcaaaccagagtcagtgcgtgagaagattcttgctcacctcgaagacctcaaattaagccgcgaattgtcccgtgtacgcaccgatttgccgctcgaagttgatttcggtcgccgccgcgaacctgactgggagggtcttaaagcgtttttagagcgtcttgaatttggttcgctcttgcatgaattcggccttttagaaagcccgttactggccgaagaagcaccttggccaccgcccgagggcgcgtttttaggttaccgtttgagtcgcccggaaccgatgtgggccgaattactggctcttgcagcgtctgcccagggacgtgtgtatcgcgcggaagaccctcatggtgcgctccgcggcctcttcgaagtccgtggactccttgccaaagacttagctgttgttgcattgcgcgaaggtcttgatttacctccgactgatgatccaatgcttcttgcgtacctcttggacccgtcaaacacgacgcccgaaggcgtagcccgtcgttacggcggcgagtggaccgaagatgcagcgaaacgcgcgttattggccgaacgtttgcacgccaatttattaggacgtttgcaaggcgaggaacgtctcctctggctttacgaagaagtggagaaaccattgagtcgcgtgctcgcgcatatggaagctaccggtgtcaaattagacgtggcgtatttggagaatctcagccttgaagttgctgcccacagtcgccgcttggaggaagaagtattccgtttagcaggccgttcctttcgccttaactctcgcgatcagttagaacgtgtgttgttcgatgaacttggtctccctcctatcggcaagacagagaagaccggtaaacgtagcacttcagcggcggttttagaagctcttcgcgaagtccatcccattgtggacaagatcttgcagtaccgcgaactcgcgaaattgaaaggcacctatattgaccgtcttccggcattagtccacccgaaaacgggacgcctccatacccgcttcaaccaaacagccacggcgaccggtcgtttgtcctcctctgatccaaaccttcagaatattccagtacgtaccccattgggccagaagatccgccgtgcgtttgtagctgaggagggttggcgtttagtggccctcgattatcgtcaaattgaattacgtgtccttgcccatctttctggcgatgagaacctcatccgcgtgtttcaggaaggcaaagacattcacactcaaacggcaagctggatgtttggattatcagctgaagcgatcgatcctttgatgcgtcgtgcagcgaagaccatcaatttcggtgttctctacggtatgagtgcctttcgtttgtcgcaggaattaggcattccctatgaagaagctcaggcgttcattcagaaatactttcaaagctatcccaaagttaaagcatggatcgagaagactctccgtgaaggccgcacacgtggttacgtagagaccttatttggacgtcgccgctatgttcccgatttaaacgctcgcgtgaaaggcaagcgtgaagccgccgaacgcatggcgttcaacatgcctgtacagggcacggcagctgacctcatgaaacttgcaatggtgcgcctttttccacaattgcgtgaagttggtgcccgcatgctcttgcaggtccacgatgaactcttgttagaagcgccaaaagagcgtgcggaagaggtggcagccctcgcgaaagaagttatggaaggcgtgtggcccttagcggtgcctcttgaagtcgaagttggtattggcgaggattggctggctgccaaagga

SEQ ID NO: 4240 - protein, 841 aa, synthetic construct
  REGION 1..841: note = Variant of DNA polymerase I from Thermus sp. strain 2.9
MHHHHHHGGSGVLPVFEPKGRVLLVDGHHLAYRNFFALKGLTTSLGEPVQGVYGFAKSLLKALKEDGDVVIVVFDAKAPSFRHEAYEAYKAGRAPTPEDFPRQLALMKELVDLLGLERLEVPGFEADDVLATLAKKAEREGYEVQILTADRDLFQLLSPRISVLHPEGHRITPEWLWEKYGLRPEQWVDFRALAGDPSDNIPGVKGIGEKTALKLLKEWGSLENLLKNLDQVKPESVREKILAHLEDLKLSRELSRVRTDLPLEVDFGRRREPDWEGLKAFLERLEFGSLLHEFGLLESPLLAEEAPWPPPEGAFLGYRLSRPEPMWAELLALAASAQGRVYRAEDPHGALRGLFEVRGLLAKDLAVVALREGLDLPPTDDPMLLAYLLDPSNTTPEGVARRYGGEWTEDAAKRALLAERLHANLLGRLQGEERLLWLYEEVEKPLSRVLAHMEATGVKLDVAYLENLSLEVAAHSRRLEEEVFRLAGRSFRLNSRDQLERVLFDELGLPPIGKTEKTGKRSTSAAVLEALREVHPIVDKILQYRELAKLKGTYIDRLPALVHPKTGRLHTRFNQTATATGRLSSSDPNLQNIPVRTPLGQKIRRAFVAEEGWRLVALDYRQIELRVLAHLSGDENLIRVFQEGKDIHTQTASWMFGLSAEAIDPLMRRAAKTINFGVLYGMSAFRLSQELGIPYEEAQAFIQKYFQSYPKVKAWIEKTLREGRTRGYVETLFGRRRYVPDLNARVKGKREAAERMAFNMPVQGTAADLMKLAMVRLFPQLREVGARMLLQVHDELLLEAPKERAEEVAALAKEVMEGVWPLAVPLEVEVGIGEDWLAAKG

SEQ ID NO: 4241 - DNA, 2520 bp, synthetic construct
  misc_feature 1..2520: note = Variant of DNA polymerase I from Thermus sp. strain 2.9
  source 1..2520: mol_type = other DNA
atgcaccatcatcatcatcatggcggtagcggcgtgttaccggtgttcgagcctaaaggtcgcgtgcttctggttgatggccatcatctcgcgtatcgtaacttctttgccctgaaaggattaaccaccagcctgggcgagccggtacagggtgtctacggctttgcaaagtcgctcctgaaagctctgaaagaagacggtgatgtggtgattgttgtctttgatgcgaaagcgccaagttttcgccacgaagcgtacgaagcttacaaagccgggcgtgctccaacgccggaagactttcctcgccaattggcgcttatgaaggaattagtggatttgcttggcctcgaacgcttggaagttcccggtttcgaggcagacgacgtattagcgactctcgcaaagaaagccgaacgtgagggctatgaagtccagatcttgacagcagatcgcgatcttttccagcttttatctccgcgcatctcggtgttacacccggaagggcatcgtatcaccccggaatggctctgggagaaatatggtttgcgtcccgaacaatgggtggattttcgcgccttagcaggcgatccgagcgacaatattccgggagttaaaggtatcggcgagaagacggcgctcaagctccttaaagaatgggggtcgttggagaacttgcttaagaatttagatcaggtcaaaccagagtcagtgcgtgagaagattcttgctcacctcgaagacctcaaattaagccgcgaattgtcccgtgtacgcaccgatttgccgctcgaagttgatttcggtcgccgccgcgaacctgactgggagggtcttaaagcgtttttagagcgtcttgaatttggttcgctcttgcatgaattcggccttttagaaagcccgttactggccgaagaagcaccttggccaccgcccgagggcgcgtttttaggttaccgtttgagtcgcccggaaccgatgtgggccgaattactggctcttgcagcgtctgcccagggacgtgtgtatcgcgcggaagaccctcatggtgcgctccgcggcctcttcgaagtccgtggactccttgccaaagacttagctgttgttgcattgcgcgaaggtcttgatttacctccgactgatgatccaatgcttcttgcgtacctcttggacccgtcaaacacgacgcccgaaggcgtagcccgtcgttacggcggcgagtggaccgaagatgcagcgaaacgcgcgttattggccgaacgtttgcacgccaatttattaggacgtttgcaaggcgaggaacgtctcctctggctttacgaagaagtggagaaaccattgagtcgcgtgctcgcgcatatggaagctaccggtgtcaaattagacgtggcgtatttggagaatctcagccttgaagttgctgcccacatgcgccgcttggaggaagaagtattccgtttagcaggccgttcctttcgccttaactctcgcgatcagttagaacgtgtgttgttcgatgaacttggtctccctcctatcggcaagacagagaagaccggtaaacgtagcacttcagcggcggttttagaagctcttcgcgaagtccatcccattgtggacaagatcttgcagtaccgcgaactcgcgaaattgaaaggcacctatattgaccgtcttccggcattagtccacccgaaaacgggacgcctccatacccgcttcaaccaaacagccacggcgaccggtcgtttgtcctcctctgatccaaaccttcagaatattccagtacgtaccccattgggccagaagatccgccgtgcgtttgtagctgaggagggttggcgtttagtggccctcgattatcgtcaaattgaattacgtgtccttgcccatctttctggcgatgagaacctcatccgcgtgtttcaggaaggcaaagacattcacactcaaacggcaagctggatgtttggattatcagctgaagcgatcgatcctttgatgcgtcgtgcagcgaagaccatcaatttcggtgttctctacggtatgagtgcctttcgtttgtcgcaggaattaggcattccctatgaagaagctcaggcgttcattcagaaatactttcaaagctatcccaaagttaaagcatggatcgagaagactctccgtgaaggccgcacacgtggttacgtagagaccttatttggacgtcgccgctatgttcccgatttaaacgctcgcaaaggcaagcgtgaagccgccgaacgcatggcgttcaacatgcctgtacagggcacggcagctgacctcatgaaacttgcaatggtgcgcctttttccacaattgcgtgaagttggtgcccgcatgctcttgcaggtccacgatgaactcttgttagaagcgccaaaagagcgtgcggaagaggtggcagccctcgcgaaagaagttatggaaggcgtgtggcccttagcggtgcctcttgaagtcgaagttggtattggcgaggattggctggctgccaaagga

SEQ ID NO: 4242 - protein, 840 aa, synthetic construct
  REGION 1..840: note = Variant of DNA polymerase I from Thermus sp. strain 2.9
MHHHHHHGGSGVLPVFEPKGRVLLVDGHHLAYRNFFALKGLTTSLGEPVQGVYGFAKSLLKALKEDGDVVIVVFDAKAPSFRHEAYEAYKAGRAPTPEDFPRQLALMKELVDLLGLERLEVPGFEADDVLATLAKKAEREGYEVQILTADRDLFQLLSPRISVLHPEGHRITPEWLWEKYGLRPEQWVDFRALAGDPSDNIPGVKGIGEKTALKLLKEWGSLENLLKNLDQVKPESVREKILAHLEDLKLSRELSRVRTDLPLEVDFGRRREPDWEGLKAFLERLEFGSLLHEFGLLESPLLAEEAPWPPPEGAFLGYRLSRPEPMWAELLALAASAQGRVYRAEDPHGALRGLFEVRGLLAKDLAVVALREGLDLPPTDDPMLLAYLLDPSNTTPEGVARRYGGEWTEDAAKRALLAERLHANLLGRLQGEERLLWLYEEVEKPLSRVLAHMEATGVKLDVAYLENLSLEVAAHMRRLEEEVFRLAGRSFRLNSRDQLERVLFDELGLPPIGKTEKTGKRSTSAAVLEALREVHPIVDKILQYRELAKLKGTYIDRLPALVHPKTGRLHTRFNQTATATGRLSSSDPNLQNIPVRTPLGQKIRRAFVAEEGWRLVALDYRQIELRVLAHLSGDENLIRVFQEGKDIHTQTASWMFGLSAEAIDPLMRRAAKTINFGVLYGMSAFRLSQELGIPYEEAQAFIQKYFQSYPKVKAWIEKTLREGRTRGYVETLFGRRRYVPDLNARKGKREAAERMAFNMPVQGTAADLMKLAMVRLFPQLREVGARMLLQVHDELLLEAPKERAEEVAALAKEVMEGVWPLAVPLEVEVGIGEDWLAAKG

SEQ ID NO: 4243 - DNA, 2523 bp, synthetic construct
  misc_feature 1..2523: note = Variant of DNA polymerase I from Thermus sp. strain 2.9
  source 1..2523: mol_type = other DNA
atgcaccatcatcatcatcatggcggtagcggcgtgttaccggtgttcgagcataaaggtcgcgtgcttctggttgatggccatcatctcgcgtatcgtaacttctttgccctgaaaggattaaccaccagcctgggcgagccggtacagggtgtctacggctttgcaaagtcgctcctgaaagctctgaaagaagacggtgatgtggtgattgttgtctttgatgcgaaagcgccaagttttcgccacgaagcgtacgaagcttacaaagccgggcgtgctccaacgccggaagactttcctcgccaattggcgcttatgaaggaattagtggatttgcttggcctcgaacgcttggaagttcccggtttcgaggcagacgacgtattagcgactctcgcaaagaaagccgaacgtgagggctatgaagtccagatcttgacagcagatcgcgatcttttccagcttttatctccgcgcatctcggtgttacacccggaagggcatcgtatcaccccggaatggctctgggagaaatatggtttgcgtcccgaacaatgggtggattttcgcgccttagcaggcgatccgagcgacaatattccgggagttaaaggtatcggcgagaagacggcgctcaagctccttaaagaatgggggtcgttggagaacttgcttaagaatttagatcaggtcaaaccagagtcagtgcgtgagaagattcttgctcacctcgaagacctcgagttaagccgcgaattgtcccgtgtacgcaccgatttgccgctcgaagttgatttcggtcgccgccgcgaacctgactgggagggtcttaaagcgtttttagagcgtcttgaatttggttcgctcttgcatgaattcggccttttagaaagcccgttactggccgaagaagcaccttggccaccgcccgagggcgcgtttttaggttaccgtttgagtcgcccggaaccgatgtgggccgaattactggctcttgcagcgtctgcccagggacgtgtgtatcgcgcggaagaccctcatggtgcgctccgcggcctcttcgaagtccgtggactccttgccaaagacttagctgttgttgcattgcgcgaaggtcttgatttacctccgactgatgatccaatgcttcttgcgtacctcttggacccgtcaaacacgacgcccgaaggcgtagcccgtcgttacggcggcgagtggaccgaagatgcagcgaaacgcgcgttattggccgaacgtttgcacgccaatttattaggacgtttgcaaggcgaggaacgtctcctctggctttacgaagaagtggagaaaccattgagtcgcgtgctcgcgcatatggaagctaccggtgtcaaattagacgtggcgtatttggagaatctcagccttgaagttgctgcccacatgcgccgcttggaggaagaagtattccgtttagcaggccgttcctttcgccttaactctcgcgatcagttagaacgtgtgttgttcgatgaacttggtctccctcctatcggcaagacagagaagaccggtaaacgtagcacttcagcggcggttttagaagctcttcgcgaagtccatcccattgtggacaagatcttgcagtaccgcgaactcgcgaaattgaaaggcacctatattgaccgtcttccggcattagtccacccgaaaacgggacgcctccatacccgcttcaaccaaacagccacggcgaccggtcgtttgtcctcctctgatccaaaccttcagaatattccagtacgtaccccattgggccagaagatccgccgtgcgtttgtagctgaggagggttggcgtttagtggccctcgattatcgtcaaattgaattacgtgtccttgcccatctttctggcgatgagaacctcatccgcgtgtttcaagaaggcaaagacattcacactcaaacggcaagctggatgtttggattatcagctgaagcgatcgatcctttgatgcgtcgtgcagcgaagaccatcaatttcggtgttctctacggtatgagtgcctttcgtttgtcgcaggaattaggcattccctatgaagaagctcaggcgttcattcagaaatactttcaaagctatcccaaagttaaagcatggatcgagaagactctccgtgaaggccgcacacgtggttacgtagagaccttatttggacgtcgccgctatgttcccgatttaaacgctcgcgtgaaaggcaagcgtgaagccgccgaacgcatggcgttcaacatgcctgtacagggcacggcagctgacctcatgaaacttgcaatggtgcgcctttttccacaattgcgtgaagttggtgcccgcatgctcttgcaggtccacgatgaactcttgttagaagcgccaaaagagcgtgcggaagaggtggcagccctcgcgaaagaagttatggaaggcgtgtggcccttagcggtgcctcttgaagtcgaagttggtattggcgaggattggctggctgccaaagga

SEQ ID NO: 4244 - protein, 841 aa, synthetic construct
  REGION 1..841: note = Variant of DNA polymerase I from Thermus sp. strain 2.9
MHHHHHHGGSGVLPVFEHKGRVLLVDGHHLAYRNFFALKGLTTSLGEPVQGVYGFAKSLLKALKEDGDVVIVVFDAKAPSFRHEAYEAYKAGRAPTPEDFPRQLALMKELVDLLGLERLEVPGFEADDVLATLAKKAEREGYEVQILTADRDLFQLLSPRISVLHPEGHRITPEWLWEKYGLRPEQWVDFRALAGDPSDNIPGVKGIGEKTALKLLKEWGSLENLLKNLDQVKPESVREKILAHLEDLELSRELSRVRTDLPLEVDFGRRREPDWEGLKAFLERLEFGSLLHEFGLLESPLLAEEAPWPPPEGAFLGYRLSRPEPMWAELLALAASAQGRVYRAEDPHGALRGLFEVRGLLAKDLAVVALREGLDLPPTDDPMLLAYLLDPSNTTPEGVARRYGGEWTEDAAKRALLAERLHANLLGRLQGEERLLWLYEEVEKPLSRVLAHMEATGVKLDVAYLENLSLEVAAHMRRLEEEVFRLAGRSFRLNSRDQLERVLFDELGLPPIGKTEKTGKRSTSAAVLEALREVHPIVDKILQYRELAKLKGTYIDRLPALVHPKTGRLHTRFNQTATATGRLSSSDPNLQNIPVRTPLGQKIRRAFVAEEGWRLVALDYRQIELRVLAHLSGDENLIRVFQEGKDIHTQTASWMFGLSAEAIDPLMRRAAKTINFGVLYGMSAFRLSQELGIPYEEAQAFIQKYFQSYPKVKAWIEKTLREGRTRGYVETLFGRRRYVPDLNARVKGKREAAERMAFNMPVQGTAADLMKLAMVRLFPQLREVGARMLLQVHDELLLEAPKERAEEVAALAKEVMEGVWPLAVPLEVEVGIGEDWLAAKG

SEQ ID NO: 4245 - DNA, 2523 bp, synthetic construct
  misc_feature 1..2523: note = Variant of DNA polymerase I from Thermus sp. strain 2.9
  source 1..2523: mol_type = other DNA
atgcaccatcatcatcatcatggcggtagcggcgtgttaccggtgttcgagcataaaggtcgcgtgcttctggttgatggccatcatctcgcgtatcgtaacttctttgccctgaaaggattaaccaccagcctgggcgagccggtacagggtgtctacggctttgcaaagtcgctcctgaaagctctgaaagaagacggtgatgtggtgattgttgtctttgatgcgaaagcgccaagttttcgccacgaagcgtacgaagcttacaaagccgggcgtgctccaacgccggaagactttcctcgccaattggctcttatgaaggaattagtggatttgcttggcctcgaacgcttggaagttcccggtttcgaggcagacgacgtattagcgactctcgcaaagaaagccgaacgtgagggctatgaagtccagatcttgacagcagatcgcgatcttttccagcttttatctccgcgcatctcggtgttacacccggaagggcatcgtatcaccccggaatggctctgggagaaatatggtttgcgtcccgaacaatgggtggattttcgcgccttagcaggcgatccgagcgacaatattccgggagttaaaggtatcggcgagaagacggcgctcaagctccttaaagaatgggggtcgttggagaacttgcttaagaatttagatcaggtcaaaccagagtcagtgcgtgagaagattcttgctcacctcgaagacctcaaattaagccgcgaattgtcccgtgtacgcaccgatttgccgctcgaagttgatttcggtcgccgccgcgaacctgactgggagggtcttaaagcgtttttagagcgtcttgaatttggttcgctcttgcatgaattcggccttttagaaagcccgttactggccgaagaagcaccttggccaccgcccgagggcgcgtttttaggttaccgtttgagtcgcccggaaccgatgtgggccgaattactggctcttgcagcgtctgcccagggacgtgtgtatcgcgcggaagaccctcatggtgcgctccgcggcctcttcgaagtccgtggactccttgccaaagacttagctgttgttgcattgcgcgaaggtcttgatttacctccgactgatgatccaatgcttcttgcgtacctcttggacccgtcaaacacgacgcccgaaggcgtagcccgtcgttacggcggcgagtggaccgaagatgcagcgaaacgcgcgttattggccgaacgtttgcacgagaatttactgggacgtttgcaaggcgaggaacgtctcctctggctttacgaagaagtggagaaaccattgagtcgcgtgctcgcgcatatggaagctaccggtgtcaaattagacgtggcgtatttggagaatctcagccttgaagttgctgcccacatgcgccgcttggaggaagaagtattccgtttagcaggccgttcctttcgccttaactctcgcgatcagttagaacgtgtgttgttcgatgaacttggtctccctcctatcggcaagacagagaagaccggtaaacgtagcacttcagcggcggttttagaagctcttcgcgaagtccatcccattgtggacaagatcttgcagtaccgcgaactcgcgaaattgaaaggcacctatattgaccgtcttccggcattagtccacccgaaaacgggacgcctccatacccgcttcaaccaaacagccacggcgaccggtcgtttgtcctcctctgatccaaaccttcagaatattccagtacgtacccctttgggccagaagatccgccgtgcgtttgtagctgaggagggttggcgtttagtggccctcgattatcgtcaaattgaattacgtgtccttgcccatctttctggcgatgagaacctcatccgcgtgtttcaggaaggcaaagacattcacactcaaacggcaagctggatgtttggattatcagctgaagcgatcgatcctttgatgcgtcgtgcagcgaagaccatcaatttcggtgttctctacggtatgagtgcctttcgtttgtcgcaggaattaggcattccctatgaagaagctcaggcgttcattcagaaatactttcaaagctatcccaaagttaaagcatggatcgagaagactctccgtgaaggccgcacacgtggttacgtagagaccttatttggacgtcgccgctatgttcccgatttaaacgctcgcgtgaaaggcaagcgtgaagccgccgaacgcatggcgttcaacatgcctgtacagggcacggcagctgacctcatgaaacttgcaatggtgcgcctttttccacaattgcgtgaagttggtgcccgcatgctcttgcaggtccacgatgaactcttgttagaagcgccaaaagagcgtgcggaagaggtggcagccctcgcgaaagaagttatggaaggcgtgtggcccttagcggtgcctcttgaagtcgaagttggtattggcgaggattggctggctgccaaagga

SEQ ID NO: 4246 - protein, 841 aa, synthetic construct
  REGION 1..841: note = Variant of DNA polymerase I from Thermus sp. strain 2.9
MHHHHHHGGSGVLPVFEHKGRVLLVDGHHLAYRNFFALKGLTTSLGEPVQGVYGFAKSLLKALKEDGDVVIVVFDAKAPSFRHEAYEAYKAGRAPTPEDFPRQLALMKELVDLLGLERLEVPGFEADDVLATLAKKAEREGYEVQILTADRDLFQLLSPRISVLHPEGHRITPEWLWEKYGLRPEQWVDFRALAGDPSDNIPGVKGIGEKTALKLLKEWGSLENLLKNLDQVKPESVREKILAHLEDLKLSRELSRVRTDLPLEVDFGRRREPDWEGLKAFLERLEFGSLLHEFGLLESPLLAEEAPWPPPEGAFLGYRLSRPEPMWAELLALAASAQGRVYRAEDPHGALRGLFEVRGLLAKDLAVVALREGLDLPPTDDPMLLAYLLDPSNTTPEGVARRYGGEWTEDAAKRALLAERLHENLLGRLQGEERLLWLYEEVEKPLSRVLAHMEATGVKLDVAYLENLSLEVAAHMRRLEEEVFRLAGRSFRLNSRDQLERVLFDELGLPPIGKTEKTGKRSTSAAVLEALREVHPIVDKILQYRELAKLKGTYIDRLPALVHPKTGRLHTRFNQTATATGRLSSSDPNLQNIPVRTPLGQKIRRAFVAEEGWRLVALDYRQIELRVLAHLSGDENLIRVFQEGKDIHTQTASWMFGLSAEAIDPLMRRAAKTINFGVLYGMSAFRLSQELGIPYEEAQAFIQKYFQSYPKVKAWIEKTLREGRTRGYVETLFGRRRYVPDLNARVKGKREAAERMAFNMPVQGTAADLMKLAMVRLFPQLREVGARMLLQVHDELLLEAPKERAEEVAALAKEVMEGVWPLAVPLEVEVGIGEDWLAAKG

SEQ ID NO: 4247 - DNA, 2523 bp, synthetic construct
  misc_feature 1..2523: note = Variant of DNA polymerase I from Thermus sp. strain 2.9
  source 1..2523: mol_type = other DNA
atgcaccatcatcatcatcatggcggtagcggcgtgttaccggtgttcgagcctaaaggtcgcgtgcttctggttgatggccatcatctcgcgtatcgtaacttctttgccctgaaaggattaaccaccagcctgggcgagccggtacagggtgtctacggctttgcaaagtcgctcctgaaagctctgaaagaagacggtgatgtggtgattgttgtctttgatgcgaaagcgccaagttttcgccacgaagcgtacgaagcttacaaagccgggcgtgctccaacgccggaagactttcctcgccaattggcgcttatgaaggaattagtggatttgcttggcctcgaacgcttggaagttcccggtttcgaggcagacgacgtattagcgactctcgcaaagaaagccgaacgtgagggctatgaagtccagatcttgacagcagatcgcgatcttttccagcttttatctccgcgcatctcggtgttacacccggaagggcatcgtatcaccccggaatggctctgggagaaatatggtttgcgtcccgaacaatgggtggattttcgcgccttagcaggcgatccgagcgacaatattccgggagttaaaggtatcggcgagaagacggcgctcaagctccttaaagaatgggggtcgttggagaacttgcttaagaatttagatcaggtcaaaccagagtcagtgcgtgagaagattcttgctcacctcgaagacctcaaattaagccgcgaattgtcccgtgtacgcaccgatttgccgctcgaagttgatttcggtcgccgccgcgaacctgactgggagggtcttaaagcgtttttagagcgtcttgaatttggttcgctcttgcatgaattcggccttttagaaagcccgttaggggccgaagaagcaccttggccaccgcccgagggcgcgtttttaggttaccgtttgagtcgcccggaaccgatgtgggccgaattactggctcttgcagcgtctgcccagggacgtgtgtatcgcgcggaagaccctcatggtgcgctccgcggcctcttcgaagtccgtggactccttgccaaagacttagctgttgttgcattgcgcgaaggtcttgatttacctccgactgatgatccaatgcttcttgcgtacctcttggacccgtcaaacacgacgcccgaaggcgtagcccgtcgttacggcggcgagtggaccgaagatgcagcgaaacgcgcgttattggccgaacgtttgcacgccaatttattaggacgtttgcaaggcgaggaacgtctcctctggctttacgaagaagtggagaaaccattgagtcgcgtgctcgcgcatatggaagctaccggtgtcaaattagacgtggcgtatttggagaatctcagccttgaagttgctgcccacatgcgccgcttggaggaagaagtattccgtttagcaggccgttcctttcgccttaactctcgcgatcagttagaacgtgtgttgttcgatgaacttggtctccctcctatcggcaagacagagaagaccggtaaacgtagcacttcagcggcggttttagaagctcttcgcgaagtccatcccattgtggacaagatcttgcagtaccgcgaactcgcgaaattgaaaggcacctatattgaccgtcttccggcattagtccacccgaaaacgggacgcctccatacccgcttcaaccaaacagccacggcgaccggtcgtttgtcctcctctgatccaaaccttcagaatattccagtacgtaccccattgggccagaagatccgccgtgcgtttgtagctgaggagggttggcgtttagtggccctcgattatcgtcaaattgaattacgtgtccttgcccatctttctggcgatgagaacctcatccgcgtgtttcaggaaggcaaagacattcacactcaaacggcaagctggatgtttggattatcagctgaagcgatcgatcctttgatgcgtcgtgcagcgaagaccatcaatttcggtgttctctacggtatgagtgcctttcgtttgtcgcaggaattaggcattccctatgaagaagctcaggcgttcattcagaaatactttcaaagctatcccaaagttaaagcatggatcgagaagactctccgtgaaggccgcacacgtggttacgtagagaccttatttggacgtcgccgctatgttcccgatttaaacgctcgcgtgaaaggcaagcgtgaagccgccgaacgcatggcgttcaacatgcctgtacagggcacggcagctgacctcatgaaacttgcaatggtgcgcctttttccacaattgcgtgaagttggtgcccgcatgctcttgcaggtccacgatgaactcttgttagaagcgccaaaagagcgtgcggaagaggtggcagccctcgcgaaagaagttatggaaggcgtgtggcccttagcggtgcctcttgaagtcgaagttggtattggcgaggattggctggctgccaaagga

SEQ ID NO: 4248 - protein, 841 aa, synthetic construct
  REGION 1..841: note = Variant of DNA polymerase I from Thermus sp. strain 2.9
MHHHHHHGGSGVLPVFEPKGRVLLVDGHHLAYRNFFALKGLTTSLGEPVQGVYGFAKSLLKALKEDGDVVIVVFDAKAPSFRHEAYEAYKAGRAPTPEDFPRQLALMKELVDLLGLERLEVPGFEADDVLATLAKKAEREGYEVQILTADRDLFQLLSPRISVLHPEGHRITPEWLWEKYGLRPEQWVDFRALAGDPSDNIPGVKGIGEKTALKLLKEWGSLENLLKNLDQVKPESVREKILAHLEDLKLSRELSRVRTDLPLEVDFGRRREPDWEGLKAFLERLEFGSLLHEFGLLESPLGAEEAPWPPPEGAFLGYRLSRPEPMWAELLALAASAQGRVYRAEDPHGALRGLFEVRGLLAKDLAVVALREGLDLPPTDDPMLLAYLLDPSNTTPEGVARRYGGEWTEDAAKRALLAERLHANLLGRLQGEERLLWLYEEVEKPLSRVLAHMEATGVKLDVAYLENLSLEVAAHMRRLEEEVFRLAGRSFRLNSRDQLERVLFDELGLPPIGKTEKTGKRSTSAAVLEALREVHPIVDKILQYRELAKLKGTYIDRLPALVHPKTGRLHTRFNQTATATGRLSSSDPNLQNIPVRTPLGQKIRRAFVAEEGWRLVALDYRQIELRVLAHLSGDENLIRVFQEGKDIHTQTASWMFGLSAEAIDPLMRRAAKTINFGVLYGMSAFRLSQELGIPYEEAQAFIQKYFQSYPKVKAWIEKTLREGRTRGYVETLFGRRRYVPDLNARVKGKREAAERMAFNMPVQGTAADLMKLAMVRLFPQLREVGARMLLQVHDELLLEAPKERAEEVAALAKEVMEGVWPLAVPLEVEVGIGEDWLAAKG

SEQ ID NO: 4249 - DNA, 2523 bp, synthetic construct
  misc_feature 1..2523: note = Variant of DNA polymerase I from Thermus sp. strain 2.9
  source 1..2523: mol_type = other DNA
atgcaccatcatcatcatcatggcggtagcggcgtgttaccggtgttcgagcctaaaggtcgcgtgcttctggttgatggccatcatctcgcgtatcgtaacttctttgccctgaaaggattaaccaccagcctgggcgagccggtacagggtgtctacggctttgcaaagtcgctcctgaaagctctgaaagaagacggtgatgtggtgattgttgtctttgatgcgaaagcgccaagttttcgccacgaagcgtacgaagcttacaaagccgggcgtgctccaacgccggaagactttcctcgccaattggcgcttatgaaggaattagtggatttgcttggcctcgaacgcttggaagttcccggtttcgaggcagacgacgtattagcgactctcgcaaagaaagccgaacgtgagggctatgaagtccagatcttgacagcagatcgcgatcttttccagcttttatctccgcgcatctcggtgttacacccggaagggcatcgtatcaccccggaatggctctgggagaaatatggtttgcgtcccgaacaatgggtggattttcgcgccttagcaggcgatccgagcgacaatattccgggagttaaaggtatcggcgagaagacggcgctcaagctccttaaagaatgggggtcgttggagaacttgcttaagaatttagatcaggtcaaaccagagtcagtgcgtgagaagattcttgctcacctcgaagacctcaaattaagccgcgaattgtcccgtgtacgcaccgatttgccgctcgaagttgatttcggtcgccgccgcgaacctgactgggagggtcttaaagcgtttttagagcgtcttgaatttggttcgctcttgcatgaattcggccttttagaaagcccgttactggccgaagaagcaccttggccaccgcccgagggcgcgtttttaggttaccgtttgagtcgcccggaaccgatgtgggccgaattactggctcttgcagcgtctgcccagggacgtgtgtatcgcgcggaagaccctcatggtgcgctccgcggcctcttcgaagtccgtggactccttgccaaagacttagctgttgttgcattgcgcgaaggtcttgatttacctccgactgatgatccaatgcttcttgcgtacctcttggacccgtcaaacacgacgcccgaaggcgtagcccgtcgttacggcggcgagtggaccgaagatgcagcgaaacgcgcgttattggccgaacgtttgcacgccaatttattaggacgtttgcaaggcgaggaacgtctcctctggctttacgaagaagtggagaaaccattgagtcgcgtgctcgcgcatatggaagctaccggtgtcaaattagacgtggcgtatttggagaatctcagccttgaagttgctgcccacatgcgccgcttggaggaagaagtattccgtttagcaggccgttcctttcgccttaactctcgcgatcagttagaacgtgtgttgttcgatgaacttggtctccctcctatcggcaagacagagaagaccggtaaacgtagcacttcagcggcggttttagaagctcttcgcgaagtccatcccattgtggacaagatcttgcagtaccgcgaactcgcgaaattgaaaggcacctatattgaccgtcttccggcattagtccacccgaaaacgggacgcctccatacccgcttcaaccaaacagccacggcgaccggtcgtttgtcctcctctgatccaaaccttcagaatattccagtacgtaccccattgggccagaagatccgccgtgcgtttgtagctgaggagggttggcgtttagtggccctcgattatcgtcaaattgaattacgtgtccttgcccatctttctggcgatgagaacctcatccgcgtgtttcaggaaggcaaagacattcacactcaaacggcaagctggatgtttggattatcagctgaagcgatcgatcctttgatgcgtcgtgcagcgaagaccatcaatttcggtgttctctacggtatgagtgcctttcgtttgtcgcaggaattaggcattccctatgaagaagctcaggcgttcattcagaaatactttcaaagctatcccaaagttaaagcatggatcgagaagactctccgtgaaggccgcacacgtggttacgtagagaccttatttggacgtcgccgctatgttcccgatttaaacgctcgcgtgaaaggcaagcgtgaagccgccgaacgcatggcgttcaacatgcctgtacagggcacggcagctgacctcatgaaacttgcaatggtgcgcctttttccacaattgcgtgaagttggtgcccgcatgctcttgcaggtccacgatgaactcttgttagaagcgccaaaagagcgtgcggaagaggtggcagccctcgcgaaagaagttatggaaggctggtggcccttagcggtgcctcttgaagtcgaagttggtattggcgaggattggctggctgccaaagga

SEQ ID NO: 4250 - protein, 841 aa, synthetic construct
  REGION 1..841: note = Variant of DNA polymerase I from Thermus sp. strain 2.9
MHHHHHHGGSGVLPVFEPKGRVLLVDGHHLAYRNFFALKGLTTSLGEPVQGVYGFAKSLLKALKEDGDVVIVVFDAKAPSFRHEAYEAYKAGRAPTPEDFPRQLALMKELVDLLGLERLEVPGFEADDVLATLAKKAEREGYEVQILTADRDLFQLLSPRISVLHPEGHRITPEWLWEKYGLRPEQWVDFRALAGDPSDNIPGVKGIGEKTALKLLKEWGSLENLLKNLDQVKPESVREKILAHLEDLKLSRELSRVRTDLPLEVDFGRRREPDWEGLKAFLERLEFGSLLHEFGLLESPLLAEEAPWPPPEGAFLGYRLSRPEPMWAELLALAASAQGRVYRAEDPHGALRGLFEVRGLLAKDLAVVALREGLDLPPTDDPMLLAYLLDPSNTTPEGVARRYGGEWTEDAAKRALLAERLHANLLGRLQGEERLLWLYEEVEKPLSRVLAHMEATGVKLDVAYLENLSLEVAAHMRRLEEEVFRLAGRSFRLNSRDQLERVLFDELGLPPIGKTEKTGKRSTSAAVLEALREVHPIVDKILQYRELAKLKGTYIDRLPALVHPKTGRLHTRFNQTATATGRLSSSDPNLQNIPVRTPLGQKIRRAFVAEEGWRLVALDYRQIELRVLAHLSGDENLIRVFQEGKDIHTQTASWMFGLSAEAIDPLMRRAAKTINFGVLYGMSAFRLSQELGIPYEEAQAFIQKYFQSYPKVKAWIEKTLREGRTRGYVETLFGRRRYVPDLNARVKGKREAAERMAFNMPVQGTAADLMKLAMVRLFPQLREVGARMLLQVHDELLLEAPKERAEEVAALAKEVMEGWWPLAVPLEVEVGIGEDWLAAKG

SEQ ID NO: 4251 - DNA, 2523 bp, synthetic construct
  misc_feature 1..2523: note = Variant of DNA polymerase I from Thermus sp. strain 2.9
  source 1..2523: mol_type = other DNA
atgcaccatcatcatcatcatggcggtagcggcgtgttaccggtgttcgagcctaaaggtcgcgtgcttctggttgatggccatcatctcgcgtatcgtaacttctttgccctgaaaggattaaccaccagcctgggcgagccggtacagggtgtctacggctttgcaaagtcgctcctgaaagctctgaaagaagacggtgatgtggtgattgttgtctttgatgcgaaagcgccaagttttcgccacgaagcgtacgaagcttacaaagccgggcgtgctccaacgccggaagactttcctcgccaattggcgcttatgaaggaattagtggatttgcttggcctcgaacgcttggaagttcccggtttcgaggcagacgacgtattagcgactctcgcaaagaaagccgaacgtgagggctatgaagtccagatcttgacagcagatcgcgatcttttccagcttttatctccgcgcatctcggtgttacacccggaagggcatcgtatcaccccggaatggctctgggagaaatatggtttgcgtcccgaacaatgggtggattttcgcgccttagcaggcgatccgagcgacaatattccgggagttaaaggtatcggcgagaagacggcgctcaagctccttaaagaatgggggtcgttggagaacttgcttaagaatttagatcaggtcaaaccagagtcagtgcgtgagaagattcttgctcacctcgaagacctcaaattaagccgcgaattgtcctcggtacgcaccgatttgccgctcgaagttgatttcggtcgccgccgcgaacctgactgggagggtcttaaagcgtttttagagcgtcttgaatttggttcgctcttgcatgaattcggccttttagaaagcccgttactggccgaagaagcaccttggccaccgcccgagggcgcgtttttaggttaccgtttgagtcgcccggaaccgatgtgggccgaattactggctcttgcagcgtctgcccagggacgtgtgtatcgcgcggaagaccctcatggtgcgctccgcggcctcttcgaagtccgtggactccttgccaaagacttagctgttgttgcattgcgcgaaggtcttgatttacctccgactgatgatccaatgcttcttgcgtacctcttggacccgtcaaacacgacgcccgaaggcgtagcccgtcgttacggcggcgagtggaccgaagatgcagcgaaacgcgcgttattggccgaacgtttgcacgccaatttattaggacgtttgcaaggcgaggaacgtctcctctggctttacgaagaagtggagaaaccattgagtcgcgtgctcgcgcatatggaagctaccggtgtcaaattagacgtggcgtatttggagaatctcagccttgaagttgctgcccacatgcgccgcttggaggaagaagtattccgtttagcaggccgttcctttcgccttaactctcgcgatcagttagaacgtgtgttgttcgatgaacttggtctccctcctatcggcaagacagagaagaccggtaaacgtagcacttcagcggcggttttagaagctcttcgcgaagtccatcccattgtggacaagatcttgcagtaccgcgaactcgcgaaattgaaaggcacctatattgaccgtcttccggcattagtccacccgaaaacgggacgcctccatacccgcttcaaccaaacagccacggcgaccggtcgtttgtcctcctctgatccaaaccttcagaatattccagtacgtaccccattgggccagaagatccgccgtgcgtttgtagctgaggagggttggcgtttagtggccctcgattatcgtcaaattgaattacgtgtccttgcccatctttctggcgatgagaacctcatccgcgtgtttcaggaaggcaaagacattcacactcaaacggcaagctggatgtttggattatcagctgaagcgatcgatcctttgatgcgtcgtgcagcgaagaccatcaatttcggtgttctctacggtatgagtgcctttcgtttgtcgcaggaattaggcattccctatgaagaagctcaggcgttcattcagaaatactttcaaagctatcccaaagttaaagcatggatcgagaagactctccgtgaaggccgcacacgtggttacgtagagaccttatttggacgtcgccgctatgttcccgatttaaacgctcgcgtgaaaggcaagcgtgaagccgccgaacgcatggcgttcaacatgcctgtacagggcacggcagctgacctcatgaaacttgcaatggtgcgcctttttccacaattgcgtgaagttggtgcccgcatgctcttgcaggtccacgatgaactcttgttagaagcgccaaaagagcgtgcggaagaggtggcagccctcgcgaaagaagttatggaaggcgtgtggcccttagcggtgcctcttgaagtcgaagttggtattggcgaggattggctggctgccaaagga

SEQ ID NO: 4252 - protein, 841 aa, synthetic construct
  REGION 1..841: note = Variant of DNA polymerase I from Thermus sp. strain 2.9
MHHHHHHGGSGVLPVFEPKGRVLLVDGHHLAYRNFFALKGLTTSLGEPVQGVYGFAKSLLKALKEDGDVVIVVFDAKAPSFRHEAYEAYKAGRAPTPEDFPRQLALMKELVDLLGLERLEVPGFEADDVLATLAKKAEREGYEVQILTADRDLFQLLSPRISVLHPEGHRITPEWLWEKYGLRPEQWVDFRALAGDPSDNIPGVKGIGEKTALKLLKEWGSLENLLKNLDQVKPESVREKILAHLEDLKLSRELSSVRTDLPLEVDFGRRREPDWEGLKAFLERLEFGSLLHEFGLLESPLLAEEAPWPPPEGAFLGYRLSRPEPMWAELLALAASAQGRVYRAEDPHGALRGLFEVRGLLAKDLAVVALREGLDLPPTDDPMLLAYLLDPSNTTPEGVARRYGGEWTEDAAKRALLAERLHANLLGRLQGEERLLWLYEEVEKPLSRVLAHMEATGVKLDVAYLENLSLEVAAHMRRLEEEVFRLAGRSFRLNSRDQLERVLFDELGLPPIGKTEKTGKRSTSAAVLEALREVHPIVDKILQYRELAKLKGTYIDRLPALVHPKTGRLHTRFNQTATATGRLSSSDPNLQNIPVRTPLGQKIRRAFVAEEGWRLVALDYRQIELRVLAHLSGDENLIRVFQEGKDIHTQTASWMFGLSAEAIDPLMRRAAKTINFGVLYGMSAFRLSQELGIPYEEAQAFIQKYFQSYPKVKAWIEKTLREGRTRGYVETLFGRRRYVPDLNARVKGKREAAERMAFNMPVQGTAADLMKLAMVRLFPQLREVGARMLLQVHDELLLEAPKERAEEVAALAKEVMEGVWPLAVPLEVEVGIGEDWLAAKG

SEQ ID NO: 4253 - DNA, 2523 bp, synthetic construct
  misc_feature 1..2523: note = Variant of DNA polymerase I from Thermus sp. strain 2.9
  source 1..2523: mol_type = other DNA
atgcaccatcatcatcatcatggcggtagcggcgtgttaccggtgttcgagcctaaaggtcgcgtgcttctggttgatggccatcatctcgcgtatcgtaacttctttgccctgaaaggattaaccaccagcctgggcgagccggtacagggtgtctacggctttgcaaagtcgctcctgaaagctctgaaagaagacggtgatgtggtgattgttgtctttgatgcgaaagcgccaagttttcgccacgaagcgtacgaagcttacaaagccgggcgtgctccaacgccggaagactttcctcgccaattggcgcttatgaaggaattagtggatttgcttggcctcgaacgcttggaagttcccggtttcgaggcagacgacgtattagcgactctcgcaaagaaagccgaacgtgagggctatgaagtccagatcttgacagcagatcgcgatcttttccagcttttatctccgcgcatctcggtgttacacccggaagggcatcgtatcaccccggaatggctctgggagaaatatggtttgcgtcccgaacaatgggtggattttcgcgccttagcaggcgatccgagcgacaatattccgggagttaaaggtatcggcgagaagacggcgctcaagctccttaaagaatgggggtcgttggagaacttgcttaagaatttagatcaggtcaaaccagagtcagtgcgtgagaagattcttgctcacctcgaagacctcaaattaagccgcgaattgtcccgtgtacgcaccgatttgccgctcgaagttgatttcggtcgccgccgcgaacctgactgggagggtcttaaagcgtttttagagcgtcttgaatttggttcgctcttgcatgaattcggccttttagaaagcccgttactggccgaagaagcaccttggccaccgcccgagggcgcgtttttaggttaccgtttgagtcgcccggaaccgatgtgggccgaattactggctcttgcagcgtctgcccagggacgtgtgtatcgcgcggaagaccctcatggtgcgctccgcggcctcttcgaagtccgtggactccttgccaaagacttagctgttgttgcattgcgcgaaggtcttgatttacctccgactgatgatccaatgcttcttgcgtacctcttggacccgtcaaacacgacgcccgaaggcgtagcccgtcgttacggcggcgagtggaccgaagatgcagcgaaacgcgcgttattggccgaacgtttgcacgccaatttattaggacgtttgcaaggcgaggaacgtctcctctggctttacgaagaagtggagaaaccattgagtcgcgtgctcgcgcatatggaagctaccggtgtcaaattagacgtggcgtatttggagaatctcagccttgaagttgctgcccacatgcgccgcttggaggaagaagtattccgtttagcaggccgttcctttcgccttaactctcgcgatcagttagaacgtgtgttgttcgatgaacttggtctccctcctatcggcaagacagagaagaccggtaaacgtagcacttcagcggcggttttagaagctcttcgcgaagtccatcccattgtggacaagatcttgcagtaccgcgaactcgcgaaattgaaaggcacctatattgaccgtcttccggcattagtccacccgaaaacgggacgcctccatacccgcttcaaccaaacagccacggcgaccggtcgtttgtcctcctctgatccaaaccttcagaatattccagtacgtaccccattgggccagaagatccgccgtgcgtttgtagctgaggagggttggcgtttagtggccctcgattatcgtcaaattgaattacgtgtccttgcccatctttctggcgatgagaacctcatccgcgtgtttcaggaaggcaaagacattcacactcaaacggcaagctggatgtttggattatcagctgaagcgatcgatcctttgatgcgtcgtgcagcgaagaccatcaatttcggtgttctctacggtatgagtgcctttcgtttgtcgcaggaattaggcattccctatgaagaagctcaggcgttcattcagaaatactttcaaagctatcccaaagttaaagcatggatcgagaagactctccgtgaaggccgcacacgtggttacgtagagaccttatttggacgtcgccgctatgttcccgatttaaacgctcgcgtgaaaggcaagcgtgaagccgccgaacgcatggcgttcaacatgcctgtacagggcacggcagctgacctcatgaaacttgcaatggtgcgcctttttccacaattgcgtgaagttggtgcccgcatgctcttgcaggtccacgatgaactcttgttagaagcgccaaaagagcgtgcggaagaggtggcagccctcgcgaaagaagttatggaaggcaggtggcccttagcggtgcctcttgaagtcgaagttggtattggcgaggattggctggctgccaaagga

SEQ ID NO: 4254 - protein, 841 aa, synthetic construct
  REGION 1..841: note = Variant of DNA polymerase I from Thermus sp. strain 2.9
MHHHHHHGGSGVLPVFEPKGRVLLVDGHHLAYRNFFALKGLTTSLGEPVQGVYGFAKSLLKALKEDGDVVIVVFDAKAPSFRHEAYEAYKAGRAPTPEDFPRQLALMKELVDLLGLERLEVPGFEADDVLATLAKKAEREGYEVQILTADRDLFQLLSPRISVLHPEGHRITPEWLWEKYGLRPEQWVDFRALAGDPSDNIPGVKGIGEKTALKLLKEWGSLENLLKNLDQVKPESVREKILAHLEDLKLSRELSRVRTDLPLEVDFGRRREPDWEGLKAFLERLEFGSLLHEFGLLESPLLAEEAPWPPPEGAFLGYRLSRPEPMWAELLALAASAQGRVYRAEDPHGALRGLFEVRGLLAKDLAVVALREGLDLPPTDDPMLLAYLLDPSNTTPEGVARRYGGEWTEDAAKRALLAERLHANLLGRLQGEERLLWLYEEVEKPLSRVLAHMEATGVKLDVAYLENLSLEVAAHMRRLEEEVFRLAGRSFRLNSRDQLERVLFDELGLPPIGKTEKTGKRSTSAAVLEALREVHPIVDKILQYRELAKLKGTYIDRLPALVHPKTGRLHTRFNQTATATGRLSSSDPNLQNIPVRTPLGQKIRRAFVAEEGWRLVALDYRQIELRVLAHLSGDENLIRVFQEGKDIHTQTASWMFGLSAEAIDPLMRRAAKTINFGVLYGMSAFRLSQELGIPYEEAQAFIQKYFQSYPKVKAWIEKTLREGRTRGYVETLFGRRRYVPDLNARVKGKREAAERMAFNMPVQGTAADLMKLAMVRLFPQLREVGARMLLQVHDELLLEAPKERAEEVAALAKEVMEGRWPLAVPLEVEVGIGEDWLAAKG

SEQ ID NO: 4255 - DNA, 2523 bp, synthetic construct
  misc_feature 1..2523: note = Variant of DNA polymerase I from Thermus sp. strain 2.9
  source 1..2523: mol_type = other DNA
atgcaccatcatcatcatcatggcggtagcggcgtgttaccggtgttcgagcctaaaggtcgcgtgcttctggttgatggccatcatctcgcgtatcgtaacttctttgccctgaaaggattaaccaccagcctgggcgagccggtacagggtgtctacggctttgcaaagtcgctcctgaaagctctgaaagaagacggtgatgtggtgattgttgtctttgatgcgaaagcgccaagttttcgccacgaagcgtacgaagcttacaaagccgggcgtgctccaacgccggaagactttcctcgccaattggcgcttatgaaggaattagtggatttgcttggcctcgaacgcttggaagttcccggtttcgaggcagacgacgtattagcgactctcgcaaagaaagccgaacgtgagggctatgaagtccagatcttgacagcagatcgcgatcttttccagcttttatctccgcgcatctcggtgttacacccggaagggcatcgtatcaccccggaatggctctgggagaaatatggtttgcgtcccgaacaatgggtggattttcgcgccttagcaggcgatccgagcgacaatattccgggagttaaaggtatcggcgagaagacggcgctcaagctccttaaagaatgggggtcgttggagaacttgcttaagaatttagatcaggtcaaaccagagtcagtgcgtgagaagattcttgctcacctcgaatacctcaagttaagccgcgaattgtcccgtgtacgcaccgatttgccgctcgaagttgatttcggtcgccgccgcgaacctgactgggagggtcttaaagcgtttttagagcgtcttgaatttggttcgctcttgcatgaattcggccttttagaaagcccgttactggccgaagaagcaccttggccaccgcccgagggcgcgtttttaggttaccgtttgagtcgcccggaaccgatgtgggccgaattactggctcttgcagcgtctgcccagggacgtgtgtatcgcgcggaagaccctcatggtgcgctccgcggcctcttcgaagtccgtggactccttgccaaagacttagctgttgttgcattgcgcgaaggtcttgatttacctccgactgatgatccaatgcttcttgcgtacctcttggacccgtcaaacacgacgcccgaaggcgtagcccgtcgttacggcggcgagtggaccgaagatgcagcgaaacgcgcgttattggccgaacgtttgcacgagaatttactgggacgtttgcaaggcgaggaacgtctcctctggctttacgaagaagtggagaaaccattgagtgtggtgctcgctcatatggaagctaccggtgtcaaattagacgtggcgtatttggagaatctcagccttgaagttgctgcccacatgcgccgcttggaggaagaagtattccgtttagcaggccgttcctttcgccttaactctcgcgatcagttagaacgtgtgttgttcgatgaacttggtctccctcctatcggcaagacagagaagaccggtaaacgtagcacttcagcggcggttttagaagctcttcgcgaagtccatcccattgtggacaagatcttgcagtaccgcgaactcgcgaaattgaaaggcacctatattgaccgtcttccggcattagtccacccgaaaacgggacgcctccatacccgcttcaaccaaacagccacggcgaccggtcgtttgtcctcctctgatccaaaccttcagaatattccagtacgtaccccattgggccagaagatccgccgtgcgtttgtagctgaggagggttggcgtttagtggccctcgattatcgtcaaattgaattacgtgtccttgcccatctttctggcgatgagaacctcatccgcgtgtttcaggaaggcaaagacattcacactcaaacggcaagctggatgtttggattatcagctgaagcgatcgatcctttgatgcgtcgtgcagcgaagaccatcaatttcggtgttctctacggtatgagtgcctttcgtttgtcgcaggaattaggcattccctatgaagaagctcaggcgttcattcagaaatactttcaaagctatcccaaagttaaagcatggatcgagaagactctccgtgaaggccgcacacgtggttacgtagagaccttatttggacgtcgccgctatgttcccgatttaaacgctcgcgtgaaaggcaagcgtgaagccgccgaacgcatggcgttcaacatgcctgtacagggcacggcagctgacctcatgaaacttgcaatggtgcgcctttttccacaattgcgtgaagttggtgcccgcatgctcttgcaggtccacgatgaactcttgttagaagcgccaaaagagcgtgcggaagaggtggcagccctcgcgaaagaagttatggaaggcgtgtggcccttagcggtgcctcttgaagtcgaagttggtattggcgaggattggctggctgccaaagga

SEQ ID NO: 4256 - protein, 841 aa, synthetic construct
  REGION 1..841: note = Variant of DNA polymerase I from Thermus sp. strain 2.9
MHHHHHHGGSGVLPVFEPKGRVLLVDGHHLAYRNFFALKGLTTSLGEPVQGVYGFAKSLLKALKEDGDVVIVVFDAKAPSFRHEAYEAYKAGRAPTPEDFPRQLALMKELVDLLGLERLEVPGFEADDVLATLAKKAEREGYEVQILTADRDLFQLLSPRISVLHPEGHRITPEWLWEKYGLRPEQWVDFRALAGDPSDNIPGVKGIGEKTALKLLKEWGSLENLLKNLDQVKPESVREKILAHLEYLKLSRELSRVRTDLPLEVDFGRRREPDWEGLKAFLERLEFGSLLHEFGLLESPLLAEEAPWPPPEGAFLGYRLSRPEPMWAELLALAASAQGRVYRAEDPHGALRGLFEVRGLLAKDLAVVALREGLDLPPTDDPMLLAYLLDPSNTTPEGVARRYGGEWTEDAAKRALLAERLHENLLGRLQGEERLLWLYEEVEKPLSVVLAHMEATGVKLDVAYLENLSLEVAAHMRRLEEEVFRLAGRSFRLNSRDQLERVLFDELGLPPIGKTEKTGKRSTSAAVLEALREVHPIVDKILQYRELAKLKGTYIDRLPALVHPKTGRLHTRFNQTATATGRLSSSDPNLQNIPVRTPLGQKIRRAFVAEEGWRLVALDYRQIELRVLAHLSGDENLIRVFQEGKDIHTQTASWMFGLSAEAIDPLMRRAAKTINFGVLYGMSAFRLSQELGIPYEEAQAFIQKYFQSYPKVKAWIEKTLREGRTRGYVETLFGRRRYVPDLNARVKGKREAAERMAFNMPVQGTAADLMKLAMVRLFPQLREVGARMLLQVHDELLLEAPKERAEEVAALAKEVMEGVWPLAVPLEVEVGIGEDWLAAKG

SEQ ID NO: 4257 - DNA, 2523 bp, synthetic construct
  misc_feature 1..2523: note = Variant of DNA polymerase I from Thermus sp. strain 2.9
  source 1..2523: mol_type = other DNA
atgcaccatcatcatcatcatggcggtagcggcgtgttaccggtgttcgagcataaaggtcgcgtgcttctggttgatggccatcatctcgcgtatcgtaacttctttgccctgaaaggattaaccaccagcctgggcgagccggtacagggtgtctacggctttgcaaagtcgctcctgaaagctctgaaagaagacggtgatgtggtgattgttgtctttgatgcgaaagcgccaagttttcgccacgaagcgtacgaagcttacaaagccgggcgtgctccaacgccggaagactttcctcgccaattggcgcttatgaaggaattagtggatttgcttggcctcgaacgcttggaagttcccggtttcgaggcagacgacgtattagcgactctcgcaaagaaagccgaacgtgagggctatgaagtccagatcttgacagcagatcgcgatcttttccagcttttatctccgcgcatctcggtgttacacccggaagggcatcgtatcaccccggaatggctctgggagaaatatggtttgcgtcccgaacaatgggtggattttcgcgccttagcaggcgatccgagcgacaatattccgggagttaaaggtatcggcgagaagacggcgctcaagctccttaaagaatgggggtcgttggagaacttgcttaagaatttagatcaggtcaaaccagagtcagtgcgtgagaagattcttgctcacctcgaagacctcgagttaagccgcgaattgtcccgtgtacgcaccgatttgccgctcgaagttgatttcggtcgccgccgcgaacctgactgggagggtcttaaagcgtttttagagcgtcttgaatttggttcgctcttgcatgaattcggccttttagaaagcccgttactggccgaagaagcaccttggccaccgcccgagggcgcgtttttaggttaccgtttgagtcgcccggaaccgatgtgggccgaattactggctcttgcagcgtctgcccagggacgtgtgtatcgcgcggaagaccctcatggtgcgctccgcggcctcttcgaagtccgtggactccttgccaaagacttagctgttgttgcattgcgcgaaggtcttgatttacctccgactgatgatccaatgcttcttgcgtacctcttggacccgtcaaacacgacgcccgaaggcgtagcccgtcgttacggcggcgagtggaccgaagatgcagcgaaacgcgcgttattggccgaacgtttgcacgccaatttattaggacgtttgcaaggcgaggagcgtctcctctggctttacgaagaagtggagaaaccattgagtgtggtgctcgctcatatggaagctaccggtgtcaaattagacgtggcgtatttggagaatctcagccttgaagttgctgcccacatgcgccgcttggaggaagaagtagtccgtttagcaggccgttcctttcgccttaactctcgcgatcagttagaacgtgtgttgttcgatgaacttggtctccctcctatcggcaagacagagaagaccggtaaacgtagcacttcagcggcggttttagaagctcttcgcgaagtccatcccattgtggacaagatcttgcagtaccgcgaactcgcgaaattgaaaggcacctatattgaccgtcttccggcattagtccacccgaaaacgggacgcctccatacccgcttcaaccaaacagccacggcgaccggtcgtttgtcctcctctgatccaaaccttcagaatattccagtacgtaccccattgggccagaagatccgccgtgcgtttgtagctgaggagggttggcgtttagtggccctcgattatcgtcaaattgaattacgtgtccttgcccatctttctggcgatgagaacctcatccgcgtgtttcaggaaggcaaagacattcacactcaaacggcaagctggatgtttggattaagcgctgaagcgatcgatcctttgatgcgtcgtgcagcgaagaagatcaatttcggtgttctctacggtatgagtgcctttcgtttgtcgcaggaattaggcattccctatgaagaagctcaggcgttcattcagaaatactttcaaagctatcccaaagttaaagcatggatcgagaagactctccgtgaaggccgcacacgtggttacgtagagaccttatttggacgtcgccgctatgttcccgatttaaacgctcgcgtgaaaggcaagcgtgaagccgccgaacgcatggcgttcaacatgcctgtacagggcacggcagctgacctcatgaaacttgcaatggtgcgcctttttccacaattgcgtgaagttggtgcccgcatgctcttgcaggtccacgatgaactcttgttagaagcgccaaaagagcgtgcggaagaggtggcagccctcgcgaaagaagttatggaaggcgtgtggcccttagcggtgcctcttgaagtcgaagttggtattggcgaggattggctggctgccaaagga

SEQ ID NO: 4258 - protein, 841 aa, synthetic construct
  REGION 1..841: note = Variant of DNA polymerase I from Thermus sp. strain 2.9
MHHHHHHGGSGVLPVFEHKGRVLLVDGHHLAYRNFFALKGLTTSLGEPVQGVYGFAKSLLKALKEDGDVVIVVFDAKAPSFRHEAYEAYKAGRAPTPEDFPRQLALMKELVDLLGLERLEVPGFEADDVLATLAKKAEREGYEVQILTADRDLFQLLSPRISVLHPEGHRITPEWLWEKYGLRPEQWVDFRALAGDPSDNIPGVKGIGEKTALKLLKEWGSLENLLKNLDQVKPESVREKILAHLEDLELSRELSRVRTDLPLEVDFGRRREPDWEGLKAFLERLEFGSLLHEFGLLESPLLAEEAPWPPPEGAFLGYRLSRPEPMWAELLALAASAQGRVYRAEDPHGALRGLFEVRGLLAKDLAVVALREGLDLPPTDDPMLLAYLLDPSNTTPEGVARRYGGEWTEDAAKRALLAERLHANLLGRLQGEERLLWLYEEVEKPLSVVLAHMEATGVKLDVAYLENLSLEVAAHMRRLEEEVVRLAGRSFRLNSRDQLERVLFDELGLPPIGKTEKTGKRSTSAAVLEALREVHPIVDKILQYRELAKLKGTYIDRLPALVHPKTGRLHTRFNQTATATGRLSSSDPNLQNIPVRTPLGQKIRRAFVAEEGWRLVALDYRQIELRVLAHLSGDENLIRVFQEGKDIHTQTASWMFGLSAEAIDPLMRRAAKKINFGVLYGMSAFRLSQELGIPYEEAQAFIQKYFQSYPKVKAWIEKTLREGRTRGYVETLFGRRRYVPDLNARVKGKREAAERMAFNMPVQGTAADLMKLAMVRLFPQLREVGARMLLQVHDELLLEAPKERAEEVAALAKEVMEGVWPLAVPLEVEVGIGEDWLAAKG

SEQ ID NO: 4259 - DNA, 2523 bp, synthetic construct
  misc_feature 1..2523: note = Variant of DNA polymerase I from Thermus sp. strain 2.9
  source 1..2523: mol_type = other DNA
atgcaccatcatcatcatcatggcggtagcggcgtgttaccggtgttcgagcctaaaggtcgcgtgcttctggttgatggccatcatctcgcgtatcgtaacttctttgccctgaaaggattaaccaccagcctgggcgagccggtacagggtgtctacggctttgcaaagtcgctcctgaaagctctgaaagaagacggtgatgtggtgattgttgtctttgatgcgaaagcgccaagttttcgccacgaagcgtacgaagcttacaaagccgggcgtgctccaacgccggaagactttcctcgccaattgtttcttatgaaggaattagtggatttgcttggcctcgaacgcttggaagttcccggtttcgaggcagacgacgtattagcgactctcgcaaagaaagccgaacgtgagggctatgaagtccagatcttgacagcagatcgcgatcttttccagcttttatctccgcgcatctcggtgttacacccggaagggcatcgtatcaccccggaatggctctgggagaaatatggtttgcgtcccgaacaatgggtggattttcgcgccttagcaggcgatccgagcgacaatattccgggagttaaaggtatcggcgagaagacggcgctcaagctccttaaagaatgggggtcgttggagaacttgcttaagaatttagatcaggtcaaaccagagtcagtgcgtgagaagattcttgctcacctcgaagacctcaaattaagccgcgaattgtcccgtgtacgcaccgatttgccgctcgaagttgatttcggtcgccgccgcgaacctgactgggagggtcttaaagcgtttttagagcgtcttgaatttggttcgctcttgcatgaattcggccttttagaaagcccgttactggccgaagaagcaccttggccaccgcccgagggcgcgtttttaggttaccgtttgacccgcccggaaccgatgtgggccgaattactggctcttgcagcgtctgcccagggacgtgtgtatcgcgcggaagaccctcatggtgcgctccgcggcctcttcgaagtccgtggactccttgccaaagacttagctgttgttgcattgcgcgaaggtcttgatttacctccgactgatgatccaatgcttcttgcgtacctcttggacccgtcaaacacgacgcccgaaggcgtagcccgtcgttacggcggcgagtggaccgaagatgcagcgaaacgcgcgttattggccgaacgtttgcacgccaatttattaggacgtttgcaaggcgagaagcgtctcctctggctttacgaagaagtggagaaaccattgagtcgtgtgctcgctcatatggaagctaccggtgtcaaattagacgtggcgtatttggagaatctcagccttgaagttgctgcccacatgcgccgcttggaggaagaagtattccgtttagcaggccgttcctttcgccttaactctcgcgatcagttagaacgtgtgttgttcgatgaacttggtctccctcctatcggcaagacagagaagaccggtaaacgtagcacttcagcggcggttttagaagctcttcgcgaagtccatcccattgtggacaagatcttgcagtaccgcgaactcgcgaaattgaaaggcacctatattgaccgtcttccggcattagtccacccgaaaacgggacgcctccatacccgcttcaaccaaacagccacggcgaccggtcgtttgtcctcctctgatccaaaccttcagaatattccagtacgtaccccattgggccagaagatccgccgtgcgtttgtagctgaggagggttggcgtttagtggccctcgattatcgtcaaattgaattacgtgtccttgcccatctttctggcgatgagaacctcatccgcgtgtttcaagaaggcaaagacattcacactcaaacggcaagctggatgtttggattatcagctgaagcgatcgatcctttgatgcgtcgtgcagcgaagaccatcaatttcggtgttctctacggtatgagtgcctttcgtttgtcgcaggaattaggcattccctatgaagaagctcaggcgttcattcagaaatactttcaaagctatcccaaagttaaagcatggatcgagaagactctccgtgaaggccgcacacgtggttacgtagagaccttatttggacgtcgccgctatgttcccgatttaaacggccgcgtgaaaggcaagcgtgaagccgccgaacgcatggcgttcaacatgcctgtacagggcacggcagctgacctcatgaaacttgcaatggtgcgcctttttccacaattgcgtgaagttggtgcccgcatgctcttgcaggtccacgatgaactcttgttagaagcgccaaaagagcgtgcggaagaggtggcagccctcgcgaaagaagttatggaaggcgtgtggcccttagcggtgcctcttgaagtcgaagttggtattggcgaggattggctggctgccaaagga

SEQ ID NO: 4260 - protein, 841 aa, synthetic construct
  REGION 1..841: note = Variant of DNA polymerase I from Thermus sp. strain 2.9
MHHHHHHGGSGVLPVFEPKGRVLLVDGHHLAYRNFFALKGLTTSLGEPVQGVYGFAKSLLKALKEDGDVVIVVFDAKAPSFRHEAYEAYKAGRAPTPEDFPRQLFLMKELVDLLGLERLEVPGFEADDVLATLAKKAEREGYEVQILTADRDLFQLLSPRISVLHPEGHRITPEWLWEKYGLRPEQWVDFRALAGDPSDNIPGVKGIGEKTALKLLKEWGSLENLLKNLDQVKPESVREKILAHLEDLKLSRELSRVRTDLPLEVDFGRRREPDWEGLKAFLERLEFGSLLHEFGLLESPLLAEEAPWPPPEGAFLGYRLTRPEPMWAELLALAASAQGRVYRAEDPHGALRGLFEVRGLLAKDLAVVALREGLDLPPTDDPMLLAYLLDPSNTTPEGVARRYGGEWTEDAAKRALLAERLHANLLGRLQGEKRLLWLYEEVEKPLSRVLAHMEATGVKLDVAYLENLSLEVAAHMRRLEEEVFRLAGRSFRLNSRDQLERVLFDELGLPPIGKTEKTGKRSTSAAVLEALREVHPIVDKILQYRELAKLKGTYIDRLPALVHPKTGRLHTRFNQTATATGRLSSSDPNLQNIPVRTPLGQKIRRAFVAEEGWRLVALDYRQIELRVLAHLSGDENLIRVFQEGKDIHTQTASWMFGLSAEAIDPLMRRAAKTINFGVLYGMSAFRLSQELGIPYEEAQAFIQKYFQSYPKVKAWIEKTLREGRTRGYVETLFGRRRYVPDLNGRVKGKREAAERMAFNMPVQGTAADLMKLAMVRLFPQLREVGARMLLQVHDELLLEAPKERAEEVAALAKEVMEGVWPLAVPLEVEVGIGEDWLAAKG

SEQ ID NO: 4261 - DNA, 2523 bp, synthetic construct
  misc_feature 1..2523: note = Variant of DNA polymerase I from Thermus sp. strain 2.9
  source 1..2523: mol_type = other DNA
atgcaccatcatcatcatcatggcggtagcggcgtgttaccggtgttcgagcctaaaggtcgcgtgcttctggttgatggccatcatctcgcgtatcgtaacttctttgccctgaaaggattaaccaccagcctgggcgagccggtacagggtgtctacggctttgcaaagtcgctcctgaaagctctgaaagaagacggtgatgtggtgattgttgtctttgatgcgaaagcgccaagttttcgccacgaagcgtacgaagcttacaaagccgggcgtgctccaacgccggaagactttcctcgccaattggcgcttatgaaggaattagtggatttgcttggcctcgaacgcttggaagttcccggtttcgaggcagacgacgtattagcgactctcgcaaagaaagccgaacgtgagggctatgaagtccagatcttgacagcagatcgcgatcttttccagcttttatctccgcgcatctcggtgttacacccggaagggcatcgtatcaccccggaatggctctgggagaaatatggtttgcgtcccgaacaatgggtggattttcgcgccttagcaggcgatccgagcgacaatattccgggagttaaaggtatcggcgagaagacggcgctcaagctccttaaagaatgggggtcgttggagaacttgcttaagaatttagatcaggtcaaaccagagtcagtgcgtgagaagattcttgctcacctcgaagacctcaaattaagccgcgaattgtcccgtgtacgcaccgatttgccgctcgaagttgatttcggtcgccgccgcgaacctgactgggagggtcttaaagcgtttttagagcgtcttgaatttggttcgctcttgcatgaattcggccttttagaaagcccgttactggccgaagaagcaccttggccaccgcccgagggcgcgtttttaggttaccgtttgagtcgcccggaaccgatgtgggccgaattactggctcttgcagcgtctgcccagggacgtgtgtatcgcgcggaagaccctcatggtgcgctccgcggcctcttcgaagtccgtggactccttgccaaagacttagctgttgttgcattgcgcgaaggtcttgatttacctccgactgatgatccaatgcttcttgcgtacctcttggacccgtcaaacacgacgcccgaaggcgtagcccgtcgttacggcggcgagtggaccgaagatgcagcgaaacgcgcgttattggccgaacgtttgcacgccaatttattaggacgtttgcaaggcgaggaacgtctcctctggctttacgaagaagtggagaaaccattgagtcgcgtgctcgcgcatatggaagctaccggtgtcaaattagacgtggcgtatttggagaatctcagccttgaagttgctgcccacatgcgccgcttggaggaagaagtattccgtttagcaggccgttcctttcgccttaactctcgcgatcagttagaacgtgtgttgttcgatgaacttggtctccctcctatcggcaagacagagaagaccggtaaacgtagcacttcagcggcggttttagaagctcttcgcgaagtccatcccattgtggacaagatcttgcagtaccgcgaactcgcgaaattgaaaggcacctatattgaccgtcttccggcattagtccacccgaaaacgggacgcctccatacccgcttcaaccaaacagccacggcgaccggtcgtttgtcctcctctgatccaaaccttcagaatattccagtacgtaccccattgggccagaagatccgccgtgcgtttgtagctgaggagggttggcgtttagtggccctcgattatcgtcaaattgaattacgtgtccttgcccatctttctggcgatgagaacctcatccgcgtgtttcaggaaggcaaagacattcacactcaaacggcaagctggatgtttggattatcagctgaagcgatcgatcctttgatgcgtcgtgcagcgaagaccatcaatttcggtgttctctacggtatgagtgcctttcgtttgtcgcaggaattaggcattccctatgaagaagctcaggcgttcattcagaaatactttcaaagctatcccaaagttaaagcatggatcgagaagactctccgtgaaggccgcacacgtggttacgtagagaccttatttggacgtcgccgctatgttcccgatttaaacgctcgcgtgaaaggcaagcgtgaagccgccgaacgcatggcgttcaacatgcctgtacagggcacggcagctgacctcatgaaacttgcaatggtgcgcctttttccacaattgcgtgaagttggtgcccgcatgctcttgcaggtccacgatgaactcttgttagaagcgccaaaagagcgtgcggaagaggtggcagccctcgcgaaagaagttatggaaggcagttggcccttagcggtgcctcttgaagtcgaagttggtattggcgaggattggctggctgccaaagga

SEQ ID NO: 4262 - protein, 841 aa, synthetic construct
  REGION 1..841: note = Variant of DNA polymerase I from Thermus sp. strain 2.9
MHHHHHHGGSGVLPVFEPKGRVLLVDGHHLAYRNFFALKGLTTSLGEPVQGVYGFAKSLLKALKEDGDVVIVVFDAKAPSFRHEAYEAYKAGRAPTPEDFPRQLALMKELVDLLGLERLEVPGFEADDVLATLAKKAEREGYEVQILTADRDLFQLLSPRISVLHPEGHRITPEWLWEKYGLRPEQWVDFRALAGDPSDNIPGVKGIGEKTALKLLKEWGSLENLLKNLDQVKPESVREKILAHLEDLKLSRELSRVRTDLPLEVDFGRRREPDWEGLKAFLERLEFGSLLHEFGLLESPLLAEEAPWPPPEGAFLGYRLSRPEPMWAELLALAASAQGRVYRAEDPHGALRGLFEVRGLLAKDLAVVALREGLDLPPTDDPMLLAYLLDPSNTTPEGVARRYGGEWTEDAAKRALLAERLHANLLGRLQGEERLLWLYEEVEKPLSRVLAHMEATGVKLDVAYLENLSLEVAAHMRRLEEEVFRLAGRSFRLNSRDQLERVLFDELGLPPIGKTEKTGKRSTSAAVLEALREVHPIVDKILQYRELAKLKGTYIDRLPALVHPKTGRLHTRFNQTATATGRLSSSDPNLQNIPVRTPLGQKIRRAFVAEEGWRLVALDYRQIELRVLAHLSGDENLIRVFQEGKDIHTQTASWMFGLSAEAIDPLMRRAAKTINFGVLYGMSAFRLSQELGIPYEEAQAFIQKYFQSYPKVKAWIEKTLREGRTRGYVETLFGRRRYVPDLNARVKGKREAAERMAFNMPVQGTAADLMKLAMVRLFPQLREVGARMLLQVHDELLLEAPKERAEEVAALAKEVMEGSWPLAVPLEVEVGIGEDWLAAKG

SEQ ID NO: 4263 - DNA, 2523 bp, synthetic construct
  misc_feature 1..2523: note = Variant of DNA polymerase I from Thermus sp. strain 2.9
  source 1..2523: mol_type = other DNA
atgcaccatcatcatcatcatggcggtagcggcgtgttaccggtgttcgagcctaaaggtcgcgtgcttctggttgatggccatcatctcgcgtatcgtaacttctttgccctgaaaggattaaccaccagcctgggcgagccggtacagggtgtctacggctttgcaaagtcgctcctgaaagctctgaaagaagacggtgatgtggtgattgttgtctttgatgcgaaagcgccaagttttcgccacgaagcgtacgaagcttacaaagccgggcgtgctccaacgccggaagactttcctcgccaattggcgcttatgaaggaattagtggatttgcttggcctcgaacgcttggaagttcccggtttcgaggcagacgacgtattagcgactctcgcaaagaaagccgaacgtgagggctatgaagtccagatcttgacagcagatcgcgatcttttccagcttttatctccgcgcatctcggtgttacacccggaagggcatcgtatcaccccggaatggctctgggagaaatatggtttgcgtcccgaacaatgggtggattttcgcgccttagcaggcgatccgagcgacaatattccgggagttaaaggtatcggcgagaagacggcgctcaagctccttaaagaatgggggtcgttggagaacttgcttaagaatttagatcaggtcaaaccagagtcagtgcgtgagaagattcttgctcacctcgaagacctcaaattaagccgcgaattgtcccgtgtacgcaccgatttgccgctcgaagttgatttcggtcgccgccgcgaacctgactgggagggtcttaaagcgtttttagagcgtcttgaatttggttcgctcttgcatgaattcggccttttagaaagcccgttactggccgaagaagcaccttggccaccgcccgagggcgcgtttttaggttaccgtttgagtcgcccggaaccgatgtgggccgaattactggctcttgcagcgtctgcccagggacgtgtgtatcgcgcggaagaccctcatggtgcgctccgcggcctcttcgaagtccgtggactccttgccaaagacttagctgttgttgcattgcgcgaaggtcttgatttacctccgactgatgatccaatgcttcttgcgtacctcttggacccgtcaaacacgacgcccgaaggcgtagcccgtcgttacggcggcgagtggaccgaagatgcagcgaaacgcgcgttattggccgaacgtttgcacgccaatttattaggacgtttgcaaggcgaggaacgtctcctctggctttacgaagaagtggagaaaccattgagtcgcgtgctcgcgcatatggaagctaccggtgtcaaattagacgtggcgtatttggagaatctcagccttgaagttgctgcccacatgcgccgcttggaggaagaagtattccgtttagcaggccgttcctttcgccttaactctcgcgatcagttagaacgtgtgttgttcgatgaacttggtctccctcctatcggcaagacagagaagaccggtaaacgtagcacttcagcggcggttttagaagctcttcgcgaagtccatcccattgtggacaagatcttgcagtaccgcgaactcgcgaaattgaaaggcacctatattgaccgtcttccggcattagtccacccgaaaacgggacgcctccatacccgcttcaaccaaacagccacggcgaccggtcgtttgtcctcctctgatccaaaccttcagaatattccagtacgtaccccattgggccagaagatccgccgtgcgtttgtagctgaggagggttggcgtttagtggccctcgattatcgtcaaattgaattacgtgtccttgcccatctttctggcgatgagaacctcatccgcgtgtttcaggaaggcaaagacattcacactcaaacggcaagctggatgtttggattatcagctgaagcgatcgatcctttgatgcgtcgtgcagcgaagaccatcaatttcggtgttctctacggtatgagtgcctttcgtttgtcgcaggaattaggcattccctatgaagaagctcaggcgttcattcagaaatactttcaaagctatcccaaagttaaagcatggatcgagaagactctccgtgaaggccgcacacgtggttacgtagagaccttatttggacgtcgccgctatgttcccgatttaaacgctcgcgtgaaaggcaagcgtgaagccagggaacgcatggcgttcaacatgcctgtacagggcacggcagctgacctcatgaaacttgcaatggtgcgcctttttccacaattgcgtgaagttggtgcccgcatgctcttgcaggtccacgatgaactcttgttagaagcgccaaaagagcgtgcggaagaggtggcagccctcgcgaaagaagttatggaaggcgtgtggcccttagcggtgcctcttgaagtcgaagttggtattggcgaggattggctggctgccaaagga

SEQ ID NO: 4264 - protein, 841 aa, synthetic construct
  REGION 1..841: note = Variant of DNA polymerase I from Thermus sp. strain 2.9
MHHHHHHGGSGVLPVFEPKGRVLLVDGHHLAYRNFFALKGLTTSLGEPVQGVYGFAKSLLKALKEDGDVVIVVFDAKAPSFRHEAYEAYKAGRAPTPEDFPRQLALMKELVDLLGLERLEVPGFEADDVLATLAKKAEREGYEVQILTADRDLFQLLSPRISVLHPEGHRITPEWLWEKYGLRPEQWVDFRALAGDPSDNIPGVKGIGEKTALKLLKEWGSLENLLKNLDQVKPESVREKILAHLEDLKLSRELSRVRTDLPLEVDFGRRREPDWEGLKAFLERLEFGSLLHEFGLLESPLLAEEAPWPPPEGAFLGYRLSRPEPMWAELLALAASAQGRVYRAEDPHGALRGLFEVRGLLAKDLAVVALREGLDLPPTDDPMLLAYLLDPSNTTPEGVARRYGGEWTEDAAKRALLAERLHANLLGRLQGEERLLWLYEEVEKPLSRVLAHMEATGVKLDVAYLENLSLEVAAHMRRLEEEVFRLAGRSFRLNSRDQLERVLFDELGLPPIGKTEKTGKRSTSAAVLEALREVHPIVDKILQYRELAKLKGTYIDRLPALVHPKTGRLHTRFNQTATATGRLSSSDPNLQNIPVRTPLGQKIRRAFVAEEGWRLVALDYRQIELRVLAHLSGDENLIRVFQEGKDIHTQTASWMFGLSAEAIDPLMRRAAKTINFGVLYGMSAFRLSQELGIPYEEAQAFIQKYFQSYPKVKAWIEKTLREGRTRGYVETLFGRRRYVPDLNARVKGKREARERMAFNMPVQGTAADLMKLAMVRLFPQLREVGARMLLQVHDELLLEAPKERAEEVAALAKEVMEGVWPLAVPLEVEVGIGEDWLAAKG

SEQ ID NO: 4265 - DNA, 2523 bp, synthetic construct
  misc_feature 1..2523: note = Variant of DNA polymerase I from Thermus sp. strain 2.9
  source 1..2523: mol_type = other DNA
atgcaccatcatcatcatcatggcggtagcggcgtgttaccggtgttcgagcctaaaggtcgcgtgcttctggttgatggccatcatctcgcgtatcgtaacttctttgccctgaaaggattaaccaccagcctgggcgagccggtacagggtgtctacggctttgcaaagtcgctcctgaaagctctgaaagaagacggtgatgtggtgattgttgtctttgatgcgaaagcgccaagttttcgccacgaagcgtacgaagcttacaaagccgggcgtgctccaacgccggaagactttcctcgccaattggcgcttatgaaggaattagtggatttgcttggcctcgaacgcttggaagttcccggtttcgaggcagacgacgtattagcgactctcgcaaagaaagccgaacgcgagggctatgaagtccagatcttgacagcagatcgcgatcttttccagcttttatctccgcgcatctcggtgttacacccggaagggcatcgtatcaccccggaatggctctgggagaaatatggtttgcgtcccgaacaatgggtggattttcgcgccttagcaggcgatccaagcgacaatattccgggagttaaaggtatcggcgagaagacggcgctcaagctccttaaagaatgggggtcgttggagaacttgcttaagaatttagatcaggtcaaaccagagtcagtgcgtgagaagattcttgctcacctcgaagacctcaaattaagccgcgaattgtcccgtgtacgcaccgatttgccgctcgaagttgatttcggtcgccgccgcgaacctgactgggagggtcttaaagcgtttttagagcgtcttgaatttggttcgctcctgcatgaattcggccttttagaaagcccgttagtggccgaagaagcaccttggccaccgcccgagggcgcgtttttaggttaccgtttgagtcgcccggaaccgatgtgggccgaattactggctcttgcagcgtctgcccagggacgtgtgtatcgcgcggaagaccctcatggtgcgctccgcggcctcttcgaagtccgtggactccttgccaaaaacttagctgttgttgcattgcgcgaaggtcttgatttccctccgactgatgatccaaagcttcttgggtacctcttggacccctcaaacacgacgcccgaaggggtagcccggcgttacggcggcgagtgggccgaagatgcagcgaaacgcgcgttattggccgaacgtttgcacgcgaatttattaggacgtttgcaaggcgaggaacgtctcctctggctttacgaagaagtggagaaaccattgagtcgcgtgctcgggcatatggaagctaccggtgtcaaattagacgtggcgtatttggagaatctcagccttgaagttgctgcccacatgcgccgcttggaggaagaagtagttcgtttagcaggccgttcctttcgccttaactctcgcgatcagttagaacgcgtgttgttcgatgaacttggtctccctcctatcggcaagacagagaagaccggtaaacgtagcacttcagcggcggttttagaagctcttcgcgaagtccatcccattgtggacaagatcttgcagtaccgcgaactcgcgaaattgaaaggcacctatattgaccgtcttccggcattagtccacccgaaaacgggacgcctccatacccgcttcaaccaaacagccacggcgaccggtcgtttgtcctcctctgatccaaaccttcagaatattccagtacgtaccaaattgggccagaagatccgccgtgcgtttgtagctgaggagggttggcgtttagtggccctcgattatcgtcaaattgaattacgtgtccttgcccatctttctggcgatgagaacctcatccgcgtgtttcaggaaggcaaagacattcacactcaaacggcaagctggatgtttggattatcagctgaagcgatcgatcctttgatgcgtcgtgcagcgaagacgatcaatttcggtgttctctacggtatgagtgcctttcgtttgtcgcaggaattaggcattccctatgaagaagctcaggcgttcattcagaaatactttcaaagctatcccaaagttaaagcatggatcgagaagactctccgtgaaggccgcacgcgtggttacgtagagaccttatttggacgtcgccgctatgttcccgatttaaacgctcgcgtgaaaggcaagcgtgaagccgccgaacgcatggcgttcaacatgcctgtacagggcacggcagctgacctcatgaaacttgcaatggtgcgcctttttccacaattgcgtgaagttggtgcccgcatgctcttgcaggtccacgatgaactcttgttagaagcgccaaaagagcgtgcggaagaggtggcagccctcgcgaaagaagttatggaaggcgtgtggcccttagcggtgcctcttgaagtcgaagttggtattggcgaggattggctggctgccaaagga

SEQ ID NO: 4266 - protein, 841 aa, synthetic construct
  REGION 1..841: note = Variant of DNA polymerase I from Thermus sp. strain 2.9
MHHHHHHGGSGVLPVFEPKGRVLLVDGHHLAYRNFFALKGLTTSLGEPVQGVYGFAKSLLKALKEDGDVVIVVFDAKAPSFRHEAYEAYKAGRAPTPEDFPRQLALMKELVDLLGLERLEVPGFEADDVLATLAKKAEREGYEVQILTADRDLFQLLSPRISVLHPEGHRITPEWLWEKYGLRPEQWVDFRALAGDPSDNIPGVKGIGEKTALKLLKEWGSLENLLKNLDQVKPESVREKILAHLEDLKLSRELSRVRTDLPLEVDFGRRREPDWEGLKAFLERLEFGSLLHEFGLLESPLVAEEAPWPPPEGAFLGYRLSRPEPMWAELLALAASAQGRVYRAEDPHGALRGLFEVRGLLAKNLAVVALREGLDFPPTDDPKLLGYLLDPSNTTPEGVARRYGGEWAEDAAKRALLAERLHANLLGRLQGEERLLWLYEEVEKPLSRVLGHMEATGVKLDVAYLENLSLEVAAHMRRLEEEVVRLAGRSFRLNSRDQLERVLFDELGLPPIGKTEKTGKRSTSAAVLEALREVHPIVDKILQYRELAKLKGTYIDRLPALVHPKTGRLHTRFNQTATATGRLSSSDPNLQNIPVRTKLGQKIRRAFVAEEGWRLVALDYRQIELRVLAHLSGDENLIRVFQEGKDIHTQTASWMFGLSAEAIDPLMRRAAKTINFGVLYGMSAFRLSQELGIPYEEAQAFIQKYFQSYPKVKAWIEKTLREGRTRGYVETLFGRRRYVPDLNARVKGKREAAERMAFNMPVQGTAADLMKLAMVRLFPQLREVGARMLLQVHDELLLEAPKERAEEVAALAKEVMEGVWPLAVPLEVEVGIGEDWLAAKG

SEQ ID NO: 4267 - DNA, 2523 bp, synthetic construct
  misc_feature 1..2523: note = Variant of DNA polymerase I from Thermus sp. strain 2.9
  source 1..2523: mol_type = other DNA
atgcaccatcatcatcatcatggcggtagcggcgtgttaccggtgttcgagcctaaaggtcgcgtgcttctggttgatggccatcatctcgcgtatcgtaacttctttgccctgaaaggattaaccaccagcctgggcgagccggtacagggtgtctacggctttgcaaagtcgctcctgaaagctctgaaagaagacggtgatgtggtgattgttgtctttgatgcgaaagcgccaagttttcgccacgaagcgtacgaagcttacaaagccgggcgtgctccaacgccggaagactttcctcgccaattggcgcttatgaaggaattagtggatttgcttggcctcgaacgcttggaagttcccggtttcgaggcagacgacgtattagcgactctcgcaaagaaagccgaacgtgagggctatgaagtccagatcttgacagcagatcgcgatcttttccagcttttatctccgcgcatctcggtgttacacccggaagggcatcgtatcaccccggaatggctctgggagaaatatggtttgcgtcccgaacaatgggtggattttcgcgccttagcaggcgatccgagcgacaatattccgggagttaaaggtatcggcgagaagacggcgctcaagctccttaaagaatgggggtcgttggagaacttgcttaagaatttagatcaggtcaaaccagagtcagtgcgtgagaagattcttgctcacctcgaagacctcaaattaagccgcgaattgtcccgtgtacgcaccgatttgccgctcgaagttgatttcggtcgccgccgcgaacctgactgggagggtcttaaagcgtttttagagcgtcttgaatttggttcgctcttgcatgaattcggccttttagaaagcccgttactggccgaagaagcaccttggccaccgcccgagggcgcgtttttaggttaccgtttgagtcgcccggaaccgatgtgggccgaattactggctcttgcagcgtctgcccagggacgtgtgtatcgcgcggaagaccctcatggtgcgctccgcggcctcttcgaagtccgtggactccttgccaaagacttagctgttgttgcattgcgcgaaggtcttgatttacctccgactgatgatccaatgcttcttgcgtacctcttggacccgtcaaacacgacgcccgaaggcgtagcccgtcgttacggcggcgagtggaccgaagatgcagcgaaacgcgcgttattggccgaacgtttgcacgccaatttattaggacgtttgcaaggcgaggaacgtctcctctggctttacgaagaagtggagaaaccattgagtcgcgtgctcgcgcatatggaagctaccggtgtcaaattagacgtggcgtatttggagaatctcagccttgaagttgctgcccacatgcgccgcttggaggaagaagtattccgtttagcaggccgttcctttcgccttaactctcgcgatcagttagaacgtgtgttgttcgatgaacttggtctccctcctatcggcaagacagagaagaccggtaaacgtagcacttcagcggcggttttagaagctcttcgcgaagtccatcccattgtggacaagatcttgcagtaccgcgaactcgcgaaattgaaaggcacctatattgaccgtcttccggcattagtccacccgaaaacgggacgcctccatacccgcttcaaccaaacagccacggcgaccggtcgtttgtcctcctctgatccaaaccttcagaatattccagtacgtaccccattgggccagaagatccgccgtgcgtttgtagctgaggagggttggcgtttagtggccctcgattatcgtcaaattgaattacgtgtccttgcccatctttctggcgatgagaacctcatccgcgtgtttcaggtgggcaaagacattcacactcaaacggcaagctggatgtttggattatcagctgaagcgatcgatcctttgatgcgtcgtgcagcgaagaccatcaatttcggtgttctctacggtatgagtgcctttcgtttgtcgcaggaattaggcattccctatgaagaagctcaggcgttcattcagaaatactttcaaagctatcccaaagttaaagcatggatcgagaagactctccgtgaaggccgcacacgtggttacgtagagaccttatttggacgtcgccgctatgttcccgatttaaacgctcgcgtgaaaggcaagcgtgaagccgccgaacgcatggcgttcaacatgcctgtacagggcacggcagctgacctcatgaaacttgcaatggtgcgcctttttccacaattgcgtgaagttggtgcccgcatgctcttgcaggtccacgatgaactcttgttagaagcgccaaaagagcgtgcggaagaggtggcagccctcgcgaaagaagttatggaaggcgtgtggcccttagcggtgcctcttgaagtcgaagttggtattggcgaggattggctggctgccaaagga

SEQ ID NO: 4268 - protein, 841 aa, synthetic construct
  REGION 1..841: note = Variant of DNA polymerase I from Thermus sp. strain 2.9
MHHHHHHGGSGVLPVFEPKGRVLLVDGHHLAYRNFFALKGLTTSLGEPVQGVYGFAKSLLKALKEDGDVVIVVFDAKAPSFRHEAYEAYKAGRAPTPEDFPRQLALMKELVDLLGLERLEVPGFEADDVLATLAKKAEREGYEVQILTADRDLFQLLSPRISVLHPEGHRITPEWLWEKYGLRPEQWVDFRALAGDPSDNIPGVKGIGEKTALKLLKEWGSLENLLKNLDQVKPESVREKILAHLEDLKLSRELSRVRTDLPLEVDFGRRREPDWEGLKAFLERLEFGSLLHEFGLLESPLLAEEAPWPPPEGAFLGYRLSRPEPMWAELLALAASAQGRVYRAEDPHGALRGLFEVRGLLAKDLAVVALREGLDLPPTDDPMLLAYLLDPSNTTPEGVARRYGGEWTEDAAKRALLAERLHANLLGRLQGEERLLWLYEEVEKPLSRVLAHMEATGVKLDVAYLENLSLEVAAHMRRLEEEVFRLAGRSFRLNSRDQLERVLFDELGLPPIGKTEKTGKRSTSAAVLEALREVHPIVDKILQYRELAKLKGTYIDRLPALVHPKTGRLHTRFNQTATATGRLSSSDPNLQNIPVRTPLGQKIRRAFVAEEGWRLVALDYRQIELRVLAHLSGDENLIRVFQVGKDIHTQTASWMFGLSAEAIDPLMRRAAKTINFGVLYGMSAFRLSQELGIPYEEAQAFIQKYFQSYPKVKAWIEKTLREGRTRGYVETLFGRRRYVPDLNARVKGKREAAERMAFNMPVQGTAADLMKLAMVRLFPQLREVGARMLLQVHDELLLEAPKERAEEVAALAKEVMEGVWPLAVPLEVEVGIGEDWLAAKG

SEQ ID NO: 4269 - DNA, 2523 bp, synthetic construct
  misc_feature 1..2523: note = Variant of DNA polymerase I from Thermus sp. strain 2.9
  source 1..2523: mol_type = other DNA
atgcaccatcatcatcatcatggcggtagcggcgtgttaccggtgttcgagcctaaaggtcgcgtgcttctggttgatggccatcatctcgcgtatcgtaacttctttgccctgaaaggattaaccaccagcctgggcgagccggtacagggtgtctacggctttgcaaagtcgctcctgaaagctctgaaagaagacggtgatgtggtgattgttgtctttgatgcgaaagcgccaagttttcgccacgaagcgtacgaagcttacaaagccgggcgtgctccaacgccggaagactttcctcgccaattggcgcttatgaaggaattagtggatttgcttggcctcgaacgcttggaagttcccggtttcgaggcagacgacgtattagcgactctcgcaaagaaagccgaacgtgagggctatgaagtccagatcttgacagcagatcgcgatcttttccagcttttatctccgcgcatctcggtgttacacccggaagggcatcgtatcaccccggaatggctctgggagaaatatggtttgcgtcccgaacaatgggtggattttcgcgccttagcaggcgatccgagcgacaatattccgggagttaaaggtatcggcgagaagacggcgctcaagctccttaaagaatgggggtcgttggagaacttgcttaagaatttagatcaggtcaaaccagagtcagtgcgtgagaagattcttgctcacctcgaagacctcaaattaagccgcgaattgtcccgtgtacgcaccgatttgccgctcgaagttgatttcggtcgccgccgcgaacctgactgggagggtcttaaagcgtttttagagcgtcttgaatttggttcgctcttgcatgaattcggccttttagaaagcccgttactggccgaagaagcaccttggccaccgcccgagggcgcgtttttaggttaccgtttgagtcgcccggaaccgatgtgggccgaattactggctcttgcagcgtctgcccagggacgtgtgtatcgcgcggaagaccctcatggtgcgctccgcggcctcttcgaagtccgtggactccttgccaaagacttagctgttgttgcattgcgcgaaggtcttgatttacctccgactgatgatccaatgcttcttgcgtacctcttggacccgtcaaacacgacgcccgaaggcgtagcccgtcgttacggcggcgagtggaccgaagatgcagcgaaacgcgcgttattggccgaacgtttgcacgccaatttattaggacgtttgcaaggcgaggaacgtctcctctggctttacgaagaagtggagaaaccattgagtcgcgtgctcgcgcatatggaagctaccggtgtcaaattagacgtggcgtatttggagaatctcagccttgaagttgctgcccacatgcgccgcttggaggaagaagtattccgtttagcaggccgttcctttcgccttaactctcgcgatcagttagaacgtgtgttgttcgatgaacttggtctccctcctatcggcaagacagagaagaccggtaaacgtagcacttcagcggcggttttagaagctcttcgcgaagtccatcccattgtggacaagatcttgcagtaccgcgaactcgcgaaattgaaaggcacctatattgaccgtcttccggcattagtccacccgaaaacgggacgcctccatacccgcttcaaccaaacagccacggcgaccggtcgtttgtcctcctctgatccaaaccttcagaatattccagtacgtaccccattgggccagaagatccgccgtgcgtttgtagctgaggagggttggcgtttagtggccctcgattatcgtcaaattgaattacgtgtccttgcccatctttctggcgatgagaacctcatccgcgtgtttcagtatggcaaagacattcacactcaaacggcaagctggatgtttggattatcagctgaagcgatcgatcctttgatgcgtcgtgcagcgaagaccatcaatttcggtgttctctacggtatgagtgcctttcgtttgtcgcaggaattaggcattccctatgaagaagctcaggcgttcattcagaaatactttcaaagctatcccaaagttaaagcatggatcgagaagactctccgtgaaggccgcacacgtggttacgtagagaccttatttggacgtcgccgctatgttcccgatttaaacgctcgcgtgaaaggcaagcgtgaagccgccgaacgcatggcgttcaacatgcctgtacagggcacggcagctgacctcatgaaacttgcaatggtgcgcctttttccacaattgcgtgaagttggtgcccgcatgctcttgcaggtccacgatgaactcttgttagaagcgccaaaagagcgtgcggaagaggtggcagccctcgcgaaagaagttatggaaggcgtgtggcccttagcggtgcctcttgaagtcgaagttggtattggcgaggattggctggctgccaaagga

SEQ ID NO: 4270 - protein, 841 aa, synthetic construct
  REGION 1..841: note = Variant of DNA polymerase I from Thermus sp. strain 2.9
MHHHHHHGGSGVLPVFEPKGRVLLVDGHHLAYRNFFALKGLTTSLGEPVQGVYGFAKSLLKALKEDGDVVIVVFDAKAPSFRHEAYEAYKAGRAPTPEDFPRQLALMKELVDLLGLERLEVPGFEADDVLATLAKKAEREGYEVQILTADRDLFQLLSPRISVLHPEGHRITPEWLWEKYGLRPEQWVDFRALAGDPSDNIPGVKGIGEKTALKLLKEWGSLENLLKNLDQVKPESVREKILAHLEDLKLSRELSRVRTDLPLEVDFGRRREPDWEGLKAFLERLEFGSLLHEFGLLESPLLAEEAPWPPPEGAFLGYRLSRPEPMWAELLALAASAQGRVYRAEDPHGALRGLFEVRGLLAKDLAVVALREGLDLPPTDDPMLLAYLLDPSNTTPEGVARRYGGEWTEDAAKRALLAERLHANLLGRLQGEERLLWLYEEVEKPLSRVLAHMEATGVKLDVAYLENLSLEVAAHMRRLEEEVFRLAGRSFRLNSRDQLERVLFDELGLPPIGKTEKTGKRSTSAAVLEALREVHPIVDKILQYRELAKLKGTYIDRLPALVHPKTGRLHTRFNQTATATGRLSSSDPNLQNIPVRTPLGQKIRRAFVAEEGWRLVALDYRQIELRVLAHLSGDENLIRVFQYGKDIHTQTASWMFGLSAEAIDPLMRRAAKTINFGVLYGMSAFRLSQELGIPYEEAQAFIQKYFQSYPKVKAWIEKTLREGRTRGYVETLFGRRRYVPDLNARVKGKREAAERMAFNMPVQGTAADLMKLAMVRLFPQLREVGARMLLQVHDELLLEAPKERAEEVAALAKEVMEGVWPLAVPLEVEVGIGEDWLAAKG

SEQ ID NO: 4271 - DNA, 2523 bp, synthetic construct
  misc_feature 1..2523: note = Variant of DNA polymerase I from Thermus sp. strain 2.9
  source 1..2523: mol_type = other DNA
atgcaccatcatcatcatcatggcggtagcggcgtgttaccggtgttcgagcctaaaggtcgcgtgcttctggttgatggccatcatctcgcgtatcgtaacttctttgccctgaaaggattaaccaccagcctgggcgagccggtacagggtgtctacggctttgcaaagtcgctcctgaaagctctgaaagaagacggtgatgtggtgattgttgtctttgatgcgaaagcgccaagttttcgccacgaagcgtacgaagcttacaaagccgggcgtgctccaacgccggaagactttcctcgccaattggcgcttatgaaggaattagtggatttgcttggcctcgaacgcttggaagttcccggtttcgaggcagacgacgtattagcgactctcgcaaagaaagccgaacgtgagggctatgaagtccagatcttgacagcagatcgcgatcttttccagcttttatctccgcgcatctcggtgttacacccggaagggcatcgtatcaccccggaatggctctgggagaaatatggtttgcgtcccgaacaatgggtggattttcgcgccttagcaggcgatccgagcgacaatattccgggagttaaaggtatcggcgagaagacggcgctcaagctccttaaagaatgggggtcgttggagaacttgcttaagaatttagatcaggtcaaaccagagtcagtgcgtgagaagattcttgctcacctcgaagacctcaaattaagccgcgaattgtcccgtgtacgcaccgatttgccgctcgaagttgatttcggtcgccgccgcgaacctgactgggagggtcttaaagcgtttttagagcgtcttgaatttggttcgctcttgcatgaattcggccttttagaaagcccgttactggccgaagaagcaccttggccaccgcccgagggcgcgtttttaggttaccgtttgagtcgcccggaaccgatgtgggccgaattactggctcttgcagcgtctgcccagggacgtgtgtatcgcgcggaagaccctcatggtgcgctccgcggcctcttcgaagtccgtggactccttgccaaagacttagctgttgttgcattgcgcgaaggtcttgatttacctccgactgatgatccaatgcttcttgcgtacctcttggacccgtcaaacacgacgcccgaaggcgtagcccgtcgttacggcggcgagtggaccgaagatgcagcgaaacgcgcgttattggccgaacgtttgcacgccaatttattaggacgtttgcaaggcgaggaacgtctcctctggctttacgaagaagtggagaaaccattgagtcgcgtgctcgcgcatatggaagctaccggtgtcaaattagacgtggcgtatttggagaatctcagccttgaagttgctgcccacatgcgccgcttggaggaagaagtattccgtttagcaggccgttcctttcgccttaactctcgcgatcagttagaacgtgtgttgttcgatgaacttggtctccctcctatcggcaagacagagaagaccggtaaacgtagcacttcagcggcggttttagaagctcttcgcgaagtccatcccattgtggacaagatcttgcagtaccgcgaactcgcgaaattgaaaggcacctatattgaccgtcttccggcattagtccacccgaaaacgggacgcctccatacccgcttcaaccaaacagccacggcgaccggtcgtttgtcctcctctgatccaaaccttcagaatattccagtacgtaccccattgggccagaagatccgccgtgcgtttgtagctgaggagggttggcgtttagtggccctcgattatcgtcaaattgaattacgtgtccttgcccatctttctggcgatgagaacctcatccgcgtgtttcaggaaggcaaagacattcacactcaaacggcaagctggatgtttggattatcagctgaagcgatcgatcctttgatgcgtcgtgcagcgaagaccatcaatttcggtgttctctacggtatgagtgcctttcgtttgtcgcaggaattaggcattccctatgaagaagctcaggcgttcattcagaaatactttcaacgctatcccaaagttaaagcatggatcgagaagactctccgtgaaggccgcacacgtggttacgtagagaccttatttggacgtcgccgctatgttcccgatttaaacgctcgcgtgaaaggcaagcgtgaagccgccgaacgcatggcgttcaacatgcctgtacagggcacggcagctgacctcatgaaacttgcaatggtgcgcctttttccacaattgcgtgaagttggtgcccgcatgctcttgcaggtccacgatgaactcttgttagaagcgccaaaagagcgtgcggaagaggtggcagccctcgcgaaagaagttatggaaggcgtgtggcccttagcggtgcctcttgaagtcgaagttggtattggcgaggattggctggctgccaaagga

SEQ ID NO: 4272 - protein, 841 aa, synthetic construct
  REGION 1..841: note = Variant of DNA polymerase I from Thermus sp. strain 2.9
MHHHHHHGGSGVLPVFEPKGRVLLVDGHHLAYRNFFALKGLTTSLGEPVQGVYGFAKSLLKALKEDGDVVIVVFDAKAPSFRHEAYEAYKAGRAPTPEDFPRQLALMKELVDLLGLERLEVPGFEADDVLATLAKKAEREGYEVQILTADRDLFQLLSPRISVLHPEGHRITPEWLWEKYGLRPEQWVDFRALAGDPSDNIPGVKGIGEKTALKLLKEWGSLENLLKNLDQVKPESVREKILAHLEDLKLSRELSRVRTDLPLEVDFGRRREPDWEGLKAFLERLEFGSLLHEFGLLESPLLAEEAPWPPPEGAFLGYRLSRPEPMWAELLALAASAQGRVYRAEDPHGALRGLFEVRGLLAKDLAVVALREGLDLPPTDDPMLLAYLLDPSNTTPEGVARRYGGEWTEDAAKRALLAERLHANLLGRLQGEERLLWLYEEVEKPLSRVLAHMEATGVKLDVAYLENLSLEVAAHMRRLEEEVFRLAGRSFRLNSRDQLERVLFDELGLPPIGKTEKTGKRSTSAAVLEALREVHPIVDKILQYRELAKLKGTYIDRLPALVHPKTGRLHTRFNQTATATGRLSSSDPNLQNIPVRTPLGQKIRRAFVAEEGWRLVALDYRQIELRVLAHLSGDENLIRVFQEGKDIHTQTASWMFGLSAEAIDPLMRRAAKTINFGVLYGMSAFRLSQELGIPYEEAQAFIQKYFQRYPKVKAWIEKTLREGRTRGYVETLFGRRRYVPDLNARVKGKREAAERMAFNMPVQGTAADLMKLAMVRLFPQLREVGARMLLQVHDELLLEAPKERAEEVAALAKEVMEGVWPLAVPLEVEVGIGEDWLAAKG

SEQ ID NO: 4273 - DNA, 2523 bp, synthetic construct
  misc_feature 1..2523: note = Variant of DNA polymerase I from Thermus sp. strain 2.9
  source 1..2523: mol_type = other DNA
atgcaccatcatcatcatcatggcggtagcggcgtgttaccggtgttcgagcctaaaggtcgcgtgcttctggttgatggccatcatctcgcgtatcgtaacttctttgccctgaaaggattaaccaccagcctgggcgagccggtacagggtgtctacggctttgcaaagtcgctcctgaaagctctgaaagaagacggtgatgtggtgattgttgtctttgatgcgaaagcgccaagttttcgccacgaagcgtacgaagcttacaaagccgggcgtgctccaacgccggaagactttcctcgccaattggcgcttatgaaggaattagtggatttgcttggcctcgaacgcttggaagttcccggtttcgaggcagacgacgtattagcgactctcgcaaagaaagccgaacgtgagggctatgaagtccagatcttgacagcagatcgcgatcttttccagcttttatctccgcgcatctcggtgttacacccggaagggcatcgtatcaccccggaatggctctgggagaaatatggtttgcgtcccgaacaatgggtggattttcgcgccttagcaggcgatccgagcgacaatattccgggagttaaaggtatcggcgagaagacggcgctcaagctccttaaagaatgggggtcgttggagaacttgcttaagaatttagatcaggtcaaaccagagtcagtgcgtgagaagattcttgctcacctcgaagacctcaaattaagccgcgaattgtcccgtgtacgcaccgatttgccgctcgaagttgatttcggtcgccgccgcgaacctgactgggagggtcttaaagcgtttttagagcgtcttgaatttggttcgctcttgcatgaattcggccttttagaaagcccgttactggccgaagaagcaccttggccaccgcccgagggcgcgtttttaggttaccgtttgagtcgcccggaaccgatgtgggccgaattactggctcttgcagcgtctgcccagggacgtgtgtatcgcgcggaagaccctcatggtgcgctccgcggcctcttcgaagtccgtggactccttgccaaagacttagctgttgttgcattgcgcgaaggtcttgatttacctccgactgatgatccaatgcttcttgcgtacctcttggacccgtcaaacacgacgcccgaaggcgtagcccgtcgttacggcggcgagtggaccgaagatgcagcgaaacgcgcgttattggccgaacgtttgcacgccaatttattaggacgtttgcaaggcgaggaacgtctcctctggctttacgaagaagtggagaaaccattgagtcgcgtgctcgcgcatatggaagctaccggtgtcaaattagacgtggcgcatttggagaatctcagccttgaagttgctgcccacatgcgccgcttggaggaagaagtattccgtttagcaggccgttcctttcgccttaactctcgcgatcagttagaacgtgtgttgttcgatgaacttggtctccctcctatcggcaagacagagaagaccggtaaacgtagcacttcagcggcggttttagaagctcttcgcgaagtccatcccattgtggacaagatcttgcagtaccgcgaactcgcgaaattgaaaggcacctatattgaccgtcttccggcattagtccacccgaaaacgggacgcctccatacccgcttcaaccaaacagccacggcgaccggtcgtttgtcctcctctgatccaaaccttcagaatattccagtacgtaccccattgggccagaagatccgccgtgcgtttgtagctgaggagggttggcgtttagtggccctcgattatcgtcaaattgaattacgtgtccttgcccatctttctggcgatgagaacctcatccgcgtgtttcaggaaggcaaagacattcacactcaaacggcaagctggatgtttggattatcagctgaagcgatcgatcctttgatgcgtcgtgcagcgaagaccatcaatttcggtgttctctacggtatgagtgcctttcgtttgtcgcaggaattaggcattccctatgaagaagctcaggcgttcattcagaaatactttcaaagctatcccaaagttaaagcatggatcgagaagactctccgtgaaggccgcacacgtggttacgtagagaccttatttggacgtcgccgctatgttcccgatttaaacgctcgcgtgaaaggcaagcgtgaagccgccgaacgcatggcgttcaacatgcctgtacagggcacggcagctgacctcatgaaacttgcaatggtgcgcctttttccacaattgcgtgaagttggtgcccgcatgctcttgcaggtccacgatgaactcttgttagaagcgccaaaagagcgtgcggaagaggtggcagccctcgcgaaagaagttatggaaggcgtgtggcccttagcggtgcctcttgaagtcgaagttggtattggcgaggattggctggctgccaaagga

SEQ ID NO: 4274 - protein, 841 aa, synthetic construct
  REGION 1..841: note = Variant of DNA polymerase I from Thermus sp. strain 2.9
MHHHHHHGGSGVLPVFEPKGRVLLVDGHHLAYRNFFALKGLTTSLGEPVQGVYGFAKSLLKALKEDGDVVIVVFDAKAPSFRHEAYEAYKAGRAPTPEDFPRQLALMKELVDLLGLERLEVPGFEADDVLATLAKKAEREGYEVQILTADRDLFQLLSPRISVLHPEGHRITPEWLWEKYGLRPEQWVDFRALAGDPSDNIPGVKGIGEKTALKLLKEWGSLENLLKNLDQVKPESVREKILAHLEDLKLSRELSRVRTDLPLEVDFGRRREPDWEGLKAFLERLEFGSLLHEFGLLESPLLAEEAPWPPPEGAFLGYRLSRPEPMWAELLALAASAQGRVYRAEDPHGALRGLFEVRGLLAKDLAVVALREGLDLPPTDDPMLLAYLLDPSNTTPEGVARRYGGEWTEDAAKRALLAERLHANLLGRLQGEERLLWLYEEVEKPLSRVLAHMEATGVKLDVAHLENLSLEVAAHMRRLEEEVFRLAGRSFRLNSRDQLERVLFDELGLPPIGKTEKTGKRSTSAAVLEALREVHPIVDKILQYRELAKLKGTYIDRLPALVHPKTGRLHTRFNQTATATGRLSSSDPNLQNIPVRTPLGQKIRRAFVAEEGWRLVALDYRQIELRVLAHLSGDENLIRVFQEGKDIHTQTASWMFGLSAEAIDPLMRRAAKTINFGVLYGMSAFRLSQELGIPYEEAQAFIQKYFQSYPKVKAWIEKTLREGRTRGYVETLFGRRRYVPDLNARVKGKREAAERMAFNMPVQGTAADLMKLAMVRLFPQLREVGARMLLQVHDELLLEAPKERAEEVAALAKEVMEGVWPLAVPLEVEVGIGEDWLAAKG

SEQ ID NO: 4275 - DNA, 2523 bp, synthetic construct
  misc_feature 1..2523: note = Variant of DNA polymerase I from Thermus sp. strain 2.9
  source 1..2523: mol_type = other DNA
atgcaccatcatcatcatcatggcggtagcggcgtgttaccggtgttcgagcctaaaggtcgcgtgcttctggttgatggccatcatctcgcgtatcgtaacttctttgccctgaaaggattaaccaccagcctgggcgagccggtacagggtgtctacggctttgcaaagtcgctcctgaaagctctgaaagaagacggtgatgtggtgattgttgtctttgatgcgaaagcgccaagttttcgccacgaagcgtacgaagcttacaaagccgggcgtgctccaacgccggaagactttcctcgccaattggcgcttatgaaggaattagtggatttgcttggcctcgaacgcttggaagttcccggtttcgaggcagacgacgtattagcgactctcgcaaagaaagccgaacgtgagggctatgaagtccagatcttgacagcagatcgcgatcttttccagcttttatctccgcgcatctcggtgttacacccggaagggcatcgtatcaccccggaatggctctgggagaaatatggtttgcgtcccgaacaatgggtggattttcgcgccttagcaggcgatccgagcgacaatattccgggagttaaaggtatcggcgagaagacggcgctcaagctccttaaagaatgggggtcgttggagaacttgcttaagaatttagatcaggtcaaaccagagtcagtgcgtgagaagattcttgctcacctcgaagacctcaaattaagccgcgaattgtcccgtgtacgcaccgatttgccgctcgaagttgatttcggtcgccgccgcgaacctgactgggagggtcttaaagcgtttttagagcgtcttgaatttggttcgctcttgcatgaattcggccttttagaaagcccgttactggccgaagaagcaccttggccaccgcccgagggcgcgtttttaggttaccgtttgagtcgcccggaaccgatgtgggccgaattactggctcttgcagcgtctgcccagggacgtgtgtatcgcgcggaagaccctcatggtgcgctccgcggcctcttcgaagtccgtggactccttgccaaagacttagctgttgttgcattgcgcgaaggtcttgatttacctccgactgatgatccaatgcttcttgcgtacctcttggacccgtcaaacacgacgcccgaaggcgtagcccgtcgttacggcggcgagtggaccgaagatgcagcgaaacgcgcgttattggccgaacgtttgcacgccaatttattaggacgtttgcaaggcgaggaacgtctcctctggctttacgaagaagtggagaaaccattgagtcgcgtgctcgcgcatatggaagctaccggtgtcaaattagacgtggcgtatttggagaatctcagccttgaagttgctgcccacatgcgccgcttggaggaagaagtattccgtttagcaggccgttcctttcgccttaactctcgcgatcagttagaacgtgtgttgttcgatgaacttggtctccctcctatcggcaagacagagaagaccggtaaacgtagcacttcagcggcggttttagaagctcttcgcgaagtccatcccattgtggacaagatcttgcagtaccgcgaactcgcgaaattgaaaggcacctatattgaccgtcttccggcattagtccacccgaaaacgggacgcctccatacccgcttcaaccaaacagccacggcgaccggtcgtttgtcctcctctgatccaaaccttcagaatattccagtacgtaccccattgggccagaagatccgccgtgcgtttgtagctgaggagggttggcgtttagtggccctcgattatcgtcaaattgaattacgtgtccttgcccatctttctggcgatgagaacctcatccgcgtgtttcaggaaggcaaagacattcacactcaaacggcaagctggatgtttggattatcagctgaagcgatcgatcctttgatgcgtcgtgcagcgaagaccatcaatttcggtgttctctacggtatgagtgcctttcgtttgtcgcaggaattaggcattccctatgaagaagctcaggcgttcattcagaaatactttcaaagctatcccgtggttaaagcatggatcgagaagactctccgtgaaggccgcacacgtggttacgtagagaccttatttggacgtcgccgctatgttcccgatttaaacgctcgcgtgaaaggcaagcgtgaagccgccgaacgcatggcgttcaacatgcctgtacagggcacggcagctgacctcatgaaacttgcaatggtgcgcctttttccacaattgcgtgaagttggtgcccgcatgctcttgcaggtccacgatgaactcttgttagaagcgccaaaagagcgtgcggaagaggtggcagccctcgcgaaagaagttatggaaggcgtgtggcccttagcggtgcctcttgaagtcgaagttggtattggcgaggattggctggctgccaaagga

SEQ ID NO: 4276 - protein, 841 aa, synthetic construct
  REGION 1..841: note = Variant of DNA polymerase I from Thermus sp. strain 2.9
MHHHHHHGGSGVLPVFEPKGRVLLVDGHHLAYRNFFALKGLTTSLGEPVQGVYGFAKSLLKALKEDGDVVIVVFDAKAPSFRHEAYEAYKAGRAPTPEDFPRQLALMKELVDLLGLERLEVPGFEADDVLATLAKKAEREGYEVQILTADRDLFQLLSPRISVLHPEGHRITPEWLWEKYGLRPEQWVDFRALAGDPSDNIPGVKGIGEKTALKLLKEWGSLENLLKNLDQVKPESVREKILAHLEDLKLSRELSRVRTDLPLEVDFGRRREPDWEGLKAFLERLEFGSLLHEFGLLESPLLAEEAPWPPPEGAFLGYRLSRPEPMWAELLALAASAQGRVYRAEDPHGALRGLFEVRGLLAKDLAVVALREGLDLPPTDDPMLLAYLLDPSNTTPEGVARRYGGEWTEDAAKRALLAERLHANLLGRLQGEERLLWLYEEVEKPLSRVLAHMEATGVKLDVAYLENLSLEVAAHMRRLEEEVFRLAGRSFRLNSRDQLERVLFDELGLPPIGKTEKTGKRSTSAAVLEALREVHPIVDKILQYRELAKLKGTYIDRLPALVHPKTGRLHTRFNQTATATGRLSSSDPNLQNIPVRTPLGQKIRRAFVAEEGWRLVALDYRQIELRVLAHLSGDENLIRVFQEGKDIHTQTASWMFGLSAEAIDPLMRRAAKTINFGVLYGMSAFRLSQELGIPYEEAQAFIQKYFQSYPVVKAWIEKTLREGRTRGYVETLFGRRRYVPDLNARVKGKREAAERMAFNMPVQGTAADLMKLAMVRLFPQLREVGARMLLQVHDELLLEAPKERAEEVAALAKEVMEGVWPLAVPLEVEVGIGEDWLAAKG

SEQ ID NO: 4277 - DNA, 2523 bp, synthetic construct
  misc_feature 1..2523: note = Variant of DNA polymerase I from Thermus sp. strain 2.9
  source 1..2523: mol_type = other DNA
atgcaccatcatcatcatcatggcggtagcggcgtgttaccggtgttcgagcctaaaggtcgcgtgcttctggttgatggccatcatctcgcgtatcgtaacttctttgccctgaaaggattaaccaccagcctgggcgagccggtacagggtgtctacggctttgcaaagtcgctcctgaaagctctgaaagaagacggtgatgtggtgattgttgtctttgatgcgaaagcgccaagttttcgccacgaagcgtacgaagcttacaaagccgggcgtgctccaacgccggaagactttcctcgccaattggcgcttatgaaggaattagtggatttgcttggcctcgaacgcttggaagttcccggtttcgaggcagacgacgtattagcgactctcgcaaagaaagccgaacgtgagggctatgaagtccagatcttgacagcagatcgcgatcttttccagcttttatctccgcgcatctcggtgttacacccggaagggcatcgtatcaccccggaatggctctgggagaaatatggtttgcgtcccgaacaatgggtggattttcgcgccttagcaggcgatccgagcgacaatattccgggagttaaaggtatcggcgagaagacggcgctcaagctccttaaagaatgggggtcgttggagaacttgcttaagaatttagatcaggtcaaaccagagtcagtgcgtgagaagattcttgctcacatcgaagacctcaaattaagccgcgaattgtcccgtgtacgcaccgatttgccgctcgaagttgatttcggtcgccgccgcgaacctgactgggagggtcttaaagcgtttttagagcgtcttgaatttggttcgctcttgcatgaattcggccttttagaaagcccgttactggccgaagaagcaccttggccaccgcccgagggcgcgtttttaggttaccgtttgagtcgcccggaaccgatgtgggccgaattactggctcttgcagcgtctgcccagggacgtgtgtatcgcgcggaagaccctcatggtgcgctccgcggcctcttcgaagtccgtggactccttgccaaagacttagctgttgttgcattgcgcgaaggtcttgatttacctccgactgatgatccaatgcttcttgcgtacctcttggacccgtcaaacacgacgcccgaaggcgtagcccgtcgttacggcggcgagtggaccgaagatgcagcgaaacgcgcgttattggccgaacgtttgcacttgaatttattaggacgtttgcaaggcgaggaacgtctcctctggctttacgaagaagtggagaaaccattgagtcgcgtgctcgcgcatatggaagctaccggtgtcaaattagacgtggcgtatttggagaatctcagccttgaagttgctgcccacatgcgccgcttggaggaagaagtattccgtttagcaggccgttcctttcgccttaactctcgcgatcagttagaacgtgtgttgttcgatgaacttggtctccctcctatcggcaagacagagaagaccggtaaacgtagcacttcagcggcggttttagaagctcttcgcgaagtccatcccattgtggacaagatcttgcagtaccgcgaactcgcgaaattgaaaggcacctatattgaccgtcttccggcattagtccacccgaaaacgggacgcctccatacccgcttcaaccaaacagccacggcgaccggtcgtttgtcctcctctgatccaaaccttcagaatattccagtacgtaccccattgggccagaagatccgccgtgcgtttgtagctgaggagggttggcgtttagtggccctcgattatcgtcaaattgaattacgtgtccttgcccatctttctggcgatgagaacctcatccgcgtgtttcaggaaggcaaagacattcacactcaaacggcaagctggatgtttggattatcagctgaagcgatcgatcctttgatgcgtcgtgcagcgaagaccatcaatttcggtgttctctacggtatgagtgcctttcgtttgtcgcaggaattaggcattccctatgaagaagctcaggcgttcattcagaaatactttcaaagctatcccaaagttaaagcatggatcgagaagactctccgtgaaggccgcacacgtggttacgtagagaccttatttggacgtcgccgctatgttcccgatttaaacgctcgcgtgaaaggcaagcgtgaagccgccgaacgcatggcgttcaacatgcctgtacagggcacggcagctgacctcatgaaacttgcaatggtgcgcctttttccacaattgcgtgaagttggtgcccgcatgctcttgcaggtccacgatgaactcttgttagaagcgccaaaagagcgtgcggaagaggtggcagccctcgcgaaagaagttatggaaggcgtgtggcccttagcggtgcctcttgaagtcgaagttggtattggcgaggattggctggctgccaaagga

SEQ ID NO: 4278 - protein, 841 aa, synthetic construct
  REGION 1..841: note = Variant of DNA polymerase I from Thermus sp. strain 2.9
MHHHHHHGGSGVLPVFEPKGRVLLVDGHHLAYRNFFALKGLTTSLGEPVQGVYGFAKSLLKALKEDGDVVIVVFDAKAPSFRHEAYEAYKAGRAPTPEDFPRQLALMKELVDLLGLERLEVPGFEADDVLATLAKKAEREGYEVQILTADRDLFQLLSPRISVLHPEGHRITPEWLWEKYGLRPEQWVDFRALAGDPSDNIPGVKGIGEKTALKLLKEWGSLENLLKNLDQVKPESVREKILAHIEDLKLSRELSRVRTDLPLEVDFGRRREPDWEGLKAFLERLEFGSLLHEFGLLESPLLAEEAPWPPPEGAFLGYRLSRPEPMWAELLALAASAQGRVYRAEDPHGALRGLFEVRGLLAKDLAVVALREGLDLPPTDDPMLLAYLLDPSNTTPEGVARRYGGEWTEDAAKRALLAERLHLNLLGRLQGEERLLWLYEEVEKPLSRVLAHMEATGVKLDVAYLENLSLEVAAHMRRLEEEVFRLAGRSFRLNSRDQLERVLFDELGLPPIGKTEKTGKRSTSAAVLEALREVHPIVDKILQYRELAKLKGTYIDRLPALVHPKTGRLHTRFNQTATATGRLSSSDPNLQNIPVRTPLGQKIRRAFVAEEGWRLVALDYRQIELRVLAHLSGDENLIRVFQEGKDIHTQTASWMFGLSAEAIDPLMRRAAKTINFGVLYGMSAFRLSQELGIPYEEAQAFIQKYFQSYPKVKAWIEKTLREGRTRGYVETLFGRRRYVPDLNARVKGKREAAERMAFNMPVQGTAADLMKLAMVRLFPQLREVGARMLLQVHDELLLEAPKERAEEVAALAKEVMEGVWPLAVPLEVEVGIGEDWLAAKG

SEQ ID NO: 4279 - DNA, 2523 bp, synthetic construct
  misc_feature 1..2523: note = Variant of DNA polymerase I from Thermus sp. strain 2.9
  source 1..2523: mol_type = other DNA
atgcaccatcatcatcatcatggcggtagcggcgtgttaccggtgttcgagcctaaaggtcgcgtgcttctggttgatggccatcatctcgcgtatcgtaacttctttgccctgaaaggattaaccaccagcctgggcgagccggtacagggtgtctacggctttgcaaagtcgctcctgaaagctctgaaagaagacggtgatgtggtgattgttgtctttgatgcgaaagcgccaagttttcgccacgaagcgtacgaagcttacaaagccgggcgtgctccaacgccggaagactttcctcgccaattggcgcttatgaaggaattagtggatttgcttggcctcgaacgcttggaagttcccggtttcgaggcagacgacgtattagcgactctcgcaaagaaagccgaacgtgagggctatgaagtccagatcttgacagcagatcgcgatcttttccagcttttatctccgcgcatctcggtgttacacccggaagggcatcgtatcaccccggaatggctctgggagaaatatggtttgcgtcccgaacaatgggtggattttcgcgccttagcaggcgatccgagcgacaatattccgggagttaaaggtatcggcgagaagacggcgctcaagctccttaaagaatgggggtcgttggagaacttgcttaagaatttagatcaggtcaaaccagagtcagtgcgtgagaagattcttgctcacctcgaagacctcaaattaagccgcgaattgtcccgtgtacgcaccgatttgccgctcgaagttgatttcggtcgccgccgcgaacctgactgggagggtcttaaagcgtttttagagcgtcttgaatttggttcgctcttgcatgaattcggccttttagaaagcccgttactggccgaagaagcaccttggccaccgcccgagggcgcgtttttaggttaccgtttgagtcgcccggaaccgatgtgggccgaattactggctcttgcagcgtctgcccagggacgtgtgtatcgcgcggaagaccctcatggtgcgctccgcggcctcttcgaagtccgtggactccttgccaaagacttagctgttgttgcattgcgcgaaggtcttgatttacctccgactgatgatccaatgcttcttgcgtacctcttggacccgtcaaacacgacgcccgaaggcgtagcccgtcgttacggcggcgagtggaccgaagatgcagcgaaacgcgcgttattggccgaacgtttgcacgccaatttattaggacgtttgcaaggcgaggaacgtctcctctggctttacgaagaagtggagaaaccattgagtcgcgtgctcgcgcatatggaagctaccggtgtcaaattagacgtggcgtatttggagaatctcagccttgaagttgctgcccacatgcgccgcttggaggaagaagtattccgtttagcaggccgttcctttcgccttaactctcgcgatcagttagaacgtgtgttgttcgatgaacttggtctccctcctatcggcaagacagagaagaccggtaaacgtagcacttcagcggcggttttagaagctcttcgcgaagtccatcccattgtggacaagatcttgcagtaccgcgaactcgcgaaattgaaaggcacctatattgaccgtcttccggcattagtccacccgaaaacgggacgcctccataccaatttcaaccaaacagccacggcgaccggtcgtttgtcctcctctgatccaaaccttcagaatattccagtacgtaccccattgggccagaagatccgccgtgcgtttgtagctgaggagggttggcgtttagtggccctcgattatcgtcaaattgaattacgtgtccttgcccatctttctggcgatgagaacctcatccgcgtgtttcaggaaggcaaagacattcacactcaaacggcaagctggatgtttggattatcagctgaagcgatcgatcctttgatgcgtcgtgcagcgaagaccatcaatttcggtgttctctacggtatgagtgcctttcgtttgtcgcaggaattaggcattccctatgaagaagctcaggcgttcattcagaaatactttcaaagctatcccaaagttaaagcatggatcgagaagactctccgtgaaggccgcacacgtggttacgtagagaccttatttggacgtcgccgctatgttcccgatttaaacgctcgcgtgaaaggcaagcgtgaagccgccgaacgcatggcgttcaacatgcctgtacagggcacggcagctgacctcatgaaacttgcaatggtgcgcctttttccacaattgcgtgaagttggtgcccgcatgctcttgcaggtccacgatgaactcttgttagaagcgccaaaagagcgtgcggaagaggtggcagccctcgcgaaagaagttatggaaggcgtgtggcccttagcggtgcctcttgaagtcgaagttggtattggcgaggattggctggctgccaaagga

SEQ ID NO: 4280 - protein, 841 aa, synthetic construct
  REGION 1..841: note = Variant of DNA polymerase I from Thermus sp. strain 2.9
MHHHHHHGGSGVLPVFEPKGRVLLVDGHHLAYRNFFALKGLTTSLGEPVQGVYGFAKSLLKALKEDGDVVIVVFDAKAPSFRHEAYEAYKAGRAPTPEDFPRQLALMKELVDLLGLERLEVPGFEADDVLATLAKKAEREGYEVQILTADRDLFQLLSPRISVLHPEGHRITPEWLWEKYGLRPEQWVDFRALAGDPSDNIPGVKGIGEKTALKLLKEWGSLENLLKNLDQVKPESVREKILAHLEDLKLSRELSRVRTDLPLEVDFGRRREPDWEGLKAFLERLEFGSLLHEFGLLESPLLAEEAPWPPPEGAFLGYRLSRPEPMWAELLALAASAQGRVYRAEDPHGALRGLFEVRGLLAKDLAVVALREGLDLPPTDDPMLLAYLLDPSNTTPEGVARRYGGEWTEDAAKRALLAERLHANLLGRLQGEERLLWLYEEVEKPLSRVLAHMEATGVKLDVAYLENLSLEVAAHMRRLEEEVFRLAGRSFRLNSRDQLERVLFDELGLPPIGKTEKTGKRSTSAAVLEALREVHPIVDKILQYRELAKLKGTYIDRLPALVHPKTGRLHTNFNQTATATGRLSSSDPNLQNIPVRTPLGQKIRRAFVAEEGWRLVALDYRQIELRVLAHLSGDENLIRVFQEGKDIHTQTASWMFGLSAEAIDPLMRRAAKTINFGVLYGMSAFRLSQELGIPYEEAQAFIQKYFQSYPKVKAWIEKTLREGRTRGYVETLFGRRRYVPDLNARVKGKREAAERMAFNMPVQGTAADLMKLAMVRLFPQLREVGARMLLQVHDELLLEAPKERAEEVAALAKEVMEGVWPLAVPLEVEVGIGEDWLAAKG

SEQ ID NO: 4281 - DNA, 2523 bp, synthetic construct
  misc_feature 1..2523: note = Variant of DNA polymerase I from Thermus sp. strain 2.9
  source 1..2523: mol_type = other DNA
atgcaccatcatcatcatcatggcggtagcggcgtgttaccggtgttcgagcctaaaggtcgcgtgcttctggttgatggccatcatctcgcgtatcgtaacttctttgccctgaaaggattaaccaccagcctgggcgagccggtacagggtgtctacggctttgcaaagtcgctcctgaaagctctgaaagaagacggtgatgtggtgattgttgtctttgatgcgaaagcgccaagttttcgccacgaagcgtacgaagcttacaaagccgggcgtgctccaacgccggaagactttcctcgccaattggcgcttatgaaggaattagtggatttgcttggcctcgaacgcttggaagttcccggtttcgaggcagacgacgtattagcgactctcgcaaagaaagccgaacgtgagggctatgaagtccagatcttgacagcagatcgcgatcttttccagcttttatctccgcgcatctcggtgttacacccggaagggcatcgtatcaccccggaatggctctgggagaaatatggtttgcgtcccgaacaatgggtggattttcgcgccttagcaggcgatccgagcgacaatattccgggagttaaaggtatcggcgagaagacggcgctcaagctccttaaagaatgggggtcgttggagaacttgcttaagaatttagatcaggtcaaaccagagtcagtgcgtgagaagattcttgctcacctcgaagacctcaaattaagccgcgaattgtcccgtgtacgcaccgatttgccgctcgaagttgatttcggtcgccgccgcgaacctgactgggagggtcttaaagcgtttttagagcgtcttgaatttggttcgctcttgcatgaattcggccttttagaaagcccgttactggccgaagaagcaccttggccaccgcccgagggcgcgtttttaggttaccgtttgagtcgcccggaaccgatgtgggccgaattactggctcttgcagcgtctgcccagggacgtgtgtatcgcgcggaagaccctcatggtgcgctccgcggcctcttcgaagtccgtggactccttgccaaagacttagctgttgttgcattgcgcgaaggtcttgatttacctccgactgatgatccaatgcttcttgcgtacctcttggacccgtcaaacacgacgcccgaaggcgtagcccgtcgttacggcggcgagtggaccgaagatgcagcgaaacgcgcgttattggccgaacgtttgcacgccaatttattaggacgtttgcaaggcgaggaacgtctcctctggctttacgaagaagtggagaaaccattgagtcgcgtgctcgcgcatatggaagctaccggtgtcaaattagacgtggcgtatttggagaatctcagccttgaagttgctgcccacatgcgccgcttggaggaagaagtattccgtttagcaggccgttcctttcgccttaactctcgcgatcagttagaacgtgtgttgttcgatgaacttggtctccctcctatcggcaagacagagaagaccggtaaacgtagcacttcagcggcggttttagaagctcttcgcgaagtccatcccattgtggacaagatcttgcagtaccgcgaactcgcgaaattgaaaggcacctatattgaccgtcttccggcattagtccacccgaaaacgggacgcctccatacccgcttcaaccaaacagccacggcgaccggtcgtttgtcctcctctgatccaaaccttcagaatattccagtacgtaccccattgggccagaagatccgccgtgcgtttgtagctgaggagggttggcgtttagtggccctcgattatcgtcaaattgaattacgtgtccttgcccatctttctggcgatgagaacctcatccgcgtgtttcaggaaggcaaagacattcacactcaaacggcaagctggatgtttggattatcagctgaagcgatcgatcctttgatgcgtcgtgcagcgaagaccatcaatttcggtgttctctacggtatgagtgcctttcgtttgtcgcaggaattaggcattccctatgaagaagctcaggcgttcattcagaaatactttcaaagctatcccaaagttaaagcatggatcgagaagactctccgtgaaggccgcacacgtggttacgtagagaccttatttggacgtcgccgctatgttcccgatttaaacgctcgcgtgaaaggcaagcgtgaagccgccgaacgcatggcgttcaacatgcctgtacagggcacggcagctgacctcatgaaacttgcaatggtgcgcctttttccacaattgcgtgaagttggtgcccgcatgctcttgcaggtccacgatgaactcttgttagaagggccaaaagagcgtgcggaagaggtggcagccctcgcgaaagaagttatggaaggcgtgtggcccttagcggtgcctcttgaagtcgaagttggtattggcgaggattggctggctgccaaagga

SEQ ID NO: 4282 - protein, 841 aa, synthetic construct
  REGION 1..841: note = Variant of DNA polymerase I from Thermus sp. strain 2.9
MHHHHHHGGSGVLPVFEPKGRVLLVDGHHLAYRNFFALKGLTTSLGEPVQGVYGFAKSLLKALKEDGDVVIVVFDAKAPSFRHEAYEAYKAGRAPTPEDFPRQLALMKELVDLLGLERLEVPGFEADDVLATLAKKAEREGYEVQILTADRDLFQLLSPRISVLHPEGHRITPEWLWEKYGLRPEQWVDFRALAGDPSDNIPGVKGIGEKTALKLLKEWGSLENLLKNLDQVKPESVREKILAHLEDLKLSRELSRVRTDLPLEVDFGRRREPDWEGLKAFLERLEFGSLLHEFGLLESPLLAEEAPWPPPEGAFLGYRLSRPEPMWAELLALAASAQGRVYRAEDPHGALRGLFEVRGLLAKDLAVVALREGLDLPPTDDPMLLAYLLDPSNTTPEGVARRYGGEWTEDAAKRALLAERLHANLLGRLQGEERLLWLYEEVEKPLSRVLAHMEATGVKLDVAYLENLSLEVAAHMRRLEEEVFRLAGRSFRLNSRDQLERVLFDELGLPPIGKTEKTGKRSTSAAVLEALREVHPIVDKILQYRELAKLKGTYIDRLPALVHPKTGRLHTRFNQTATATGRLSSSDPNLQNIPVRTPLGQKIRRAFVAEEGWRLVALDYRQIELRVLAHLSGDENLIRVFQEGKDIHTQTASWMFGLSAEAIDPLMRRAAKTINFGVLYGMSAFRLSQELGIPYEEAQAFIQKYFQSYPKVKAWIEKTLREGRTRGYVETLFGRRRYVPDLNARVKGKREAAERMAFNMPVQGTAADLMKLAMVRLFPQLREVGARMLLQVHDELLLEGPKERAEEVAALAKEVMEGVWPLAVPLEVEVGIGEDWLAAKG

SEQ ID NO: 4283 - DNA, 2523 bp, synthetic construct
  misc_feature 1..2523: note = Variant of DNA polymerase I from Thermus sp. strain 2.9
  source 1..2523: mol_type = other DNA
atgcaccatcatcatcatcatggcggtagcggcgtgttaccggtgttcgagcctaaaggtcgcgtgcttctggttgatggccatcatctcgcgtatcgtaacttctttgccctgaaaggattaaccaccagcctgggcgagccggtacagggtgtctacggctttgcaaagtcgctcctgaaagctctgaaagaagacggtgatgtggtgattgttgtctttgatgcgaaagcgccaagttttcgccacgaagcgtacgaagcttacaaagccgggcgtgctccaacgccggaagactttcctcgccaattggcgcttatgaaggaattagtggatttgcttggcctcgaacgcttggaagttcccggtttcgaggcagacgacgtattagcgactctcgcaaagaaagccgaacgtgagggctatgaagtccagatcttgacagcagatcgcgatcttttccagcttttatctccgcgcatctcggtgttacacccggaagggcatcgtatcaccccggaatggctctgggagaaatatggtttgcgtcccgaacaatgggtggattttcgcgccttagcaggcgatccgagcgacaatattccgggagttaaaggtatcggcgagaagacggcgctcaagctccttaaagaatgggggtcgttggagaacttgcttaagaatttagatcaggtcaaaccagagtcagtgcgtgagaagattcttgctcacctcgaagacctcaaattaagccgcgaattgtcccgtgtacgcaccgatttgccgctcgaagttgatttcggtcgccgccgcgaacctgactgggagggtcttaaagcgtttttagagcgtcttgaatttggttcgctcttgcatgaattcggccttttagaaagcccgttactggccgaagaagcaccttggccaccgcccgagggcgcgtttttaggttaccgtttgagtcgcccggaaccgatgtgggccgaattactggctcttgcagcgtctgcccagggacgtgtgtatcgcgcggaagaccctcatggtgcgctcagcggcctcttcgaagtccgtggactccttgccttggacttagctgttgttgcattgcgcgaaggtcttgatttacctccgactgatgatccaatgcttcttgcgtacctcttggacccgtcaaacacgacgcccgaaggcgtagcccgtcgttacggcggcgagtggaccgaagatgcagcgaaacgcgcgttattggccgaacgtttgcacgccaatttattaggacgtttgcaaggcgaggaacgtctcctctggctttacgaagaagtggagaaaccattgagtcgcgtgctcgcgcatatggaagctaccggtgtcaaattagacgtggcgtatttggagaatctcagccttgaagttgctgcccacatgcgccgcttggaggaagaagtattccgtttagcaggccgttcctttcgccttaactctcgcgatcagttagaacgtgtgttgttcgatgaacttggtctccctcctatcggcaagacagagaagaccggtaaacgtagcacttcagcggcggttttagaagctcttcgcgaagtccatcccattgtggacaagatcttgcagtaccgcgaactcgcgaaattgaaaggcacctatattgaccgtcttccggcattagtccacccgaaaacgggacgcctccatacccgcttcaaccaaacagccacggcgaccggtcgtttgtcctcctctgatccaaaccttcagaatattccagtacgtaccccattgggccagaagatccgccgtgcgtttgtagctgaggagggttggcgtttagtggccctcgattatcgtcaaattgaattacgtgtccttgcccatctttctggcgatgagaacctcatccgcgtgtttcaggaaggcaaagacattcacactcaaacggcaagctggatgtttggattatcagctgaagcgatcgatcctttgatgcgtcgtgcagcgaagaccatcaatttcggtgttctctacggtatgagtgcctttcgtttgtcgcaggaattaggcattccctatgaagaagctcaggcgttcattcagaaatactttcaaagctatcccaaagttaaagcatggatcgagaagactctccgtgaaggccgcacacgtggttacgtagagaccttatttggacgtcgccgctatgttcccgatttaaacgctcgcgtgaaaggcaagcgtgaagccgccgaacgcatggcgttcaacatgcctgtacagggcacggcagctgacctcatgaaacttgcaatggtgcgcctttttccacaattgcgtgaagttggtgcccgcatgctcttgcaggtccacgatgaactcttgttagaagcgccaaaagagcgtgcggaagaggtggcagccctcgcgaaagaagttatggaaggcgtgtggcccttagcggtgcctcttgaagtcgaagttggtattggcgaggattggctggctgccaaagga

SEQ ID NO: 4284 - protein, 841 aa, synthetic construct
  REGION 1..841: note = Variant of DNA polymerase I from Thermus sp. strain 2.9
MHHHHHHGGSGVLPVFEPKGRVLLVDGHHLAYRNFFALKGLTTSLGEPVQGVYGFAKSLLKALKEDGDVVIVVFDAKAPSFRHEAYEAYKAGRAPTPEDFPRQLALMKELVDLLGLERLEVPGFEADDVLATLAKKAEREGYEVQILTADRDLFQLLSPRISVLHPEGHRITPEWLWEKYGLRPEQWVDFRALAGDPSDNIPGVKGIGEKTALKLLKEWGSLENLLKNLDQVKPESVREKILAHLEDLKLSRELSRVRTDLPLEVDFGRRREPDWEGLKAFLERLEFGSLLHEFGLLESPLLAEEAPWPPPEGAFLGYRLSRPEPMWAELLALAASAQGRVYRAEDPHGALSGLFEVRGLLALDLAVVALREGLDLPPTDDPMLLAYLLDPSNTTPEGVARRYGGEWTEDAAKRALLAERLHANLLGRLQGEERLLWLYEEVEKPLSRVLAHMEATGVKLDVAYLENLSLEVAAHMRRLEEEVFRLAGRSFRLNSRDQLERVLFDELGLPPIGKTEKTGKRSTSAAVLEALREVHPIVDKILQYRELAKLKGTYIDRLPALVHPKTGRLHTRFNQTATATGRLSSSDPNLQNIPVRTPLGQKIRRAFVAEEGWRLVALDYRQIELRVLAHLSGDENLIRVFQEGKDIHTQTASWMFGLSAEAIDPLMRRAAKTINFGVLYGMSAFRLSQELGIPYEEAQAFIQKYFQSYPKVKAWIEKTLREGRTRGYVETLFGRRRYVPDLNARVKGKREAAERMAFNMPVQGTAADLMKLAMVRLFPQLREVGARMLLQVHDELLLEAPKERAEEVAALAKEVMEGVWPLAVPLEVEVGIGEDWLAAKG

SEQ ID NO: 4285 - DNA, 2523 bp, synthetic construct
  misc_feature 1..2523: note = Variant of DNA polymerase I from Thermus sp. strain 2.9
  source 1..2523: mol_type = other DNA
atgcaccatcatcatcatcatggcggtagcggcgtgttaccggtgttcgagcctaaaggtcgcgtgcttctggttgatggccatcatctcgcgtatcgtaacttctttgccctgaaaggattaaccaccagcctgggcgagccggtacagggtgtctacggctttgcaaagtcgctcctgaaagctctgaaagaagacggtgatgtggtgattgttgtctttgatgcgaaagcgccaagttttcgccacgaagcgtacgaagcttacaaagccgggcgtgctccaacgccggaagactttcctcgccaattggcgcttatgaaggaattagtggatttgcttggcctcgaacgcttggaagttcccggtttcgaggcagacgacgtattagcgactctcgcaaagaaagccgaacgtgagggctatgaagtccagatcttgacagcagatcgcgatcttttccagcttttatctccgcgcatctcggtgttacacccggaagggcatcgtatcaccccggaatggctctgggagaaatatggtttgcgtcccgaacaatgggtggattttcgcgccttagcaggcgatccgagcgacaatattccgggagttaaaggtatcggcgagaagacggcgctcaagctccttaaagaatgggggtcgttggagaacttgcttaagaatttagatcaggtcaaaccagagtcagtgcgtgagaagattcttgctcacctcgaagacctcaaattaagccgcgaattgtcccgtgtacgcaccgatttgccgctcgaagttgatttcggtcgccgccgcgaacctgactgggagggtcttaaagcggttttagagcgtcttgaatttggttcgctcttgcatgaattcggccttttagaaagcccgttactggccgaagaagcaccttggccaccgcccgagggcgcgtttttaggttaccgtttgagtcgcccggaaccgatgtgggccgaattactggctcttgcagcgtctgcccagggacgtgtgtatcgcgcggaagaccctcatggtgcgctccgcggcctcttcgaagtccgtggactccttgccaaagacttagctgttgttgcattgcgcgaaggtcttgatttacctccgactgatgatccaatgcttcttgcgtacctcttggacccgtcaaacacgacgcccgaaggcgtagcccgtcgttacggcggcgagtggaccgaagatgcagcgaaacgcgcgttattggccgaacgtttgcacgccaatttattaggacgtttgcaaggcgaggaacgtctcctctggctttacgaagaagtggagaaaccattgagtcgcgtgctcgcgcatatggaagctaccggtgtcaaattagacgtggcgtatttggagaatctcagccttgaagttgctgcccacatgcgccgcttggaggaagaagtattccgtttagcaggccgttcctttcgccttaactctcgcgatcagttagaacgtgtgttgttcgatgaacttggtctccctcctatcggcaagacagagaagaccggtaaacgtagcacttcagcggcggttttagaagctcttcgcgaagtccatcccattgtggacaagatcttgcagtaccgcgaactcgcgaaattgaaaggcacctatattgaccgtcttccggcattagtccacccgaaaacgggacgcctccatacccgcttcaaccaaacagccacggcgaccggtcgtttgtcctcctctgatccaaaccttcagaatattccagtacgtaccccattgggccagaagatccgccgtgcgtttgtagctgaggagggttggcgtttagtggccctcgattatcgtcaaattgaattacgtgtccttgcccatctttctggcgatgagaacctcatccgcgtgtttcaggaaggcaaagacattcacactcaaacggcaagctggatgtttggattatcagctgaagcgatcgatcctttgatgcgtcgtgcagcgaagaccatcaatttcggtgttctctacggtatgagtgcctttcgtttgtcgcaggaattaggcattccctatgaagaagctcaggcgttcattcagaaatactttcaaagctatcccaaagttaaagcatggatcgagaagactctccgtgaaggccgcacacgtggttacgtagagaccttatttggacgtcgccgctatgttcccgatttaaacgctcgcgtgaaaggcaagcgtgaagccgccgaacgcatggcgttcaacatgcctgtacagggcacggcagctgacctcatgaaacttgcaatggtgcgcctttttccacaattgcgtgaagttggtgcccgcatgctcttgcaggtccacgatgaactcttgttagaagcgccaaaagagcgtgcggaagaggtggcagccctcgcgaaagaagttatggaaggcgtgtggcccttagcggtgcctcttgaagtcgaagttggtattggcgaggattggctggctgccaaagga

SEQ ID NO: 4286 - protein, 841 aa, synthetic construct
  REGION 1..841: note = Variant of DNA polymerase I from Thermus sp. strain 2.9
MHHHHHHGGSGVLPVFEPKGRVLLVDGHHLAYRNFFALKGLTTSLGEPVQGVYGFAKSLLKALKEDGDVVIVVFDAKAPSFRHEAYEAYKAGRAPTPEDFPRQLALMKELVDLLGLERLEVPGFEADDVLATLAKKAEREGYEVQILTADRDLFQLLSPRISVLHPEGHRITPEWLWEKYGLRPEQWVDFRALAGDPSDNIPGVKGIGEKTALKLLKEWGSLENLLKNLDQVKPESVREKILAHLEDLKLSRELSRVRTDLPLEVDFGRRREPDWEGLKAVLERLEFGSLLHEFGLLESPLLAEEAPWPPPEGAFLGYRLSRPEPMWAELLALAASAQGRVYRAEDPHGALRGLFEVRGLLAKDLAVVALREGLDLPPTDDPMLLAYLLDPSNTTPEGVARRYGGEWTEDAAKRALLAERLHANLLGRLQGEERLLWLYEEVEKPLSRVLAHMEATGVKLDVAYLENLSLEVAAHMRRLEEEVFRLAGRSFRLNSRDQLERVLFDELGLPPIGKTEKTGKRSTSAAVLEALREVHPIVDKILQYRELAKLKGTYIDRLPALVHPKTGRLHTRFNQTATATGRLSSSDPNLQNIPVRTPLGQKIRRAFVAEEGWRLVALDYRQIELRVLAHLSGDENLIRVFQEGKDIHTQTASWMFGLSAEAIDPLMRRAAKTINFGVLYGMSAFRLSQELGIPYEEAQAFIQKYFQSYPKVKAWIEKTLREGRTRGYVETLFGRRRYVPDLNARVKGKREAAERMAFNMPVQGTAADLMKLAMVRLFPQLREVGARMLLQVHDELLLEAPKERAEEVAALAKEVMEGVWPLAVPLEVEVGIGEDWLAAKG

SEQ ID NO: 4287 - DNA, 2523 bp, synthetic construct
  misc_feature 1..2523: note = Variant of DNA polymerase I from Thermus sp. strain 2.9
  source 1..2523: mol_type = other DNA
atgcaccatcatcatcatcatggcggtagcggcgtgttaccggtgttcgagcctaaaggtcgcgtgcttctggttgatggccatcatctcgcgtatcgtaacttctttgccctgaaaggattaaccaccagcctgggcgagccggtacagggtgtctacggctttgcaaagtcgctcctgaaagctctgaaagaagacggtgatgtggtgattgttgtctttgatgcgaaagcgccaagttttcgccacgaagcgtacgaagcttacaaagccgggcgtgctccaacgccggaagactttcctcgccaattggcgcttatgaaggaattagtggatttgcttggcctcgaacgcttggaagttcccggtttcgaggcagacgacgtattagcgactctcgcaaagaaagccgaacgtgagggctatgaagtccagatcttgacagcagatcgcgatcttttccagcttttatctccgcgcatctcggtgttacacccggaagggcatcgtatcaccccggaatggctctgggagaaatatggtttgcgtcccgaacaatgggtggattttcgcgccttagcaggcgatccgagcgacaatattccgggagttaaaggtatcggcgagaagacggcgctcaagctccttaaagaatgggggtcgttggagaacttgcttaagaatttagatcaggtcaaaccagagtcagtgcgtgagaagattcttgctcacctcgaagacctcaaattaagccgcgaattgtcccgtgtacgcaccgatttgccgctcgaagttgatttcggtcgccgccgcgaacctgactgggagggtcttaaagcgtttttagagcgtcttgaatttggttcgctcttgcatgaattcggccttttagaaagcccgttactggccgaagaagcaccttggccaccgcccgagggcgcgtttttaggttaccgtttgagtcgcccggaaccgatgtgggccgaattactggctcttgcagcgtctgcccagggacgtgtgtatcgcgcggaagaccctcatggtgcgctccgcggcctcttcgaagtccgtggactccttgccaaagacttagctgttgttgcattgcgcgaaggtcttgatttacctccgactgatgatccaatgcttcttgcgtacctcttggacccgtcaaacacgacgcccgaaggcgtagcccgtcgttacggcggcgagtggaccgaagatgcagcgaaacgcgcgttattggccgaacgtttgcacgccaatttattaggacgtttgcaaggcgaggaacgtctcctctggctttacgaagaagtggagaaaccattgagtcgcgtgctcgcgcatatggaagctaccggtgtcaaattagacgtggcgtatttggagaatctcagccttgaagttgctgcccacatgcgccgcttggaggaagaagtattccgtttagcaggccgttcctttcgccttaactctcgcgatcagttagaacgtgtgttgttcgatgaacttggtctccctcctatcggcaagacagagaagaccggtaaacgtagcacttcagcggcggttttagaagctcttcgcgaagtccatcccattgtggacaagatcttgcagtaccgcgaactcgcgaaattgaaaggcacctatattgaccgtcttccggcattagtccacccgaaaacgggacgcctccatacccgcttcaaccaaacagccacggcgaccggtcgtttgtcctcctctgatccaaaccttcagaatattccagtacgtaccccattgggccagaagatccgccgtgcgtttgtagctgaggagggttggcgtttagtggccctcgattatcgtcaaattgaattacgtgtccttgcccatctttctggcgatgagaacctcatccgcgtgtttcagctgggcaaagacattcacactcaaacggcaagctggatgtttggattatcagctgaagcgatcgatcctttgatgcgtcgtgcagcgaagaccatcaatttcggtgttctctacggtatgagtgcctttcgtttgtcgcaggaattaggcattccctatgaagaagctcaggcgttcattcagaaatactttcaaagctatcccaaagttaaagcatggatcgagaagactctccgtgaaggccgcacacgtggttacgtagagaccttatttggacgtcgccgctatgttcccgatttaaacgctcgcgtgaaaggcaagcgtgaagccgccgaacgcatggcgttcaacatgcctgtacagggcacggcagctgacctcatgaaacttgcaatggtgcgcctttttccacaattgcgtgaagttggtgcccgcatgctcttgcaggtccacgatgaactcttgttagaagcgccaaaagagcgtgcggaagaggtggcagccctcgcgaaagaagttatggaaggcgtgtggcccttagcggtgcctcttgaagtcgaagttggtattggcgaggattggctggctgccaaagga

SEQ ID NO: 4288 - protein, 841 aa, synthetic construct
  REGION 1..841: note = Variant of DNA polymerase I from Thermus sp. strain 2.9
MHHHHHHGGSGVLPVFEPKGRVLLVDGHHLAYRNFFALKGLTTSLGEPVQGVYGFAKSLLKALKEDGDVVIVVFDAKAPSFRHEAYEAYKAGRAPTPEDFPRQLALMKELVDLLGLERLEVPGFEADDVLATLAKKAEREGYEVQILTADRDLFQLLSPRISVLHPEGHRITPEWLWEKYGLRPEQWVDFRALAGDPSDNIPGVKGIGEKTALKLLKEWGSLENLLKNLDQVKPESVREKILAHLEDLKLSRELSRVRTDLPLEVDFGRRREPDWEGLKAFLERLEFGSLLHEFGLLESPLLAEEAPWPPPEGAFLGYRLSRPEPMWAELLALAASAQGRVYRAEDPHGALRGLFEVRGLLAKDLAVVALREGLDLPPTDDPMLLAYLLDPSNTTPEGVARRYGGEWTEDAAKRALLAERLHANLLGRLQGEERLLWLYEEVEKPLSRVLAHMEATGVKLDVAYLENLSLEVAAHMRRLEEEVFRLAGRSFRLNSRDQLERVLFDELGLPPIGKTEKTGKRSTSAAVLEALREVHPIVDKILQYRELAKLKGTYIDRLPALVHPKTGRLHTRFNQTATATGRLSSSDPNLQNIPVRTPLGQKIRRAFVAEEGWRLVALDYRQIELRVLAHLSGDENLIRVFQLGKDIHTQTASWMFGLSAEAIDPLMRRAAKTINFGVLYGMSAFRLSQELGIPYEEAQAFIQKYFQSYPKVKAWIEKTLREGRTRGYVETLFGRRRYVPDLNARVKGKREAAERMAFNMPVQGTAADLMKLAMVRLFPQLREVGARMLLQVHDELLLEAPKERAEEVAALAKEVMEGVWPLAVPLEVEVGIGEDWLAAKG

SEQ ID NO: 4289 - DNA, 2523 bp, synthetic construct
  misc_feature 1..2523: note = Variant of DNA polymerase I from Thermus sp. strain 2.9
  source 1..2523: mol_type = other DNA
atgcaccatcatcatcatcatggcggtagcggcgtgttaccggtgttcgagcctaaaggtcgcgtgcttctggttgatggccatcatctcgcgtatcgtaacttctttgccctgaaaggattaaccaccagcctgggcgagccggtacagggtgtctacggctttgcaaagtcgctcctgaaagctctgaaagaagacggtgatgtggtgattgttgtctttgatgcgaaagcgccaagttttcgccacgaagcgtacgaagcttacaaagccgggcgtgctccaacgccggaagactttcctcgccaattggcgcttatgaaggaattagtggatttgcttggcctcgaacgcttggaagttcccggtttcgaggcagacgacgtattagcgactctcgcaaagaaagccgaacgtgagggctatgaagtccagatcttgacagcagatcgcgatcttttccagcttttatctccgcgcatctcggtgttacacccggaagggcatcgtatcaccccggaatggctctgggagaaatatggtttgcgtcccgaacaatgggtggattttcgcgccttagcaggcgatccgagcgacaatattccgggagttaaaggtatcggcgagaagacggcgctcaagctccttaaagaatgggggtcgttggagaacttgcttaagaatttagatcaggtcaaaccagagtcagtgcgtgagaagattcttgctcacctcgaagacctcaaattaagccgcgaattgtcccgtgtacgcaccgatttgccgctcgaagttgatttcggtcgccgccgcgaacctgactgggagggtcttaaagcgtttttagagcgtcttgaatttggttcgctcttgcatgaattcggccttttagaaagcccgttactggccgaagaagcaccttggccaccgcccgagggcgcgtttttaggttaccgtttgagtcgcccggaaccgatgtgggccgaattactggctcttgcagcgtctgcccagggacgtgtgtatcgcgcggaagaccctcatggtgcgctccgcggcctcttcgaagtccgtggactccttgccaaagacttagctgttgttgcattgcgcgaaggtcttgatttacctccgactgatgatccaatgcttcttgcgtacctcttggacccgtcaaacacgacgcccgaaggcgtagcccgtcgttacggcggcgagtggaccgaagatgcagcgaaacgcgcgttattggccgaacgtttgcacgccaatttattaggacgtttgcaaggcgaggaacgtctcctctggctttacgaagaagtggagaaaccattgagtcgcgtgctcgcgcatatggaagctaccggtgtcaaattagacgtggcgtatttggagaatctcagccttgaagttgctgcccacatgcgccgcttggaggaagaagtattccgtttagcaggccgttcctttcgccttaactctcgcgatcagttagaacgtgtgttgttcgatgaacttggtctccctcctatcggcaagacagagaagaccggtaaacgtagcacttcagcggcggttttagaagctcttcgcgaagtccatcccattgtggacaagatcttgcagtaccgcgaactcgcgaaattgaaaggcacctatattgaccgtcttccggcattagtccacccgaaaacgggacgcctccatacccgcttcaaccaaacagccacggcgaccggtcgtttgtcctcctctgatccaaaccttcagaatattccagtacgtaccccattgggccagaagatccgccgtgcgtttgtagctgaggagggttggcgtttagtggccctcgattatcgtggtattgaattacgtgtccttgcccatctttctggcgatgagaacctcatccgcgtgtttcaggaaggcaaagacattcacactcaaacggcaagctggatgtttggattatcagctgaagcgatcgatcctttgatgcgtcgtgcagcgaagaccatcaatttcggtgttctctacggtatgagtgcctttcgtttgtcgcaggaattaggcattccctatgaagaagctcaggcgttcattcagaaatactttcaaagctatcccaaagttaaagcatggatcgagaagactctccgtgaaggccgcacacgtggttacgtagagaccttatttggacgtcgccgctatgttcccgatttaaacgctcgcgtgaaaggcaagcgtgaagccgccgaacgcatggcgttcaacatgcctgtacagggcacggcagctgacctcatgaaacttgcaatggtgcgcctttttccacaattgcgtgaagttggtgcccgcatgctcttgcaggtccacgatgaactcttgttagaagcgccaaaagagcgtgcggaagaggtggcagccctcgcgaaagaagttatggaaggcgtgtggcccttagcggtgcctcttgaagtcgaagttggtattggcgaggattggctggctgccaaagga

SEQ ID NO: 4290 - protein, 841 aa, synthetic construct
  REGION 1..841: note = Variant of DNA polymerase I from Thermus sp. strain 2.9
MHHHHHHGGSGVLPVFEPKGRVLLVDGHHLAYRNFFALKGLTTSLGEPVQGVYGFAKSLLKALKEDGDVVIVVFDAKAPSFRHEAYEAYKAGRAPTPEDFPRQLALMKELVDLLGLERLEVPGFEADDVLATLAKKAEREGYEVQILTADRDLFQLLSPRISVLHPEGHRITPEWLWEKYGLRPEQWVDFRALAGDPSDNIPGVKGIGEKTALKLLKEWGSLENLLKNLDQVKPESVREKILAHLEDLKLSRELSRVRTDLPLEVDFGRRREPDWEGLKAFLERLEFGSLLHEFGLLESPLLAEEAPWPPPEGAFLGYRLSRPEPMWAELLALAASAQGRVYRAEDPHGALRGLFEVRGLLAKDLAVVALREGLDLPPTDDPMLLAYLLDPSNTTPEGVARRYGGEWTEDAAKRALLAERLHANLLGRLQGEERLLWLYEEVEKPLSRVLAHMEATGVKLDVAYLENLSLEVAAHMRRLEEEVFRLAGRSFRLNSRDQLERVLFDELGLPPIGKTEKTGKRSTSAAVLEALREVHPIVDKILQYRELAKLKGTYIDRLPALVHPKTGRLHTRFNQTATATGRLSSSDPNLQNIPVRTPLGQKIRRAFVAEEGWRLVALDYRGIELRVLAHLSGDENLIRVFQEGKDIHTQTASWMFGLSAEAIDPLMRRAAKTINFGVLYGMSAFRLSQELGIPYEEAQAFIQKYFQSYPKVKAWIEKTLREGRTRGYVETLFGRRRYVPDLNARVKGKREAAERMAFNMPVQGTAADLMKLAMVRLFPQLREVGARMLLQVHDELLLEAPKERAEEVAALAKEVMEGVWPLAVPLEVEVGIGEDWLAAKG

SEQ ID NO: 4291 - DNA, 2523 bp, synthetic construct
  misc_feature 1..2523: note = Variant of DNA polymerase I from Thermus sp. strain 2.9
  source 1..2523: mol_type = other DNA
atgcaccatcatcatcatcatggcggtagcggcgtgttaccggtgttcgagcctaaaggtcgcgtgcttctggttgatggccatcatctcgcgtatcgtaacttctttgccctgaaaggattaaccaccagcctgggcgagccggtacagggtgtctacggctttgcaaagtcgctcctgaaagctctgaaagaagacggtgatgtggtgattgttgtctttgatgcgaaagcgccaagttttcgccacgaagcgtacgaagcttacaaagccgggcgtgctccaacgccggaagactttcctcgccaattggcgcttatgaaggaattagtggatttgcttggcctcgaacgcttggaagttcccggtttcgaggcagacgacgtattagcgactctcgcaaagaaagccgaacgtgagggctatgaagtccagatcttgacagcagatcgcgatcttttccagcttttatctccgcgcatctcggtgttacacccggaagggcatcgtatcaccccggaatggctctgggagaaatatggtttgcgtcccgaacaatgggtggattttcgcgccttagcaggcgatccgagcgacaatattccgggagttaaaggtatcggcgagaagacggcgctcaagctccttaaagaatgggggtcgttggagaacttgcttaagaatttagatcaggtcaaaccagagtcagtgcgtgagaagattcttgctcacctcgaagacctcaaattaagccgcgaattgtcccgtgtacgcaccgatttgccgctcgaagttgatttcggtcgccgccgcgaacctgactgggagggtcttaaagcgtttttagagcgtcttgaatttggttcgctcttgcatgaattcggccttttagaaagcccgttactggccgaagaagcaccttggccaccgcccgagggcgcgtttttaggttaccgtttgagtcgcccggaaccgatgtgggccgaattactggctcttgcagcgtctgcccagggacgtgtgtatcgcgcggaagaccctcatggtgcgctccgcggcctcttcgaagtccgtggactccttgccaaagacttagctgttgttgcattgcgcgaaggtcttgatttacctccgactgatgatccaatgcttcttgcgtacctcttggacccgtcaaacacgacgcccgaaggcgtagcccgtcgttacggcggcgagtggaccgaagatgcagcgaaacgcgcgttattggccgaacgtttgcacgccaatttattaggacgtttgcaaggcgaggaacgtctcctctggctttacgaagaagtggagaaaccattgagtcgcgtgctcgcgcatatggaagctaccggtgtcaaattagacgtggcgtatttggagaatctcagccttgaagttgctgcccacatgcgccgcttggaggaagaagtattccgtttagcaggccgttcctttcgccttaactctcgcgatcagttagaacgtgtgttgttcgatgaacttggtctctcgcctatcggcaagacagagaagaccggtaaacgtagcacttcagcggcggttttagaagctcttcgcgaagtccatcccattgtggacaagatcttgcagtaccgcgaactcgcgaaattgaaaggcacctatattgaccgtcttccggcattagtccacccgaaaacgggacgcctccatacccgcttcaaccaaacagccacggcgaccggtcgtttgtcctcctctgatccaaaccttcagaatattccagtacgtaccccattgggccagaagatccgccgtgcgtttgtagctgaggagggttggcgtttagtggccctcgattatcgtcaaattgaattacgtgtccttgcccatctttctggcgatgagaacctcatccgcgtgtttcaggaaggcaaagacattcacactcaaacggcaagctggatgtttggattatcagctgaagcgatcgatcctttgatgcgtcgtgcagcgaagaccatcaatttcggtgttctctacggtatgagtgcctttcgtttgtcgcaggaattaggcattccctatgaagaagctcaggcgttcattcagaaatactttcaaagctatcccaaagttaaagcatggatcgagaagactctccgtgaaggccgcacacgtggttacgtagagaccttatttggacgtcgccgctatgttcccgatttaaacgctcgcgtgaaaggcaagcgtgaagccgccgaacgcatggcgttcaacatgcctgtacagggcacggcagctgacctcatgaaacttgcaatggtgcgcctttttccacaattgcgtgaagttggtgcccgcatgctcttgcaggtccacgatgaactcttgttagaagcgccaaaagagcgtgcggaagaggtggcagccctcgcgaaagaagttatggaaggcgtgtggcccttagcggtgcctcttgaagtcgaagttggtattggcgaggattggctggctgccaaagga

SEQ ID NO: 4292 - protein, 841 aa, synthetic construct
  REGION 1..841: note = Variant of DNA polymerase I from Thermus sp. strain 2.9
MHHHHHHGGSGVLPVFEPKGRVLLVDGHHLAYRNFFALKGLTTSLGEPVQGVYGFAKSLLKALKEDGDVVIVVFDAKAPSFRHEAYEAYKAGRAPTPEDFPRQLALMKELVDLLGLERLEVPGFEADDVLATLAKKAEREGYEVQILTADRDLFQLLSPRISVLHPEGHRITPEWLWEKYGLRPEQWVDFRALAGDPSDNIPGVKGIGEKTALKLLKEWGSLENLLKNLDQVKPESVREKILAHLEDLKLSRELSRVRTDLPLEVDFGRRREPDWEGLKAFLERLEFGSLLHEFGLLESPLLAEEAPWPPPEGAFLGYRLSRPEPMWAELLALAASAQGRVYRAEDPHGALRGLFEVRGLLAKDLAVVALREGLDLPPTDDPMLLAYLLDPSNTTPEGVARRYGGEWTEDAAKRALLAERLHANLLGRLQGEERLLWLYEEVEKPLSRVLAHMEATGVKLDVAYLENLSLEVAAHMRRLEEEVFRLAGRSFRLNSRDQLERVLFDELGLSPIGKTEKTGKRSTSAAVLEALREVHPIVDKILQYRELAKLKGTYIDRLPALVHPKTGRLHTRFNQTATATGRLSSSDPNLQNIPVRTPLGQKIRRAFVAEEGWRLVALDYRQIELRVLAHLSGDENLIRVFQEGKDIHTQTASWMFGLSAEAIDPLMRRAAKTINFGVLYGMSAFRLSQELGIPYEEAQAFIQKYFQSYPKVKAWIEKTLREGRTRGYVETLFGRRRYVPDLNARVKGKREAAERMAFNMPVQGTAADLMKLAMVRLFPQLREVGARMLLQVHDELLLEAPKERAEEVAALAKEVMEGVWPLAVPLEVEVGIGEDWLAAKG

SEQ ID NO: 4293 - DNA, 2523 bp, synthetic construct
  misc_feature 1..2523: note = Variant of DNA polymerase I from Thermus sp. strain 2.9
  source 1..2523: mol_type = other DNA
atgcaccatcatcatcatcatggcggtagcggcgtgttaccggtgttcgagcctaaaggtcgcgtgcttctggttgatggccatcatctcgcgtatcgtaacttctttgccctgaaaggattaaccaccagcctgggcgagccggtacagggtgtctacggctttgcaaagtcgctcctgaaagctctgaaagaagacggtgatgtggtgattgttgtctttgatgcgaaagcgccaagttttcgccacgaagcgtacgaagcttacaaagccgggcgtgctccaacgccggaagactttcctcgccaattggcgcttatgaaggaattagtggatttgcttggcctcgaacgcttggaagttcccggtttcgaggcagacgacgtattagcgactctcgcaaagaaagccgaacgtgagggctatgaagtccagatcttgacagcagatcgcgatcttttccagcttttatctccgcgcatctcggtgttacacccggaagggcatcgtatcaccccggaatggctctgggagaaatatggtttgcgtcccgaacaatgggtggattttcgcgccttagcaggcgatccgagcgacaatattccgggagttaaaggtatcggcgagaagacggcgctcaagctccttaaagaatgggggtcgttggagaacttgcttaagaatttagatcaggtcaaaccagagtcagtgcgtgagaagattcttgctcacctcgaagacctcaaattaagccgcgaattgtcccgtgtacgcaccgatttgccgctcgaagttgatttcggtcgccgccgcgaacctgactgggagggtcttaaagcgtttttagagcgtcttgaatttggttcgctcttgcatgaattcggccttttagaaagcccgttactggccgaagaagcaccttggccaccgcccgagggcgcgtttttaggttaccgtttgagtcgcccggaaccgatgtgggccgaattactggctcttgcagcgtctgcccagggacgtgtgtatcgcgcggaagaccctcatggtgcgctccgcggcctcttcgaagtccgtggactccttgccaaagacttagctgttgttgcattgcgcgaaggtcttgatttacctccgactgatgatccaatgcttcttgcgtacctcttggacccgtcaaacacgacgcccgaaggcgtagcccgtcgttacggcggcgagtggaccgaagatgcagcgaaacgcgcgttattggccgaacgtttgcacgccaatttattaggacgtttgcaaggcgaggaacgtctcctctggctttacgaagaagtggagaaaccattgagtcgcgtgctcgcgcatatggaaggtaccggtgtcaaattagacgtggcgtatttggagaatctcagccttgaagttgctgcccacatgcgccgcttggaggaagaagtattccgtttagcaggccgttcctttcgccttaactctcgcgatcagttagaacgtgtgttgttcgatgaacttggtctccctcctatcggcaagacagagaagaccggtaaacgtagcacttcagcggcggttttagaagctcttcgcgaagtccatcccattgtggacaagatcttgcagtaccgcgaactcgcgaaattgaaaggcacctatattgaccgtcttccggcattagtccacccgaaaacgggacgcctccatacccgcttcaaccaaacagccacggcgaccggtcgtttgtcctcctctgatccaaaccttcagaatattccagtacgtaccccattgggccagaagatccgccgtgcgtttgtagctgaggagggttggcgtttagtggccctcgattatcgtcaaattgaattacgtgtccttgcccatctttctggcgatgagaacctcatccgcgtgtttcaggaaggcaaagacattcacactcaaacggcaagctggatgtttggattatcagctgaagcgatcgatcctttgatgcgtcgtgcagcgaagaccatcaatttcggtgttctctacggtatgagtgcctttcgtttgtcgcaggaattaggcattccctatgaagaagctcaggcgttcattcagaaatactttcaaagctatcccaaagttaaagcatggatcgagaagactctccgtgaaggccgcacacgtggttacgtagagaccttatttggacgtcgccgctatgttcccgatttaaacgctcgcgtgaaaggcaagcgtgaagccgccgaacgcatggcgttcaacatgcctgtacagggcacggcagctgacctcatgaaacttgcaatggtgcgcctttttccacaattgcgtgaagttggtgcccgcatgctcttgcaggtccacgatgaactcttgttagaagcgccaaaagagcgtgcggaagaggtggcagccctcgcgaaagaagttatggaaggcgtgtggcccttagcggtgcctcttgaagtcgaagttggtattggcgaggattggctggctgccaaagga

SEQ ID NO: 4294 - protein, 841 aa, synthetic construct
  REGION 1..841: note = Variant of DNA polymerase I from Thermus sp. strain 2.9
MHHHHHHGGSGVLPVFEPKGRVLLVDGHHLAYRNFFALKGLTTSLGEPVQGVYGFAKSLLKALKEDGDVVIVVFDAKAPSFRHEAYEAYKAGRAPTPEDFPRQLALMKELVDLLGLERLEVPGFEADDVLATLAKKAEREGYEVQILTADRDLFQLLSPRISVLHPEGHRITPEWLWEKYGLRPEQWVDFRALAGDPSDNIPGVKGIGEKTALKLLKEWGSLENLLKNLDQVKPESVREKILAHLEDLKLSRELSRVRTDLPLEVDFGRRREPDWEGLKAFLERLEFGSLLHEFGLLESPLLAEEAPWPPPEGAFLGYRLSRPEPMWAELLALAASAQGRVYRAEDPHGALRGLFEVRGLLAKDLAVVALREGLDLPPTDDPMLLAYLLDPSNTTPEGVARRYGGEWTEDAAKRALLAERLHANLLGRLQGEERLLWLYEEVEKPLSRVLAHMEGTGVKLDVAYLENLSLEVAAHMRRLEEEVFRLAGRSFRLNSRDQLERVLFDELGLPPIGKTEKTGKRSTSAAVLEALREVHPIVDKILQYRELAKLKGTYIDRLPALVHPKTGRLHTRFNQTATATGRLSSSDPNLQNIPVRTPLGQKIRRAFVAEEGWRLVALDYRQIELRVLAHLSGDENLIRVFQEGKDIHTQTASWMFGLSAEAIDPLMRRAAKTINFGVLYGMSAFRLSQELGIPYEEAQAFIQKYFQSYPKVKAWIEKTLREGRTRGYVETLFGRRRYVPDLNARVKGKREAAERMAFNMPVQGTAADLMKLAMVRLFPQLREVGARMLLQVHDELLLEAPKERAEEVAALAKEVMEGVWPLAVPLEVEVGIGEDWLAAKG

SEQ ID NO: 4295 - DNA, 2523 bp, synthetic construct
  misc_feature 1..2523: note = Variant of DNA polymerase I from Thermus sp. strain 2.9
  source 1..2523: mol_type = other DNA
atgcaccatcatcatcatcatggcggtagcggcgtgttaccggtgttcgagcctaaaggtcgcgtgcttctggttgatggccatcatctcgcgtatcgtaacttctttgccctgaaaggattaaccaccagcctgggcgagccggtacagggtgtctacggctttgcaaagtcgctcctgaaagctctgaaagaagacggtgatgtggtgattgttgtctttgatgcgaaagcgccaagttttcgccacgaagcgtacgaagcttacaaagccgggcgtgctccaacgccggaagactttcctcgccaattggcgcttatgaaggaattagtggatttgcttggcctcgaacgcttggaagttcccggtttcgaggcagacgacgtattagcgactctcgcaaagaaagccgaacgtgagggctatgaagtccagatcttgacagcagatcgcgatcttttccagcttttatctccgcgcatctcggtgttacacccggaagggcatcgtatcaccccggaatggctctgggagaaatatggtttgcgtcccgaacaatgggtggattttcgcgccttagcaggcgatccgagcgacaatattccgggagttaaaggtatcggcgagaagacggcgctcaagctccttaaagaatgggggtcgttggagaacttgcttaagaatttagatcaggtcaaaccagagtcagtgcgtgagaagattcttgctcacctcgaagacctcaaattaagccgcgaattgtcccgtgtacgcaccgatttgccgctcgaagttgatttcggtcgccgccgcgaacctgactgggagggtcttaaagcgtttttagagcgtcttgaatttggttcgctcttgcatgaattcggccttttagaaagcccgttactggccgaagaagcaccttggccaccgcccgagggcgcgtttttaggttaccgtttgagtcgcccggaaccgatgtgggccgaattactggctcttgcagcgtctgcccagggacgtgtgtatcgcgcggaagaccctcatggtgcgctccgcggcctcttcgaagtccgtggactccttgccaaagacttagctgttgttgcattgcgcgaaggtcttgatttacctccgactgatgatccaatgcttcttgcgtacctcttggacccgtcaaacacgacgcccgaaggcgtagcccgtcgttacggcggcgagtggaccgaagatgcagcgaaacgcgcgttattggccgaacgtttgcacgccaatttattaggacgtttgcaaggcgaggaacgtctcctctggctttacgaagaagtggagaaaccattgagtcgcgtgctcgcgcatatggaagctaccggtgtcaaattagacgtggcgtatttggagaatctcaggcttgaagttgctgcccacatgcgccgcttggaggaagaagtattccgtttagcaggccgttcctttcgccttaactctcgcgatcagttagaacgtgtgttgttcgatgaacttggtctccctcctatcggcaagacagagaagaccggtaaacgtagcacttcagcggcggttttagaagctcttcgcgaagtccatcccattgtggacaagatcttgcagtaccgcgaactcgcgaaattgaaaggcacctatattgaccgtcttccggcattagtccacccgaaaacgggacgcctccatacccgcttcaaccaaacagccacggcgaccggtcgtttgtcctcctctgatccaaaccttcagaatattccagtacgtaccccattgggccagaagatccgccgtgcgtttgtagctgaggagggttggcgtttagtggccctcgattatcgtcaaattgaattacgtgtccttgcccatctttctggcgatgagaacctcatccgcgtgtttcaggaaggcaaagacattcacactcaaacggcaagctggatgtttggattatcagctgaagcgatcgatcctttgatgcgtcgtgcagcgaagaccatcaatttcggtgttctctacggtatgagtgcctttcgtttgtcgcaggaattaggcattccctatgaagaagctcaggcgttcattcagaaatactttcaaagctatcccaaagttaaagcatggatcgagaagactctccgtgaaggccgcacacgtggttacgtagagaccttatttggacgtcgccgctatgttcccgatttaaacgctcgcgtgaaaggcaagcgtgaagccgccgaacgcatggcgttcaacatgcctgtacagggcacggcagctgacctcatgaaacttgcaatggtgcgcctttttccacaattgcgtgaagttggtgcccgcatgctcttgcaggtccacgatgaactcttgttagaagcgccaaaagagcgtgcggaagaggtggcagccctcgcgaaagaagttatggaaggcgtgtggcccttagcggtgcctcttgaagtcgaagttggtattggcgaggattggctggctgccaaagga

SEQ ID NO: 4296 - protein, 841 aa, synthetic construct
  REGION 1..841: note = Variant of DNA polymerase I from Thermus sp. strain 2.9
MHHHHHHGGSGVLPVFEPKGRVLLVDGHHLAYRNFFALKGLTTSLGEPVQGVYGFAKSLLKALKEDGDVVIVVFDAKAPSFRHEAYEAYKAGRAPTPEDFPRQLALMKELVDLLGLERLEVPGFEADDVLATLAKKAEREGYEVQILTADRDLFQLLSPRISVLHPEGHRITPEWLWEKYGLRPEQWVDFRALAGDPSDNIPGVKGIGEKTALKLLKEWGSLENLLKNLDQVKPESVREKILAHLEDLKLSRELSRVRTDLPLEVDFGRRREPDWEGLKAFLERLEFGSLLHEFGLLESPLLAEEAPWPPPEGAFLGYRLSRPEPMWAELLALAASAQGRVYRAEDPHGALRGLFEVRGLLAKDLAVVALREGLDLPPTDDPMLLAYLLDPSNTTPEGVARRYGGEWTEDAAKRALLAERLHANLLGRLQGEERLLWLYEEVEKPLSRVLAHMEATGVKLDVAYLENLRLEVAAHMRRLEEEVFRLAGRSFRLNSRDQLERVLFDELGLPPIGKTEKTGKRSTSAAVLEALREVHPIVDKILQYRELAKLKGTYIDRLPALVHPKTGRLHTRFNQTATATGRLSSSDPNLQNIPVRTPLGQKIRRAFVAEEGWRLVALDYRQIELRVLAHLSGDENLIRVFQEGKDIHTQTASWMFGLSAEAIDPLMRRAAKTINFGVLYGMSAFRLSQELGIPYEEAQAFIQKYFQSYPKVKAWIEKTLREGRTRGYVETLFGRRRYVPDLNARVKGKREAAERMAFNMPVQGTAADLMKLAMVRLFPQLREVGARMLLQVHDELLLEAPKERAEEVAALAKEVMEGVWPLAVPLEVEVGIGEDWLAAKG

SEQ ID NO: 4297 - DNA, 2523 bp, synthetic construct
  misc_feature 1..2523: note = Variant of DNA polymerase I from Thermus sp. strain 2.9
  source 1..2523: mol_type = other DNA
atgcaccatcatcatcatcatggcggtagcggcgtgttaccggtgttcgagcctaaaggtcgcgtgcttctggttgatggccatcatctcgcgtatcgtaacttctttgccctgaaaggattaaccaccagcctgggcgagccggtacagggtgtctacggctttgcaaagtcgctcctgaaagctctgaaagaagacggtgatgtggtgattgttgtctttgatgcgaaagcgccaagttttcgccacgaagcgtacgaagcttacaaagccgggcgtgctccaacgccggaagactttcctcgccaattggcgcttatgaaggaattagtggatttgcttggcctcgaacgcttggaagttcccggtttcgaggcagacgacgtattagcgactctcgcaaagaaagccgaacgtgagggctatgaagtccagatcttgacagcagatcgcgatcttttccagcttttatctccgcgcatctcggtgttacacccggaagggcatcgtatcaccccggaatggctctgggagaaatatggtttgcgtcccgaacaatgggtggattttcgcgccttagcaggcgatccgagcgacaatattccgggagttaaaggtatcggcgagaagacggcgctcaagctccttaaagaatgggggtcgttggagaacttgcttaagaatttagatcaggtcaaaccagagtcagtgcgtgagaagattcttgctcacctcgaagacctcaaattaagccgcgaattgtcccgtgtacgcaccgatttgccgctcgaagttgatttcggtcgccgccgcgaacctgactgggagggtcttaaagcgtttttagagcgtcttgaatttggttcgctcttgcatgaattcggccttttagaaagcccgttactggccgaagaagcaccttggccaccgcccgagggcgcgtttttaggttaccgtttgagtcgcccggaaccgatgtgggccgaattactggctcttgcagcgtctgcccagggacgtgtgtatcgcgcggaagaccctcatggtgcgctccgcggcctcttcgaagtccgtggactccttgccaaagacttagctgttgttgcattgcgcaagggtcttgatttacctccgactgatgatccaatgcttcttgcgtacctcttggacccgtcaaacacgacgcccgaaggcgtagcccgtcgttacggcggcgagtggaccgaagatgcagcgaaacgcgcgttattggccgaacgtttgcacgccaatttattaggacgtttgcaaggcgaggaacgtctcctctggctttacgaagaagtggagaaaccattgagtcgcgtgctcgcgcatatggaagctaccggtgtcaaattagacgtggcgtatttggagaatctcagccttgaagttgctgcccacatgcgccgcttggaggaagaagtattccgtttagcaggccgttcctttcgccttaactctcgcgatcagttagaacgtgtgttgttcgatgaacttggtctccctcctatcggcaagacagagaagaccggtaaacgtagcacttcagcggcggttttagaagctcttcgcgaagtccatcccattgtggacaagatcttgcagtaccgcgaactcgcgaaattgaaaggcacctatattgaccgtcttccggcattagtccacccgaaaacgggacgcctccatacccgcttcaaccaaacagccacggcgaccggtcgtttgtcctcctctgatccaaaccttcagaatattccagtacgtaccccattgggccagaagatccgccgtgcgtttgtagctgaggagggttggcgtttagtggccctcgattatcgtcaaattgaattacgtgtccttgcccatctttctggcgatgagaacctcatccgcgtgtttcaggaaggcaaagacattcacactcaaacggcaagctggatgtttggattatcagctgaagcgatcgatcctttgatgcgtcgtgcagcgaagaccatcaatttcggtgttctctacggtatgagtgcctttcgtttgtcgcaggaattaggcattccctatgaagaagctcaggcgttcattcagaaatactttcaaagctatcccaaagttaaagcatggatcgagaagactctccgtgaaggccgcacacgtggttacgtagagaccttatttggacgtcgccgctatgttcccgatttaaacgctcgcgtgaaaggcaagcgtgaagccgccgaacgcatggcgttcaacatgcctgtacagggcacggcagctgacctcatgaaacttgcaatggtgcgcctttttccacaattgcgtgaagttggtgcccgcatgctcttgcaggtccacgatgaactcttgttagaagcgccaaaagagcgtgcggaagaggtggcagccctcgcgaaagaagttatggaaggcgtgtggcccttagcggtgcctcttgaagtcgaagttggtattggcgaggattggctggctgccaaagga

SEQ ID NO: 4298 - protein, 841 aa, synthetic construct
  REGION 1..841: note = Variant of DNA polymerase I from Thermus sp. strain 2.9
MHHHHHHGGSGVLPVFEPKGRVLLVDGHHLAYRNFFALKGLTTSLGEPVQGVYGFAKSLLKALKEDGDVVIVVFDAKAPSFRHEAYEAYKAGRAPTPEDFPRQLALMKELVDLLGLERLEVPGFEADDVLATLAKKAEREGYEVQILTADRDLFQLLSPRISVLHPEGHRITPEWLWEKYGLRPEQWVDFRALAGDPSDNIPGVKGIGEKTALKLLKEWGSLENLLKNLDQVKPESVREKILAHLEDLKLSRELSRVRTDLPLEVDFGRRREPDWEGLKAFLERLEFGSLLHEFGLLESPLLAEEAPWPPPEGAFLGYRLSRPEPMWAELLALAASAQGRVYRAEDPHGALRGLFEVRGLLAKDLAVVALRKGLDLPPTDDPMLLAYLLDPSNTTPEGVARRYGGEWTEDAAKRALLAERLHANLLGRLQGEERLLWLYEEVEKPLSRVLAHMEATGVKLDVAYLENLSLEVAAHMRRLEEEVFRLAGRSFRLNSRDQLERVLFDELGLPPIGKTEKTGKRSTSAAVLEALREVHPIVDKILQYRELAKLKGTYIDRLPALVHPKTGRLHTRFNQTATATGRLSSSDPNLQNIPVRTPLGQKIRRAFVAEEGWRLVALDYRQIELRVLAHLSGDENLIRVFQEGKDIHTQTASWMFGLSAEAIDPLMRRAAKTINFGVLYGMSAFRLSQELGIPYEEAQAFIQKYFQSYPKVKAWIEKTLREGRTRGYVETLFGRRRYVPDLNARVKGKREAAERMAFNMPVQGTAADLMKLAMVRLFPQLREVGARMLLQVHDELLLEAPKERAEEVAALAKEVMEGVWPLAVPLEVEVGIGEDWLAAKG

SEQ ID NO: 4299 - DNA, 2523 bp, synthetic construct
  misc_feature 1..2523: note = Variant of DNA polymerase I from Thermus sp. strain 2.9
  source 1..2523: mol_type = other DNA
atgcaccatcatcatcatcatggcggtagcggcgtgttaccggtgttcgagcctaaaggtcgcgtgcttctggttgatggccatcatctcgcgtatcgtaacttctttgccctgaaaggattaaccaccagcctgggcgagccggtacagggtgtctacggctttgcaaagtcgctcctgaaagctctgaaagaagacggtgatgtggtgattgttgtctttgatgcgaaagcgccaagttttcgccacgaagcgtacgaagcttacaaagccgggcgtgctccaacgccggaagactttcctcgccaattggcgcttatgaaggaattagtggatttgcttggcctcgaacgcttggaagttcccggtttcgaggcagacgacgtattagcgactctcgcaaagaaagccgaacgtgagggctatgaagtccagatcttgacagcagatcgcgatcttttccagcttttatctccgcgcatctcggtgttacacccggaagggcatcgtatcgttccggaatggctctgggagaaatatggtttgcgtcccgaacaatgggtggattttcgcgccttagcaggcgatccgagcgacaatattccgggagttaaaggtatcggcgagaagacggcgctcaagctccttaaagaatgggggtcgttggagaacttgcttaagaatttagatcaggtcaaaccagagtcagtgcgtgagaagattcttgctcacctcgaagacctcaaattaagccgcgaattgtcccgtgtacgcaccgatttgccgctcgaagttgatttcggtcgccgccgcgaacctgactgggagggtcttaaagcgtttttagagcgtcttgaatttggttcgctcttgcatgaattcggccttttagaaagcccgttactggccgaagaagcaccttggccaccgcccgagggcgcgtttttaggttaccgtttgagtcgcccggaaccgatgtgggccgaattactggctcttgcagcgtctgcccagggacgtgtgtatcgcgcggaagaccctcatggtgcgctccgcggcctcttcgaagtccgtggactccttgccaaagacttagctgttgttgcattgcgcgaaggtcttgatttacctccgactgatgatccaatgcttcttgcgtacctcttggacccgtcaaacacgacgcccgaaggcgtagcccgtcgttacggcggcgagtggaccgaagatgcagcgaaacgcgcgttattggccgaacgtttgcacgccaatttattaggacgtttgcaaggcgaggaacgtctcctctggctttacgaagaagtggagaaaccattgagtcgcgtgctcgcgcatatggaagctaccggtgtcaaattagacgtggcgtatttggagaatctcagccttgaagttgctgcccacatgcgccgcttggaggaagaagtattccgtttagcaggccgttcctttcgccttaactctcgcgatcagttagaacgtgtgttgttcgatgaacttggtctccctcctatcggcaagacagagaagaccggtaaacgtagcacttcagcggcggttttagaagctcttcgcgaagtccatcccattgtggacaagatcttgcagtaccgcgaactcgcgaaattgaaaggcacctatattgaccgtcttccggcattagtccacccgaaaacgggacgcctccatacccgcttcaaccaaacagccacggcgaccggtcgtttgtcctcctctgatccaaaccttcagaatattccagtacgtaccccattgggccagaagatccgccgtgcgtttgtagctgaggagggttggcgtttagtggccctcgattatcgtcaaattgaattacgtgtccttgcccatctttctggcgatgagaacctcatccgcgtgtttcaggaaggcaaagacattcacactcaaacggcaagctggatgtttggattatcagctgaagcgatcgatcctttgatgcgtcgtgcagcgaagaccatcaatttcggtgttctctacggtatgagtgcctttcgtttgtcgcaggaattaggcattccctatgaagaagctcaggcgttcattcagaaatactttcaaagctatcccaaagttaaagcatggatcgagaagactctccgtgaaggccgcacacgtggttacgtagagaccttatttggacgtcgccgctatgttcccgatttaaacgctcgcgtgaaaggcaagcgtgaagccgccgaacgcatggcgttcaacatgcctgtacagggcacggcagctgacctcatgaaacttgcaatggtgcgcctttttccacaattgcgtgaagttggtgcccgcatgctcttgcaggtccacgatgaactcttgttagaagcgccaaaagagcgtgcggaagaggtggcagccctcgcgaaagaagttatggaaggcgtgtggcccttagcggtgcctcttgaagtcgaagttggtattggcgaggattggctggctgccaaagga

SEQ ID NO: 4300 - protein, 841 aa, synthetic construct
  REGION 1..841: note = Variant of DNA polymerase I from Thermus sp. strain 2.9
MHHHHHHGGSGVLPVFEPKGRVLLVDGHHLAYRNFFALKGLTTSLGEPVQGVYGFAKSLLKALKEDGDVVIVVFDAKAPSFRHEAYEAYKAGRAPTPEDFPRQLALMKELVDLLGLERLEVPGFEADDVLATLAKKAEREGYEVQILTADRDLFQLLSPRISVLHPEGHRIVPEWLWEKYGLRPEQWVDFRALAGDPSDNIPGVKGIGEKTALKLLKEWGSLENLLKNLDQVKPESVREKILAHLEDLKLSRELSRVRTDLPLEVDFGRRREPDWEGLKAFLERLEFGSLLHEFGLLESPLLAEEAPWPPPEGAFLGYRLSRPEPMWAELLALAASAQGRVYRAEDPHGALRGLFEVRGLLAKDLAVVALREGLDLPPTDDPMLLAYLLDPSNTTPEGVARRYGGEWTEDAAKRALLAERLHANLLGRLQGEERLLWLYEEVEKPLSRVLAHMEATGVKLDVAYLENLSLEVAAHMRRLEEEVFRLAGRSFRLNSRDQLERVLFDELGLPPIGKTEKTGKRSTSAAVLEALREVHPIVDKILQYRELAKLKGTYIDRLPALVHPKTGRLHTRFNQTATATGRLSSSDPNLQNIPVRTPLGQKIRRAFVAEEGWRLVALDYRQIELRVLAHLSGDENLIRVFQEGKDIHTQTASWMFGLSAEAIDPLMRRAAKTINFGVLYGMSAFRLSQELGIPYEEAQAFIQKYFQSYPKVKAWIEKTLREGRTRGYVETLFGRRRYVPDLNARVKGKREAAERMAFNMPVQGTAADLMKLAMVRLFPQLREVGARMLLQVHDELLLEAPKERAEEVAALAKEVMEGVWPLAVPLEVEVGIGEDWLAAKG

SEQ ID NO: 4301 - DNA, 2523 bp, synthetic construct
  misc_feature 1..2523: note = Variant of DNA polymerase I from Thermus sp. strain 2.9
  source 1..2523: mol_type = other DNA
atgcaccatcatcatcatcatggcggtagcggcgtgttaccggtgttcgagcctaaaggtcgcgtgcttctggttgatggccatcatctcgcgtatcgtaacttctttgccctgaaaggattaaccaccagcctgggcgagccggtacagggtgtctacggctttgcaaagtcgctcctgaaagctctgaaagaagacggtgatgtggtgattgttgtctttgatgcgaaagcgccaagttttcgccacgaagcgtacgaagcttacaaagccgggcgtgctccaacgccggaagactttcctcgccaattggctcttatgaaggaattagtggatttgcttggcctcgaacgcttggaagttcccggtttcgaggcagacgacgtattagcgactctcgcaaagaaagccgaacgtgagggctatgaagtccagatcttgacagcagatcgcgatcttttccagcttttatctccgcgcatctcggtgttacacccggaagggcatcgtatcaccccggaatggctctgggagaaatatggtttgcgtcccgaacaatgggtggattttcgcgccttagcaggcgatccgagcgacaatattccgggagttaaaggtatcggcgagaagacggcgctcaagctccttaaagaatgggggtcgttggagaacttgcttaagaatttagatcaggtcaaaccagagtcagtgcgtgagaagattcttgctcacctcgaagacctcaaattaagccgcgaattgtcccgtgtacgcaccgatttgccgctcgaagttgatttcggtcgccgccgcgaacctgactgggagggtcttaaagcgtttttagagcgtcttgaatttggttcgctcttgcatgaattcggccttttagaaagcccgttactggccgaagaagcaccttggccaccgcccgagggcgcgtttttaggttaccgtttgagtcgcccggaaccgatgtgggccgaattactggctcttgcagcgtctgcccagggacgtgtgtatcgcgcggaagaccctcatggtgcgctccgcggcctcttcgaagtccgtggactccttgccaaagacttagctgttgttgcattgcgcgaaggtcttgatttacctccgactgatgatccaatgcttcttgcgtacctcttggacccgtcaaacacgacgcccgaaggcgtagcccgtcgttacggcggcgagtggaccgaagatgcagcgaaacgcgcgttattggccgaacgtttgcacgccaatttattaggacgtttgcaaggcgaggagcgtctcctctggctttacgaagaagtggagaaaccattgagtcgtgtgctcggtcatatggaagctaccggtgtcaaattagacgtggcgtatttggagaatctcagccttgaagttgctgcccacatgcgccgcttggaggaagaagtattccgtttagcaggccgttcctttcgccttaactctcgcgatcagttagaacgtgtgttgttcgatgaacttggtctccctcctatcggcaagacagagaagaccggtaaacgtagcacttcagcggcggttttagaagctcttcgcgaagtccatcccattgtggacaagatcttgcagtaccgcgaactcgcgaaattgaaaggcacctatattgaccgtcttccggcattagtccacccgaaaacgggacgcctccatacccgcttcaaccaaacagccacggcgaccggtcgtttgtcctcctctgatccaaaccttcagaatattccagtacgtaccaaattgggccagaagatccgccgtgcgtttgtagctgaggagggttggcgtttagtggccctcgattatcgtcaaattgaattacgtgtccttgcccatctttctggcgatgagaacctcatccgcgtgtttcaggaaggcaaagacattcacactcaaacggcaagctggatgtttggattatcagctgaagcgatcgatcctttgatgcgtcgtgcagcgaagacgatcaatttcggtgttctctacggtatgagtgcctttcgtttgtcgcaggaattaggcattccctatgaagaagctcaggcgttcattcagaaatactttcaaagctatcccaaagttaaagcatggatcgagaagactctccgtgaaggccgccaccgtggttacgtagagaccttatttggacgtcgccgctatgttcccgatttaaacgctcgcgtgaaaggcaagcgtgaagccgccgaacgcatggcgttcaacatgcctgtacagggcacggcagctgacctcatgaaacttgcaatggtgcgcctttttccacaattgcgtgaagttggtgcccgcatgctcttgcaggtccacgatgaactcttgttagaagcgccaaaagagcgtgcggaagaggtggcagccctcgcgaaagaagttatggaaggcgtgtggcccttagcggtgcctcttgaagtcgaagttggtattggcgaggattggctggctgccaaagga

SEQ ID NO: 4302 - protein, 841 aa, synthetic construct
  REGION 1..841: note = Variant of DNA polymerase I from Thermus sp. strain 2.9
MHHHHHHGGSGVLPVFEPKGRVLLVDGHHLAYRNFFALKGLTTSLGEPVQGVYGFAKSLLKALKEDGDVVIVVFDAKAPSFRHEAYEAYKAGRAPTPEDFPRQLALMKELVDLLGLERLEVPGFEADDVLATLAKKAEREGYEVQILTADRDLFQLLSPRISVLHPEGHRITPEWLWEKYGLRPEQWVDFRALAGDPSDNIPGVKGIGEKTALKLLKEWGSLENLLKNLDQVKPESVREKILAHLEDLKLSRELSRVRTDLPLEVDFGRRREPDWEGLKAFLERLEFGSLLHEFGLLESPLLAEEAPWPPPEGAFLGYRLSRPEPMWAELLALAASAQGRVYRAEDPHGALRGLFEVRGLLAKDLAVVALREGLDLPPTDDPMLLAYLLDPSNTTPEGVARRYGGEWTEDAAKRALLAERLHANLLGRLQGEERLLWLYEEVEKPLSRVLGHMEATGVKLDVAYLENLSLEVAAHMRRLEEEVFRLAGRSFRLNSRDQLERVLFDELGLPPIGKTEKTGKRSTSAAVLEALREVHPIVDKILQYRELAKLKGTYIDRLPALVHPKTGRLHTRFNQTATATGRLSSSDPNLQNIPVRTKLGQKIRRAFVAEEGWRLVALDYRQIELRVLAHLSGDENLIRVFQEGKDIHTQTASWMFGLSAEAIDPLMRRAAKTINFGVLYGMSAFRLSQELGIPYEEAQAFIQKYFQSYPKVKAWIEKTLREGRHRGYVETLFGRRRYVPDLNARVKGKREAAERMAFNMPVQGTAADLMKLAMVRLFPQLREVGARMLLQVHDELLLEAPKERAEEVAALAKEVMEGVWPLAVPLEVEVGIGEDWLAAKG

SEQ ID NO: 4303 - DNA, 2523 bp, synthetic construct
  misc_feature 1..2523: note = Variant of DNA polymerase I from Thermus sp. strain 2.9
  source 1..2523: mol_type = other DNA
atgcaccatcatcatcatcatggcggtagcggcgtgttaccggtgttcgagcctaaaggtcgcgtgcttctggttgatggccatcatctcgcgtatcgtaacttctttgccctgaaaggattaaccaccagcctgggcgagccggtacagggtgtctacggctttgcaaagtcgctcctgaaagctctgaaagaagacggtgatgtggtgattgttgtctttgatgcgaaagcgccaagttttcgccacgaagcgtacgaagcttacaaagccgggcgtgctccaacgccggaagactttcctcgccaattggcgcttatgaaggaattagtggatttgcttggcctcgaacgcttggaagttcccggtttcgaggcagacgacgtattagcgactctcgcaaagaaagccgaacgtgagggctatgaagtccagatcttgacagcagatcgcgatcttttccagcttttatctccgcgcatctcggtgttacacccggaagggcatcgtatcaccccggaatggctctgggagaaatatggtttgcgtcccgaacaatgggtggattttcgcgccttagcaggcgatccgagcgacaatattccgggagttaaaggtatcggcgagaagacggcgctcaagctccttaaagaatgggggtcgttggagaacttgcttaagaatttagatcaggtcaaaccagagtcagtgcgtgagaagattcttgctcacctcgaagacctcaaattaagccgcgaattgtcccgtgtacgcaccgatttgccgctcgaagttgatttcggtcgccgccgcgaacctgactgggagggtcttaaagcgtttttagagcgtcttgaatttggttcgctcttgcatgaattcggccttttagaaagcccgttactggccgaagaagcaccttggccaccgcccgagggcgcgtttttaggttaccgtttgagtcgcccggaaccgatgtgggccgaattactggctcttgcagcgtctgcccagggacgtgtgtatcgcgcggaagaccctcatggtgcgctccgcggcctcttcgaagtccgtggactccttgccaaagacttagctgttgttgcattgcgcgaaggtcttgatttacctccgactgatgatccaatgcttcttgcgtacctcttggacccgtcaaacacgacgcccgaaggcgtagcccgtcgttacggcggcgagtggaccgaagatgcagcgaaacgcgcgttattggccgaacgtttgcacgccaatttattaggacgtttgcaaggcgaggaacgtctcctctggctttacgaagaagtggagaaaccattgagtcgcgtgctcgcgcatatggaagctaccggtgtcaaattagacgtggcgtatttggagaatctcagccttgaagttgctgcccacatgcgccgcttggaggaagaagtattccgtttagcaggccgttcctttcgccttaactctcgcgatcagttagaacgtgtgttgttcgatgaacttggtctccctcctatcggcaagacagagaagaccggtaaacgtagcacttcagcggcggttttagaagctcttcgcgaagtccatcccattgtggacaagatcttgcagtaccgcgaactcgcgaaattgaaaggcacctatattgaccgtcttccggcattagtccacccgaaaacgggacgcctccatacccgcttcaaccaaacagccacggcgaccggtcgtttgtcctcctctgatccaaaccttcagaatattccagtacgtaccccattgggccagaagatccgccgtgcgtttgtagctgaggagggttggcgtttagtggccctcgattatcgtcaaattgaattacgtgtccttgcccatctttctggcgatgagaacctcatccgcgtgtttcaggaaggcaaagacattcacactcaaacggcaagctggatgtttggattatcagctgaagcgatcgatcctttgatgcgtcgtgcagcgaagaccatcaatttcggtgttctctacggtatgagtgcctttcgtttgtcgcagggtttaggcattccctatgaagaagctcaggcgttcattcagaaatactttcaaagctatcccaaagttaaagcatggatcgagaagactctccgtgaaggccgcacacgtggttacgtagagaccttatttggacgtcgccgctatgttcccgatttaaacgctcgcgtgaaaggcaagcgtgaagccgccgaacgcatggcgttcaacatgcctgtacagggcacggcagctgacctcatgaaacttgcaatggtgcgcctttttccacaattgcgtgaagttggtgcccgcatgctcttgcaggtccacgatgaactcttgttagaagcgccaaaagagcgtgcggaagaggtggcagccctcgcgaaagaagttatggaaggcgtgtggcccttagcggtgcctcttgaagtcgaagttggtattggcgaggattggctggctgccaaagga

SEQ ID NO: 4304 - protein, 841 aa, synthetic construct
  REGION 1..841: note = Variant of DNA polymerase I from Thermus sp. strain 2.9
MHHHHHHGGSGVLPVFEPKGRVLLVDGHHLAYRNFFALKGLTTSLGEPVQGVYGFAKSLLKALKEDGDVVIVVFDAKAPSFRHEAYEAYKAGRAPTPEDFPRQLALMKELVDLLGLERLEVPGFEADDVLATLAKKAEREGYEVQILTADRDLFQLLSPRISVLHPEGHRITPEWLWEKYGLRPEQWVDFRALAGDPSDNIPGVKGIGEKTALKLLKEWGSLENLLKNLDQVKPESVREKILAHLEDLKLSRELSRVRTDLPLEVDFGRRREPDWEGLKAFLERLEFGSLLHEFGLLESPLLAEEAPWPPPEGAFLGYRLSRPEPMWAELLALAASAQGRVYRAEDPHGALRGLFEVRGLLAKDLAVVALREGLDLPPTDDPMLLAYLLDPSNTTPEGVARRYGGEWTEDAAKRALLAERLHANLLGRLQGEERLLWLYEEVEKPLSRVLAHMEATGVKLDVAYLENLSLEVAAHMRRLEEEVFRLAGRSFRLNSRDQLERVLFDELGLPPIGKTEKTGKRSTSAAVLEALREVHPIVDKILQYRELAKLKGTYIDRLPALVHPKTGRLHTRFNQTATATGRLSSSDPNLQNIPVRTPLGQKIRRAFVAEEGWRLVALDYRQIELRVLAHLSGDENLIRVFQEGKDIHTQTASWMFGLSAEAIDPLMRRAAKTINFGVLYGMSAFRLSQGLGIPYEEAQAFIQKYFQSYPKVKAWIEKTLREGRTRGYVETLFGRRRYVPDLNARVKGKREAAERMAFNMPVQGTAADLMKLAMVRLFPQLREVGARMLLQVHDELLLEAPKERAEEVAALAKEVMEGVWPLAVPLEVEVGIGEDWLAAKG

SEQ ID NO: 4305 - DNA, 2523 bp, synthetic construct
  misc_feature 1..2523: note = Variant of DNA polymerase I from Thermus sp. strain 2.9
  source 1..2523: mol_type = other DNA
atgcaccatcatcatcatcatggcggtagcggcgtgttaccggtgttcgagcctaaaggtcgcgtgcttctggttgatggccatcatctcgcgtatcgtaacttctttgccctgaaaggattaaccaccagcctgggcgagccggtacagggtgtctacggctttgcaaagtcgctcctgaaagctctgaaagaagacggtgatgtggtgattgttgtctttgatgcgaaagcgccaagttttcgccacgaagcgtacgaagcttacaaagccgggcgtgctccaacgccggaagactttcctcgccaattggcgcttatgaaggaattagtggatttgcttggcctcgaacgcttggaagttcccggtttcgaggcagacgacgtattagcgactctcgcaaagaaagccgaacgtgagggctatgaagtccagatcttgacagcagatcgcgatcttttccagcttttatctccgcgcatctcggtgttacacccggaagggcatcgtatcaccccggaatggctctgggagaaatatggtttgcgtcccgaacaatgggtggattttcgcgccttagcaggcgatccgagcgacaatattccgggagttaaaggtatcggcgagaagacggcgctcaagctccttaaagaatgggggtcgttggagaacttgcttaagaatttagatcaggtcaaaccagagtcagtgcgtgagaagattcttgctcacctcgaagacctcaaattaagccgcgaattgtcccgtgtacgcaccgatttgccgctcgaagttgatttcggtcgccgccgcgaacctgactgggagggtcttaaagcgtttttagagcgtcttgaatttggttcgctcttgcatgaattcggccttttagaaagcccgttactggccgaagaagcaccttggccaccgcccgagggcgcgtttttaggttaccgtttgagtcgcccggaaccgatgtgggccgaattactggctcttgcagcgtctgcccagggacgtgtgtatcgcgcggaagaccctcatggtgcgctccgcggcctcttcgaagtccgtggactccttgccaaagacttagctgttgttgcattgcgcgaaggtcttgatttacctccgactgatgatccaatgcttcttgcgtacctcttggacccgtcaaacacgacgcccgaaggcgtagcccgtcgttacggcggcgagtggaccgaagatgcagcgaaacgcgcgttattggccgaacgtttgcacgccaatttattaggacgtttgcaaggcgaggaacgtctcctctggctttacgaagaagtggagaaaccattgagtcgcgtgctcgcgcatatggaagctaccggtgtcaaattagacgtggcgtatttggagaatctcagccttgaagttgctgcccacatgcgccgcttggaggaagaagtattccgtttagcaggccgttcctttcgccttaactctcgcgatcagttagaacgtgtgttgttcgatgaacttggtctccctcctatcggcaagacagagaagaccggtaaacgtagcacttcagcggcggttttaagtgctcttcgcgaagtccatcccattgtggacaagatcttgcagtaccgcgaactcgcgaaattgaaaggcacctatattgaccgtcttccggcattagtccacccgaaaacgggacgcctccatacccgcttcaaccaaacagccacggcgaccggtcgtttgtcctcctctgatccaaaccttcagaatattccagtacgtaccccattgggccagaagatccgccgtgcgtttgtagctgaggagggttggcgtttagtggccctcgattatcgtcaaattgaattacgtgtccttgcccatctttctggcgatgagaacctcatccgcgtgtttcaggaaggcaaagacattcacactcaaacggcaagctggatgtttggattatcagctgaagcgatcgatcctttgatgcgtcgtgcagcgaagaccatcaatttcggtgttctctacggtatgagtgcctttcgtttgtcgcaggaattaggcattccctatgaagaagctcaggcgttcattcagaaatactttcaaagctatcccaaagttaaagcatggatcgagaagactctccgtgaaggccgcacacgtggttacgtagagaccttatttggacgtcgccgctatgttcccgatttaaacgctcgcgtgaaaggcaagcgtgaagccgccgaacgcatggcgttcaacatgcctgtacagggcacggcagctgacctcatgaaacttgcaatggtgcgcctttttccacaattgcgtgaagttggtgcccgcatgctcttgcaggtccacgatgaactcttgttagaagcgccaaaagagcgtgcggaagaggtggcagccctcgcgaaagaagttatggaaggcgtgtggcccttagcggtgcctcttgaagtcgaagttggtattggcgaggattggctggctgccaaagga

SEQ ID NO: 4306 - protein, 841 aa, synthetic construct
  REGION 1..841: note = Variant of DNA polymerase I from Thermus sp. strain 2.9
MHHHHHHGGSGVLPVFEPKGRVLLVDGHHLAYRNFFALKGLTTSLGEPVQGVYGFAKSLLKALKEDGDVVIVVFDAKAPSFRHEAYEAYKAGRAPTPEDFPRQLALMKELVDLLGLERLEVPGFEADDVLATLAKKAEREGYEVQILTADRDLFQLLSPRISVLHPEGHRITPEWLWEKYGLRPEQWVDFRALAGDPSDNIPGVKGIGEKTALKLLKEWGSLENLLKNLDQVKPESVREKILAHLEDLKLSRELSRVRTDLPLEVDFGRRREPDWEGLKAFLERLEFGSLLHEFGLLESPLLAEEAPWPPPEGAFLGYRLSRPEPMWAELLALAASAQGRVYRAEDPHGALRGLFEVRGLLAKDLAVVALREGLDLPPTDDPMLLAYLLDPSNTTPEGVARRYGGEWTEDAAKRALLAERLHANLLGRLQGEERLLWLYEEVEKPLSRVLAHMEATGVKLDVAYLENLSLEVAAHMRRLEEEVFRLAGRSFRLNSRDQLERVLFDELGLPPIGKTEKTGKRSTSAAVLSALREVHPIVDKILQYRELAKLKGTYIDRLPALVHPKTGRLHTRFNQTATATGRLSSSDPNLQNIPVRTPLGQKIRRAFVAEEGWRLVALDYRQIELRVLAHLSGDENLIRVFQEGKDIHTQTASWMFGLSAEAIDPLMRRAAKTINFGVLYGMSAFRLSQELGIPYEEAQAFIQKYFQSYPKVKAWIEKTLREGRTRGYVETLFGRRRYVPDLNARVKGKREAAERMAFNMPVQGTAADLMKLAMVRLFPQLREVGARMLLQVHDELLLEAPKERAEEVAALAKEVMEGVWPLAVPLEVEVGIGEDWLAAKG

SEQ ID NO: 4307 - DNA, 2523 bp, synthetic construct
  misc_feature 1..2523: note = Variant of DNA polymerase I from Thermus sp. strain 2.9
  source 1..2523: mol_type = other DNA
atgcaccatcatcatcatcatggcggtagcggcgtgttaccggtgttcgagcctaaaggtcgcgtgcttctggttgatggccatcatctcgcgtatcgtaacttctttgccctgaaaggattaaccaccagcctgggcgagccggtacagggtgtctacggctttgcaaagtcgctcctgaaagctctgaaagaagacggtgatgtggtgattgttgtctttgatgcgaaagcgccaagttttcgccacgaagcgtacgaagcttacaaagccgggcgtgctccaacgccggaagactttcctcgccaattggcgcttatgaaggaattagtggatttgcttggcctcgaacgcttggaagttcccggtttcgaggcagacgacgtattagcgactctcgcaaagaaagccgaacgtgagggctatgaagtccagatcttgacagcagatcgcgatcttttccagcttttatctccgcgcatctcggtgttacacccggaagggcatcgtatcaccccggaatggctctgggagaaatatggtttgcgtcccgaacaatgggtggattttcgcgccttagcaggcgatccgagcgacaatattccgggagttaaaggtatcggcgagaagacggcgctcaagctccttaaagaatgggggtcgttggagaacttgcttaagaatttagatcaggtcaaaccagagtcagtgcgtgagaagattcttgctcacctcgaagacctcaaattaagccgcgaattgtcccgtgtacgcaccgatttgccgctcgaagttgatttcggtcgccgccgcgaacctgactgggagggtcttaaagcgtttttagagcgtcttgaatttggttcgctcttgcatgaattcggccttttagaaagcccgttactggccgaagaagcaccttggccaccgcccgagggcgcgtttttaggttaccgtttgagtcgcccggaaccgatgtgggccgaattactggctcttgcagcgtctgcccagggacgtgtgtatcgcgcggaagaccctcatggtgcgctccgcggcctcttcgaagtccgtggactccttgccaaagacttagctgttgttgcattgcgcgaaggtcttgatttacctccgactgatgatccaatgcttcttgcgtacctcttggacccgtcaaacacgacgcccgaaggcgtagcccgtcgttacggcggcgagtggaccgaagatgcagcgaaacgcgcgttattggccgaacgtttgcacgccaatttattaggacgtttgcaaggcgaggaacgtctcctctggctttacgaagaagtggagaaaccattgagtcgcgtgctcgcgcatatggaagctaccggtgtcaaattagacgtggcgtatttggagaatctcagccttgaagttgctgcccacatgcgccgcttggaggaagaagtattccgtttagcaggccgttcctttcgccttaactctcgcgatcagttagaacgtgtgttgttcgatgaacttggtctccctcctatcggcaagacagagaagaccggtaaacgtagcacttcagcggcggttttagaagctcttcgcgaagtccatcccattgtggacaagatcttgcagtaccgcgaactcgcgaaattgaaaggcacctatattgaccgtcttccggcattagtccacccgaaaacgggacgcctccatacccgcttcaaccaaacagccacggcgaccggtcgtttgtcctcctctgatccaaaccttcagaatattccagtacgtaccccattgggccagaagatccgccgtgcgtttgtagctgaggagggttggcgtttagtggccctcgattatcgtcaaattgaattacgtgtccttgcccatctttctggcgatgagaacctcatccgcgtgtttcaggaaggcaaagacattcacactcaaacggcaagctggatgtttggattatcagctgaagcgatcgatcctttgatgcgtcgtgcagcgaagaccatcaatttcggtgttctctacggtatgagtgcctttcgtttgtcgcagactttaggcattccctatgaagaagctcaggcgttcattcagaaatactttcaaagctatcccaaagttaaagcatggatcgagaagactctccgtgaaggccgcacacgtggttacgtagagaccttatttggacgtcgccgctatgttcccgatttaaacgctcgcgtgaaaggcaagcgtgaagccgccgaacgcatggcgttcaacatgcctgtacagggcacggcagctgacctcatgaaacttgcaatggtgcgcctttttccacaattgcgtgaagttggtgcccgcatgctcttgcaggtccacgatgaactcttgttagaagcgccaaaagagcgtgcggaagaggtggcagccctcgcgaaagaagttatggaaggcgtgtggcccttagcggtgcctcttgaagtcgaagttggtattggcgaggattggctggctgccaaagga

SEQ ID NO: 4308 - protein, 841 aa, synthetic construct
  REGION 1..841: note = Variant of DNA polymerase I from Thermus sp. strain 2.9
MHHHHHHGGSGVLPVFEPKGRVLLVDGHHLAYRNFFALKGLTTSLGEPVQGVYGFAKSLLKALKEDGDVVIVVFDAKAPSFRHEAYEAYKAGRAPTPEDFPRQLALMKELVDLLGLERLEVPGFEADDVLATLAKKAEREGYEVQILTADRDLFQLLSPRISVLHPEGHRITPEWLWEKYGLRPEQWVDFRALAGDPSDNIPGVKGIGEKTALKLLKEWGSLENLLKNLDQVKPESVREKILAHLEDLKLSRELSRVRTDLPLEVDFGRRREPDWEGLKAFLERLEFGSLLHEFGLLESPLLAEEAPWPPPEGAFLGYRLSRPEPMWAELLALAASAQGRVYRAEDPHGALRGLFEVRGLLAKDLAVVALREGLDLPPTDDPMLLAYLLDPSNTTPEGVARRYGGEWTEDAAKRALLAERLHANLLGRLQGEERLLWLYEEVEKPLSRVLAHMEATGVKLDVAYLENLSLEVAAHMRRLEEEVFRLAGRSFRLNSRDQLERVLFDELGLPPIGKTEKTGKRSTSAAVLEALREVHPIVDKILQYRELAKLKGTYIDRLPALVHPKTGRLHTRFNQTATATGRLSSSDPNLQNIPVRTPLGQKIRRAFVAEEGWRLVALDYRQIELRVLAHLSGDENLIRVFQEGKDIHTQTASWMFGLSAEAIDPLMRRAAKTINFGVLYGMSAFRLSQTLGIPYEEAQAFIQKYFQSYPKVKAWIEKTLREGRTRGYVETLFGRRRYVPDLNARVKGKREAAERMAFNMPVQGTAADLMKLAMVRLFPQLREVGARMLLQVHDELLLEAPKERAEEVAALAKEVMEGVWPLAVPLEVEVGIGEDWLAAKG

SEQ ID NO: 4309 - DNA, 2523 bp, synthetic construct
  misc_feature 1..2523: note = Variant of DNA polymerase I from Thermus sp. strain 2.9
  source 1..2523: mol_type = other DNA
atgcaccatcatcatcatcatggcggtagcggcgtgttaccggtgttcgagcctaaaggtcgcgtgcttctggttgatggccatcatctcgcgtatcgtaacttctttgccctgaaaggattaaccaccagcctgggcgagccggtacagggtgtctacggctttgcaaagtcgctcctgaaagctctgaaagaagacggtgatgtggtgattgttgtctttgatgcgaaagcgccaagttttcgccacgaagcgtacgaagcttacaaagccgggcgtgctccaacgccggaagactttcctcgccaattggcgcttatgaaggaattagtggatttgcttggcctcgaacgcttggaagttcccggtttcgaggcagacgacgtattagcgactctcgcaaagaaagccgaacgtgagggctatgaagtccagatcttgacagcagatcgcgatcttttccagcttttatctccgcgcatctcggtgttacacccggaagggcatcgtatcaccccggaatggctctgggagaaatatggtttgcgtcccgaacaatgggtggattttcgcgccttagcaggcgatccgagcgacaatattccgggagttaaaggtatcggcgagaagacggcgctcaagctccttaaagaatgggggtcgttggagaacttgcttaagaatttagatcaggtcaaaccagagtcagtgcgtgagaagattcttgctcacctcgaagacctcaaattaagccgcgaattgtcccgtgtacgcaccgatttgccgctcgaagttgatttcggtcgccgccgcgaacctgactgggagggtcttaaagcgtttttagagcgtcttgaatttggttcgctcttgcatgaattcggccttttagaaagcccgttactggccgaagaagcaccttggccaccgcccgagggcgcgtttttaggttaccgtttgagtcgcccggaaccgatgtgggccgaattactggctcttgcagcgtctgcccagggacgtgtgtatcgcgcggaagaccctcatggtgcgctccgcggcctcttcgaagtccgtggactccttgccaaagacttagctgttgttgcattgcgcgaaggtcttgatttacctccgactgatgatccaatgcttcttgcgtacctcttggacccgtcaaacacgacgcccgaaggcgtagcccgtcgttacggcggcgagtggaccgaagatgcagcgaaacgcgcgttattggccgaacgtttgcacgccaatttattaggacgtttgcaaggcgaggaacgtctcctctggctttacgaagaagtggagaaaccattgagtcgcgtgctcgcgcatatggaagctaccggtgtcaaattagacgtggcgtatttggagaatctcagccttgaagttgctgcccacatgcgccgcttggaggaagaagtattccgtttagcaggccgttcctttcgccttaactctcgcgatcagttagaacgtgtgttgttcgatgaacttggtctccctcctatcggcaagacagagaagaccggtaaacgtagcacttcagcggcggttttagaagctcttcgcgaagtccatcccattgtggacaagatcttgcagtaccgcgaactcgcgaaattgaaaggcacctatattgaccgtcttccggcattagtccacccgaaaacgggacgcctccatacccgcttcaaccaaacagccacggcgaccggtcgtttgtcctcctctgatccaaaccttcagaatattccagtacgtaccccattgggccagaagatccgccgtgcgtttgtagctgaggagggttggcgtttagtggccctcgattatcgtcaaattgaattacgtgtccttgcccatctttctggcgatgagaacctcatccgcgtgtttcaggaaggcaaagacattcacactcaaacggcaagctggatgtttggattatcagctgaagcgatcgatcctttgatgcgtcgtgcagcgaagaccatcaatttcggtgttctctacggtatgagtgcctttcgtttgtcgcaggaatttcatattccctatgaagaagctcaggcgttcattcagaaatactttcaaagctatcccaaagttaaagcatggatcgagaagactctccgtgaaggccgcacacgtggttacgtagagaccttatttggacgtcgccgctatgttcccgatttaaacgctcgcgtgaaaggcaagcgtgaagccgccgaacgcatggcgttcaacatgcctgtacagggcacggcagctgacctcatgaaacttgcaatggtgcgcctttttccacaattgcgtgaagttggtgcccgcatgctcttgcaggtccacgatgaactcttgttagaagcgccaaaagagcgtgcggaagaggtggcagccctcgcgaaagaagttatggaaggcgtgtggcccttagcggtgcctcttgaagtcgaagttggtattggcgaggattggctggctgccaaagga

SEQ ID NO: 4310 - protein, 841 aa, synthetic construct
  REGION 1..841: note = Variant of DNA polymerase I from Thermus sp. strain 2.9
MHHHHHHGGSGVLPVFEPKGRVLLVDGHHLAYRNFFALKGLTTSLGEPVQGVYGFAKSLLKALKEDGDVVIVVFDAKAPSFRHEAYEAYKAGRAPTPEDFPRQLALMKELVDLLGLERLEVPGFEADDVLATLAKKAEREGYEVQILTADRDLFQLLSPRISVLHPEGHRITPEWLWEKYGLRPEQWVDFRALAGDPSDNIPGVKGIGEKTALKLLKEWGSLENLLKNLDQVKPESVREKILAHLEDLKLSRELSRVRTDLPLEVDFGRRREPDWEGLKAFLERLEFGSLLHEFGLLESPLLAEEAPWPPPEGAFLGYRLSRPEPMWAELLALAASAQGRVYRAEDPHGALRGLFEVRGLLAKDLAVVALREGLDLPPTDDPMLLAYLLDPSNTTPEGVARRYGGEWTEDAAKRALLAERLHANLLGRLQGEERLLWLYEEVEKPLSRVLAHMEATGVKLDVAYLENLSLEVAAHMRRLEEEVFRLAGRSFRLNSRDQLERVLFDELGLPPIGKTEKTGKRSTSAAVLEALREVHPIVDKILQYRELAKLKGTYIDRLPALVHPKTGRLHTRFNQTATATGRLSSSDPNLQNIPVRTPLGQKIRRAFVAEEGWRLVALDYRQIELRVLAHLSGDENLIRVFQEGKDIHTQTASWMFGLSAEAIDPLMRRAAKTINFGVLYGMSAFRLSQEFHIPYEEAQAFIQKYFQSYPKVKAWIEKTLREGRTRGYVETLFGRRRYVPDLNARVKGKREAAERMAFNMPVQGTAADLMKLAMVRLFPQLREVGARMLLQVHDELLLEAPKERAEEVAALAKEVMEGVWPLAVPLEVEVGIGEDWLAAKG

SEQ ID NO: 4311 - DNA, 2523 bp, synthetic construct
  misc_feature 1..2523: note = Variant of DNA polymerase I from Thermus sp. strain 2.9
  source 1..2523: mol_type = other DNA
atgcaccatcatcatcatcatggcggtagcggcgtgttaccggtgttcgagcctaaaggtcgcgtgcttctggttgatggccatcatctcgcgtatcgtaacttctttgccctgaaaggattaaccaccagcctgggcgagccggtacagggtgtctacggctttgcaaagtcgctcctgaaagctctgaaagaagacggtgatgtggtgattgttgtctttgatgcgaaagcgccaagttttcgccacgaagcgtacgaagcttacaaagccgggcgtgctccaacgccggaagactttcctcgccaattggcgcttatgaaggaattagtggatttgcttggcctcgaacgcttggaagttcccggtttcgaggcagacgacgtattagcgactctcgcaaagaaagccgaacgtgagggctatgaagtccagatcttgacagcagatcgcgatcttttccagcttttatctccgcgcatctcggtgttacacccggaagggcatcgtatcaccccggaatggctctgggagaaatatggtttgcgtcccgaacaatgggtggattttcgcgccttagcaggcgatccgagcgacaatattccgggagttaaaggtatcggcgagaagacggcgctcaagctccttaaagaatgggggtcgttggagaacttgcttaagaatttagatcaggtcaaaccagagtcagtgcgtgagaagattcttgctcacctcgaagacctcaaattaagccgcgaattgtcccgtgtacgcaccgatttgccgctcgaagttgatttcggtcgccgccgcgaacctgactgggagggtcttaaagcgtttttagagcgtcttgaatttggttcgctcttgcatgaattcggccttttagaaagcccgttactggccgaagaagcaccttggccaccgcccgagggcgcgtttttaggttaccgtttgagtcgcccggaaccgatgtgggccgaattactggctcttgcagcgtctgcccagggacgtgtgtatcgcgcggaagaccctcatggtgcgctccgcggcctcttcgaagtccgtggactccttgccaaagacttagctgttgttgcattgcgcgaaggtcttgatttacctccgactgatgatccaatgcttcttgcgtacctcttggacccgtcaaacacgacgcccgaaggcgtagcccgtcgttacggcggcgagtggaccgaagatgcagcgaaacgcgcgttattggccgaacgtttgcacgccaatttattaggacgtttgcaaggcgaggaacgtctcctctggctttacgaagaagtggagaaaccattgagtcgcgtgctcgcgcatatggaagctaccggtgtcaaattagacgtggcgtatttggagaatctcagccttgaagttgctgcccacatgcgccgcttggaggaagaagtattccgtttagcaggccgttcctttcgccttaactctcgcgatcagttagaacgtgtgttgttcgatgaacttggtctccctcctatcggcaagacagagaagaccggtaaacgtagcacttcagcggcggttttagaagctcttcgcgaagtccatcccattgtggacaagatcttgcagtaccgcgaactcgcgaaattgaaaggcacctatattgaccgtcttccggcattagtccacccgaaaacgggacgcctccatacccgcttcaaccaaacagccacggcgaccggtcgtttgtcctcctctgatccaaaccttcagaatattccagtacgtaccccattgggccagaagatccgccgtgcgtttgtagctgaggagggttggcgtttagtggccctcgattatcgtcaaattgaattacgtgtccttgcccatctttctggcgatgagaacctcatccgcgtgtttcaggaaggcaaagacattcacactcaaacggcaagctggatgtttggattatcagctgaagcgatcgatcctttgatgcgtcgtgcagcgaagaccatcaatttcggtgttctctacggtatgagtgcctttcgtttgtcgcaggaattaggcattccctatgaagaagctcaggcgttcattcagaaatactttcaaagctatcccaaagttaaagcatggatcgagaagactctccgtgaaggccgcacacgtggttacgtagagaccttatttggacgtcgccgctatgttcccgatttaaacgctcgcgtgaaaggcaagcgtgaagccgccgaacgcatggcgttcaacatgcctgtacagggcacggcagctgacctcatgaaacttgcaatggtgcgcctttttccacaattgcgtgaagttggtgcccgcatgctcttgcaggtccacgatgaactcttgttagaagcgccaaaagagcgtgcggaagaggtggcagccctcgcgggggaagttatggaaggcgtgtggcccttagcggtgcctcttgaagtcgaagttggtattggcgaggattggctggctgccaaagga

SEQ ID NO: 4312 - protein, 841 aa, synthetic construct
  REGION 1..841: note = Variant of DNA polymerase I from Thermus sp. strain 2.9
MHHHHHHGGSGVLPVFEPKGRVLLVDGHHLAYRNFFALKGLTTSLGEPVQGVYGFAKSLLKALKEDGDVVIVVFDAKAPSFRHEAYEAYKAGRAPTPEDFPRQLALMKELVDLLGLERLEVPGFEADDVLATLAKKAEREGYEVQILTADRDLFQLLSPRISVLHPEGHRITPEWLWEKYGLRPEQWVDFRALAGDPSDNIPGVKGIGEKTALKLLKEWGSLENLLKNLDQVKPESVREKILAHLEDLKLSRELSRVRTDLPLEVDFGRRREPDWEGLKAFLERLEFGSLLHEFGLLESPLLAEEAPWPPPEGAFLGYRLSRPEPMWAELLALAASAQGRVYRAEDPHGALRGLFEVRGLLAKDLAVVALREGLDLPPTDDPMLLAYLLDPSNTTPEGVARRYGGEWTEDAAKRALLAERLHANLLGRLQGEERLLWLYEEVEKPLSRVLAHMEATGVKLDVAYLENLSLEVAAHMRRLEEEVFRLAGRSFRLNSRDQLERVLFDELGLPPIGKTEKTGKRSTSAAVLEALREVHPIVDKILQYRELAKLKGTYIDRLPALVHPKTGRLHTRFNQTATATGRLSSSDPNLQNIPVRTPLGQKIRRAFVAEEGWRLVALDYRQIELRVLAHLSGDENLIRVFQEGKDIHTQTASWMFGLSAEAIDPLMRRAAKTINFGVLYGMSAFRLSQELGIPYEEAQAFIQKYFQSYPKVKAWIEKTLREGRTRGYVETLFGRRRYVPDLNARVKGKREAAERMAFNMPVQGTAADLMKLAMVRLFPQLREVGARMLLQVHDELLLEAPKERAEEVAALAGEVMEGVWPLAVPLEVEVGIGEDWLAAKG

SEQ ID NO: 4313 - DNA, 2523 bp, synthetic construct
  misc_feature 1..2523: note = Variant of DNA polymerase I from Thermus sp. strain 2.9
  source 1..2523: mol_type = other DNA
atgcaccatcatcatcatcatggcggtagcggcgtgttaccggtgttcgagcctaaaggtcgcgtgcttctggttgatggccatcatctcgcgtatcgtaacttctttgccctgaaaggattaaccaccagcctgggcgagccggtacagggtgtctacggctttgcaaagtcgctcctgaaagctctgaaagaagacggtgatgtggtgattgttgtctttgatgcgaaagcgccaagttttcgccacgaagcgtacgaagcttacaaagccgggcgtgctccaacgccggaagactttcctcgccaattggcgcttatgaaggaattagtggatttgcttggcctcgaacgcttggaagttcccggtttcgaggcagacgacgtattagcgactctcgcaaagaaagccgaacgtgagggctatgaagtccagatcttgacagcagatcgcgatcttttccagcttttatctccgcgcatctcggtgttacacccggaagggcatcgtatcaccccggaatggctctgggagaaatatggtttgcgtcccgaacaatgggtggattttcgcgccttagcaggcgatccgagcgacaatattccgggagttaaaggtatcggcgagaagacggcgctcaagctccttaaagaatgggggtcgttggagaacttgcttaagaatttagatcaggtcaaaccagagtcagtgcgtgagaagattcttgctcacctcgaagacctcaaattaagccgcgaattgtcccgtgtacgcaccgatttgccgctcgaagttgatttcggtcgccgccgcgaacctgactgggagggtcttaaagcgtttttagagcgtcttgaatttggttcgctcttgcatgaattcggccttttagaaagcccgttactggccgaagaagcaccttggccaccgcccgagggcgcgtttttaggttaccgtttgagtcgcccggaaccgatgtgggccgaattactggctcttgcagcgtctgcccagggacgtgtgtatcgcgcggaagaccctcatggtgcgctccgcggcctcttcgaagtccgtggactccttgccaaagacttagctgttgttgcattgcgcgaaggtcttgatttacctccgactgatgatccaatgcttcttgcgtacctcttggacccgtcaaacacgacgcccgaaggcgtagcccgtcgttacggcggcgagtggaccgaagatgcagcgaaacgcgcgttattggccgaacgtttgcacgccaatttattaggacgtttgcaaggcgaggaacgtctcctctggctttacgaagaagtggagaaaccattgagtcgcgtgctcgcgcatatggaagctaccggtgtcaaattagacgtggcgtatttggagaatctcagccttgaagttgctgcccacatgcgccgcttggaggaagaagtattccgtttagcaggccgttcctttcgccttaactctcgcgatcagttagaacgtgtgttgttcgatgaacttggtctccctcctatcggcaagacagagaagaccggtaaacgtagcacttcagcggcggttttagaagctcttcgcgaagtccatcccattgtggacaagatcttgcagtaccgcgaactcgcgaaattgaaaggcacctatattgaccgtcttccggcattagtccacccgaaaacgggacgcctccatacccgcttcaaccaaacagccacggcgaccggtcgtttgtcctcctctgatccaaaccttcagaatattccagtacgtaccccattgggccagaagatccgccgtgcgtttgtagctgaggagggttggcgtttagtggccctcgattatcgtcaaattgaattacgtgtccttgcccatctttctggcgatgagaacctcatccgcgtgtttcaggaaggcaaagacattcacactcaaacggcaagctggatgtttggattatcagctgaagcgatcgatcctttgatgcgtcgtgcagcgaagaccatcaatttcggtgttctctacggtatgagtgcctttcgtttgtcgcaggaattaggcattccctatgaagaagctcaggcgttcattcagaaatactttcaaagctatcccaaagttaaagcatggatcgagaagactctccgtgaaggccgcacacgtggttacgtagagaccttatttggacgtcgccgctatgttcccgatttaaacgctcgcgtgaaaggcaagcgtgaagccgccgaacgcatggcgttcaacatgcctgtacagggcacggcagctgacctcatgaaacttgcaatggtgcgcctttttccacaattgcgtgaagttggtgcccgcatgctcttgcaggtccacgatgaactcttgttagaagcgccaaaagagcgtgcggaagaggtggcagccctcgcgaaagaagttatggaaggcgtgtggcccttagcggtgtatcttgaagtcgaagttggtattggcgaggattggctggctgccaaagga

SEQ ID NO: 4314 - protein, 841 aa, synthetic construct
  REGION 1..841: note = Variant of DNA polymerase I from Thermus sp. strain 2.9
MHHHHHHGGSGVLPVFEPKGRVLLVDGHHLAYRNFFALKGLTTSLGEPVQGVYGFAKSLLKALKEDGDVVIVVFDAKAPSFRHEAYEAYKAGRAPTPEDFPRQLALMKELVDLLGLERLEVPGFEADDVLATLAKKAEREGYEVQILTADRDLFQLLSPRISVLHPEGHRITPEWLWEKYGLRPEQWVDFRALAGDPSDNIPGVKGIGEKTALKLLKEWGSLENLLKNLDQVKPESVREKILAHLEDLKLSRELSRVRTDLPLEVDFGRRREPDWEGLKAFLERLEFGSLLHEFGLLESPLLAEEAPWPPPEGAFLGYRLSRPEPMWAELLALAASAQGRVYRAEDPHGALRGLFEVRGLLAKDLAVVALREGLDLPPTDDPMLLAYLLDPSNTTPEGVARRYGGEWTEDAAKRALLAERLHANLLGRLQGEERLLWLYEEVEKPLSRVLAHMEATGVKLDVAYLENLSLEVAAHMRRLEEEVFRLAGRSFRLNSRDQLERVLFDELGLPPIGKTEKTGKRSTSAAVLEALREVHPIVDKILQYRELAKLKGTYIDRLPALVHPKTGRLHTRFNQTATATGRLSSSDPNLQNIPVRTPLGQKIRRAFVAEEGWRLVALDYRQIELRVLAHLSGDENLIRVFQEGKDIHTQTASWMFGLSAEAIDPLMRRAAKTINFGVLYGMSAFRLSQELGIPYEEAQAFIQKYFQSYPKVKAWIEKTLREGRTRGYVETLFGRRRYVPDLNARVKGKREAAERMAFNMPVQGTAADLMKLAMVRLFPQLREVGARMLLQVHDELLLEAPKERAEEVAALAKEVMEGVWPLAVYLEVEVGIGEDWLAAKG

SEQ ID NO: 4315 - DNA, 2523 bp, synthetic construct
  misc_feature 1..2523: note = Variant of DNA polymerase I from Thermus sp. strain 2.9
  source 1..2523: mol_type = other DNA
atgcaccatcatcatcatcatggcggtagcggcgtgttaccggtgttcgagcctaaaggtcgcgtgcttctggttgatggccatcatctcgcgtatcgtaacttctttgccctgaaaggattaaccaccagcctgggcgagccggtacagggtgtctacggctttgcaaagtcgctcctgaaagctctgaaagaagacggtgatgtggtgattgttgtctttgatgcgaaagcgccaagttttcgccacgaagcgtacgaagcttacaaagccgggcgtgctccaacgccggaagactttcctcgccaattggcgcttatgaaggaattagtggatttgcttggcctcgaacgcttggaagttcccggtttcgaggcagacgacgtattagcgactctcgcaaagaaagccgaacgtgagggctatgaagtccagatcttgacagcagatcgcgatcttttccagcttttatctccgcgcatctcggtgttacacccggaagggcatcgtatcaccccggaatggctctgggagaaatatggtttgcgtcccgaacaatgggtggattttcgcgccttagcaggcgatccgagcgacaatattccgggagttaaaggtatcggcgagaagacggcgctcaagctccttaaagaatgggggtcgttggagaacttgcttaagaatttagatcaggtcaaaccagagtcagtgcgtgagaagattcttgctcacctcgaagacctcaaattaagccgcgaattgtcccgtgtacgcaccgatttgccgctcgaagttgatttcggtcgccgccgcgaacctgactgggagggtcttaaagcgtttttagagcgtcttgaatttggttcgctcttgcatgaattcggccttttagaaagcccgttactggccgaagaagcaccttggccaccgcccgagggcgcgtttttaggttaccgtttgagtcgcccggaaccgatgtgggccgaattactggctcttgcagcgtctgcccagggacgtgtgtatcgcgcggaagaccctcatggtgcgctccgcggcctcttcgaagtccgtggactccttgccaaagacttagctgttgttgcattgcgcgaaggtcttgatttacctccgactgatgatccaatgcttcttgcgtacctctcggacccgtcaaacacgacgcccgaaggcgtagcccgtcgttacggcggcgagtggaccgaagatgcagcgaaacgcgcgttattggccgaacgtttgcacgccaatttattaggacgtttgcaaggcgaggaacgtctcctctggctttacgaagaagtggagaaaccattgagtcgcgtgctcgcgcatatggaagctaccggtgtcaaattagacgtggcgtatttggagaatctcagccttgaagttgctgcccacatgcgccgcttggaggaagaagtattccgtttagcaggccgttcctttcgccttaactctcgcgatcagttagaacgtgtgttgttcgatgaacttggtctccctcctatcggcaagacagagaagaccggtaaacgtagcacttcagcggcggttttagaagctcttcgcgaagtccatcccattgtggacaagatcttgcagtaccgcgaactcgcgaaattgaaaggcacctatattgaccgtcttccggcattagtccacccgaaaacgggacgcctccatacccgcttcaaccaaacagccacggcgaccggtcgtttgtcctcctctgatccaaaccttcagaatattccagtacgtaccccattgggccagaagatccgccgtgcgtttgtagctgaggagggttggcgtttagtggccctcgattatcgtcaaattgaattacgtgtccttgcccatctttctggcgatgagaacctcatccgcgtgtttcaggaaggcaaagacattcacactcaaacggcaagctggatgtttggattatcagctgaagcgatcgatcctttgatgcgtcgtgcagcgaagaccatcaatttcggtgttctctacggtatgagtgcctttcgtttgtcgcaggaattaggcattccctatgaagaagctcaggcgttcattcagaaatactttcaaagctatcccaaagttaaagcatggatcgagaagactctccgtgaaggccgcacacgtggttacgtagagaccttatttggacgtcgccgctatgttcccgatttaaacgctcgcgtgaaaggcaagcgtgaagccgccgaacgcatggcgttcaacatgcctgtacagggcacggcagctgacctcatgaaacttgcaatggtgcgcctttttccacaattgcgtgaagttggtgcccgcatgctcttgcaggtccacgatgaactcttgttagaagcgccaaaagagcgtgcggaagaggtggcagccctcgcgaaagaagttatggaaggcgtgtggcccttagcggtgcctcttgaagtcgaagttggtattggcgaggattggctggctgccaaagga

SEQ ID NO: 4316 - protein, 841 aa, synthetic construct
  REGION 1..841: note = Variant of DNA polymerase I from Thermus sp. strain 2.9
MHHHHHHGGSGVLPVFEPKGRVLLVDGHHLAYRNFFALKGLTTSLGEPVQGVYGFAKSLLKALKEDGDVVIVVFDAKAPSFRHEAYEAYKAGRAPTPEDFPRQLALMKELVDLLGLERLEVPGFEADDVLATLAKKAEREGYEVQILTADRDLFQLLSPRISVLHPEGHRITPEWLWEKYGLRPEQWVDFRALAGDPSDNIPGVKGIGEKTALKLLKEWGSLENLLKNLDQVKPESVREKILAHLEDLKLSRELSRVRTDLPLEVDFGRRREPDWEGLKAFLERLEFGSLLHEFGLLESPLLAEEAPWPPPEGAFLGYRLSRPEPMWAELLALAASAQGRVYRAEDPHGALRGLFEVRGLLAKDLAVVALREGLDLPPTDDPMLLAYLSDPSNTTPEGVARRYGGEWTEDAAKRALLAERLHANLLGRLQGEERLLWLYEEVEKPLSRVLAHMEATGVKLDVAYLENLSLEVAAHMRRLEEEVFRLAGRSFRLNSRDQLERVLFDELGLPPIGKTEKTGKRSTSAAVLEALREVHPIVDKILQYRELAKLKGTYIDRLPALVHPKTGRLHTRFNQTATATGRLSSSDPNLQNIPVRTPLGQKIRRAFVAEEGWRLVALDYRQIELRVLAHLSGDENLIRVFQEGKDIHTQTASWMFGLSAEAIDPLMRRAAKTINFGVLYGMSAFRLSQELGIPYEEAQAFIQKYFQSYPKVKAWIEKTLREGRTRGYVETLFGRRRYVPDLNARVKGKREAAERMAFNMPVQGTAADLMKLAMVRLFPQLREVGARMLLQVHDELLLEAPKERAEEVAALAKEVMEGVWPLAVPLEVEVGIGEDWLAAKG

SEQ ID NO: 4317 - DNA, 2523 bp, synthetic construct
  misc_feature 1..2523: note = Variant of DNA polymerase I from Thermus sp. strain 2.9
  source 1..2523: mol_type = other DNA
atgcaccatcatcatcatcatggcggtagcggcgtgttaccggtgttcgagcctaaaggtcgcgtgcttctggttgatggccatcatctcgcgtatcgtaacttctttgccctgaaaggattaaccaccagcctgggcgagccggtacagggtgtctacggctttgcaaagtcgctcctgaaagctctgaaagaagacggtgatgtggtgattgttgtctttgatgcgaaagcgccaagttttcgccacgaagcgtacgaagcttacaaagccgggcgtgctccaacgccggaagactttcctcgccaattggcgcttatgaaggaattagtggatttgcttggcctcgaacgcttggaagttcccggtttcgaggcagacgacgtattagcgactctcgcaaagaaagccgaacgtgagggctatgaagtccagatcttgacagcagatcgcgatcttttccagcttttatctccgcgcatctcggtgttacacccggaagggcatcgtatcaccccggaatggctctgggagaaatatggtttgcgtcccgaacaatgggtggattttcgcgccttagcaggcgatccgagcgacaatattccgggagttaaaggtatcggcgagaagacggcgctcaagctccttaaagaatgggggtcgttggagaacttgcttaagaatttagatcaggtcaaaccagagtcagtgcgtgagaagattcttgctcacctcgaagacctcaaattaagccgcgaattgtcccgtgtacgcaccgatttgccgctcgaagttgatttcggtcgccgccgcgaacctgactgggagggtcttaaagcgtttttagagcgtcttgaatttggttcgctcttgcatgaattcggccttttagaaagcccgttactggccgaagaagcaccttggccaccgcccgagggcgcgtttttaggttaccgtttgagtcgcccggaaccgatgtgggccgaattactggctcttgcagcgtctgcccagggacgtgtgtatcgcgcggaagaccctcatggtgcgctccgcggcctcttcgaagtccgtggactccttgccaaagacttagctgttctggcattgcgcgaaggtcttgatttacctccgactgatgatccaatgcttcttgcgtacctcttggacccgtcaaacacgacgcccgaaggcgtagcccgtcgttacggcggcgagtggaccgaagatgcagcgaaacgcgcgttattggccgaacgtttgcacgccaatttattaggacgtttgcaaggcgaggaacgtctcctctggctttacgaagaagtggagaaaccattgagtcgcgtgctcgcgcatatggaagctaccggtgtcaaattagacgtggcgtatttggagaatctcagccttgaagttgctgcccacatgcgccgcttggaggaagaagtattccgtttagcaggccgttcctttcgccttaactctcgcgatcagttagaacgtgtgttgttcgatgaacttggtctccctcctatcggcaagacagagaagaccggtaaacgtagcacttcagcggcggttttagaagctcttcgcgaagtccatcccattgtggacaagatcttgcagtaccgcgaactcgcgaaattgaaaggcacctatattgaccgtcttccggcattagtccacccgaaaacgggacgcctccatacccgcttcaaccaaacagccacggcgaccggtcgtttgtcctcctctgatccaaaccttcagaatattccagtacgtaccccattgggccagaagatccgccgtgcgtttgtagctgaggagggttggcgtttagtggccctcgattatcgtcaaattgaattacgtgtccttgcccatctttctggcgatgagaacctcatccgcgtgtttcaggaaggcaaagacattcacactcaaacggcaagctggatgtttggattatcagctgaagcgatcgatcctttgatgcgtcgtgcagcgaagaccatcaatttcggtgttctctacggtatgagtgcctttcgtttgtcgcaggaattaggcattccctatgaagaagctcaggcgttcattcagaaatactttcaaagctatcccaaagttaaagcatggatcgagaagactctccgtgaaggccgcacacgtggttacgtagagaccttatttggacgtcgccgctatgttcccgatttaaacgctcgcgtgaaaggcaagcgtgaagccgccgaacgcatggcgttcaacatgcctgtacagggcacggcagctgacctcatgaaacttgcaatggtgcgcctttttccacaattgcgtgaagttggtgcccgcatgctcttgcaggtccacgatgaactcttgttagaagcgccaaaagagcgtgcggaagaggtggcagccctcgcgaaagaagttatggaaggcgtgtggcccttagcggtgcctcttgaagtcgaagttggtattggcgaggattggctggctgccaaagga

SEQ ID NO: 4318 - protein, 841 aa, synthetic construct
  REGION 1..841: note = Variant of DNA polymerase I from Thermus sp. strain 2.9
MHHHHHHGGSGVLPVFEPKGRVLLVDGHHLAYRNFFALKGLTTSLGEPVQGVYGFAKSLLKALKEDGDVVIVVFDAKAPSFRHEAYEAYKAGRAPTPEDFPRQLALMKELVDLLGLERLEVPGFEADDVLATLAKKAEREGYEVQILTADRDLFQLLSPRISVLHPEGHRITPEWLWEKYGLRPEQWVDFRALAGDPSDNIPGVKGIGEKTALKLLKEWGSLENLLKNLDQVKPESVREKILAHLEDLKLSRELSRVRTDLPLEVDFGRRREPDWEGLKAFLERLEFGSLLHEFGLLESPLLAEEAPWPPPEGAFLGYRLSRPEPMWAELLALAASAQGRVYRAEDPHGALRGLFEVRGLLAKDLAVLALREGLDLPPTDDPMLLAYLLDPSNTTPEGVARRYGGEWTEDAAKRALLAERLHANLLGRLQGEERLLWLYEEVEKPLSRVLAHMEATGVKLDVAYLENLSLEVAAHMRRLEEEVFRLAGRSFRLNSRDQLERVLFDELGLPPIGKTEKTGKRSTSAAVLEALREVHPIVDKILQYRELAKLKGTYIDRLPALVHPKTGRLHTRFNQTATATGRLSSSDPNLQNIPVRTPLGQKIRRAFVAEEGWRLVALDYRQIELRVLAHLSGDENLIRVFQEGKDIHTQTASWMFGLSAEAIDPLMRRAAKTINFGVLYGMSAFRLSQELGIPYEEAQAFIQKYFQSYPKVKAWIEKTLREGRTRGYVETLFGRRRYVPDLNARVKGKREAAERMAFNMPVQGTAADLMKLAMVRLFPQLREVGARMLLQVHDELLLEAPKERAEEVAALAKEVMEGVWPLAVPLEVEVGIGEDWLAAKG

SEQ ID NO: 4319 - DNA, 2523 bp, synthetic construct
  misc_feature 1..2523: note = Variant of DNA polymerase I from Thermus sp. strain 2.9
  source 1..2523: mol_type = other DNA
atgcaccatcatcatcatcatggcggtagcggcgtgttaccggtgttcgagcctaaaggtcgcgtgcttctggttgatggccatcatctcgcgtatcgtaacttctttgccctgaaaggattaaccaccagcctgggcgagccggtacagggtgtctacggctttgcaaagtcgctcctgaaagctctgaaagaagacggtgatgtggtgattgttgtctttgatgcgaaagcgccaagttttcgccacgaagcgtacgaagcttacaaagccgggcgtgctccaacgccggaagactttcctcgccaattggcgcttatgaaggaattagtggatttgcttggcctcgaacgcttggaagttcccggtttcgaggcagacgacgtattagcgactctcgcaaagaaagccgaacgtgagggctatgaagtccagatcttgacagcagatcgcgatcttttccagcttttatctccgcgcatctcggtgttacacccggaagggcatcgtatcaccccggaatggctctgggagaaatatggtttgcgtcccgaacaatgggtggattttcgcgccttagcaggcgatccgagcgacaatattccgggagttaaaggtatcggcgagaagacggcgctcaagctccttaaagaatgggggtcgttggagaacttgcttaagaatttagatcaggtcaaaccagagtcagtgcgtgagaagattcttgctcacctcgaagacctcaaattaagccgcgaattgtcccgtgtacgcaccgatttgccgctcgaagttgatttcggtcgccgccgcgaacctgactgggagggtcttaaagcgtttttagagcgtcttgaatttggttcgctcttgcatgaattcggccttttagaaagcccgttactggccgaagaagcaccttggccaccgaaggagggcgcgtttttaggttaccgtttgagtcgcccggaaccgatgtgggccgaattactggctcttgcagcgtctgcccagggacgtgtgtatcgcgcggaagaccctcatggtgcgctccgcggcctcttcgaagtccgtggactccttgccaaagacttagctgttgttgcattgcgcgaaggtcttgatttacctccgactgatgatccaatgcttcttgcgtacctcttggacccgtcaaacacgacgcccgaaggcgtagcccgtcgttacggcggcgagtggaccgaagatgcagcgaaacgcgcgttattggccgaacgtttgcacgccaatttattaggacgtttgcaaggcgaggaacgtctcctctggctttacgaagaagtggagaaaccattgagtcgcgtgctcgcgcatatggaagctaccggtgtcaaattagacgtggcgtatttggagaatctcagccttgaagttgctgcccacatgcgccgcttggaggaagaagtattccgtttagcaggccgttcctttcgccttaactctcgcgatcagttagaacgtgtgttgttcgatgaacttggtctccctcctatcggcaagacagagaagaccggtaaacgtagcacttcagcggcggttttagaagctcttcgcgaagtccatcccattgtggacaagatcttgcagtaccgcgaactcgcgaaattgaaaggcacctatattgaccgtcttccggcattagtccacccgaaaacgggacgcctccatacccgcttcaaccaaacagccacggcgaccggtcgtttgtcctcctctgatccaaaccttcagaatattccagtacgtaccccattgggccagaagatccgccgtgcgtttgtagctgaggagggttggcgtttagtggccctcgattatcgtcaaattgaattacgtgtccttgcccatctttctggcgatgagaacctcatccgcgtgtttcaggaaggcaaagacattcacactcaaacggcaagctggatgtttggattatcagctgaagcgatcgatcctttgatgcgtcgtgcagcgaagaccatcaatttcggtgttctctacggtatgagtgcctttcgtttgtcgcaggaattaggcattccctatgaagaagctcaggcgttcattcagaaatactttcaaagctatcccaaagttaaagcatggatcgagaagactctccgtgaaggccgcacacgtggttacgtagagaccttatttggacgtcgccgctatgttcccgatttaaacgctcgcgtgaaaggcaagcgtgaagccgccgaacgcatggcgttcaacatgcctgtacagggcacggcagctgacctcatgaaacttgcaatggtgcgcctttttccacaattgcgtgaagttggtgcccgcatgctcttgcaggtccacgatgaactcttgttagaagcgccaaaagagcgtgcggaagaggtggcagccctcgcgaaagaagttatggaaggcgtgtggcccttagcggtgcctcttgaagtcgaagttggtattggcgaggattggctggctgccaaagga

SEQ ID NO: 4320 - protein, 841 aa, synthetic construct
  REGION 1..841: note = Variant of DNA polymerase I from Thermus sp. strain 2.9
MHHHHHHGGSGVLPVFEPKGRVLLVDGHHLAYRNFFALKGLTTSLGEPVQGVYGFAKSLLKALKEDGDVVIVVFDAKAPSFRHEAYEAYKAGRAPTPEDFPRQLALMKELVDLLGLERLEVPGFEADDVLATLAKKAEREGYEVQILTADRDLFQLLSPRISVLHPEGHRITPEWLWEKYGLRPEQWVDFRALAGDPSDNIPGVKGIGEKTALKLLKEWGSLENLLKNLDQVKPESVREKILAHLEDLKLSRELSRVRTDLPLEVDFGRRREPDWEGLKAFLERLEFGSLLHEFGLLESPLLAEEAPWPPKEGAFLGYRLSRPEPMWAELLALAASAQGRVYRAEDPHGALRGLFEVRGLLAKDLAVVALREGLDLPPTDDPMLLAYLLDPSNTTPEGVARRYGGEWTEDAAKRALLAERLHANLLGRLQGEERLLWLYEEVEKPLSRVLAHMEATGVKLDVAYLENLSLEVAAHMRRLEEEVFRLAGRSFRLNSRDQLERVLFDELGLPPIGKTEKTGKRSTSAAVLEALREVHPIVDKILQYRELAKLKGTYIDRLPALVHPKTGRLHTRFNQTATATGRLSSSDPNLQNIPVRTPLGQKIRRAFVAEEGWRLVALDYRQIELRVLAHLSGDENLIRVFQEGKDIHTQTASWMFGLSAEAIDPLMRRAAKTINFGVLYGMSAFRLSQELGIPYEEAQAFIQKYFQSYPKVKAWIEKTLREGRTRGYVETLFGRRRYVPDLNARVKGKREAAERMAFNMPVQGTAADLMKLAMVRLFPQLREVGARMLLQVHDELLLEAPKERAEEVAALAKEVMEGVWPLAVPLEVEVGIGEDWLAAKG

SEQ ID NO: 4321 - DNA, 2523 bp, synthetic construct
  misc_feature 1..2523: note = Variant of DNA polymerase I from Thermus sp. strain 2.9
  source 1..2523: mol_type = other DNA
atgcaccatcatcatcatcatggcggtagcggcgtgttaccggtgttcgagcctaaaggtcgcgtgcttctggttgatggccatcatctcgcgtatcgtaacttctttgccctgaaaggattaaccaccagcctgggcgagccggtacagggtgtctacggctttgcaaagtcgctcctgaaagctctgaaagaagacggtgatgtggtgattgttgtctttgatgcgaaagcgccaagttttcgccacgaagcgtacgaagcttacaaagccgggcgtgctccaacgccggaagactttcctcgccaattggcgcttatgaaggaattagtggatttgcttggcctcgaacgcttggaagttcccggtttcgaggcagacgacgtattagcgactctcgcaaagaaagccgaacgtgagggctatgaagtccagatcttgacagcagatcgcgatcttttccagcttttatctccgcgcatctcggtgttacacccggaagggcatcgtatcaccccggaatggctctgggagaaatatggtttgcgtcccgaacaatgggtggattttcgcgccttagcaggcgatccgagcgacaatattccgggagttaaaggtatcggcgagaagacggcgctcaagctccttaaagaatgggggtcgttggagaacttgcttaagaatttagatcaggtcaaaccagagtcagtgcgtgagaagattcttgctcacctcgaagacctcaaattaagccgcgaattgtcccgtgtacgcaccgatttgccgctcgaagttgatttcggtcgccgccgcgaacctgactgggagggtcttaaagcgtttttagagcgtcttgaatttggttcgctcttgcatgaattcggccttttagaaagcccgttactggccgaagaagcaccttggccaccgcccgagggcgcgtttttaggttaccgtttgagtcgcccggaaccgatgtgggccgaattactggctcttgcagcgtctgcccagggacgtgtgtatcgcgcggaagaccctcatggtgcgctccgcggcctcttcgaagtccgtggactccttgccaaagacttagctgttgttgcattgcgcgaaggtcttgatttacctccgactgatgatccaatgcttcttgcgtacctcttggacccgtcaaacacgacgcccgaaggcgtagcccgtcgttacggcggcgagtggaccgaagatgcagcgaaacgcgcgttattggccgaacgtttgcacgccaatttattaggacgtttgcaaggcgaggaacgtctcctctggctttacgaagaagtggagaaaccattgagtcgcgtgctcgcgcatatggaagctaccggtgtcaaattagacgtggcgtatttggagaatctcagccttgaagttgctgcccacatgcgccgcttggaggaagaagtattccgtttagcaggccagtcctttcgccttaactctcgcgatcagttagaacgtgtgttgttcgatgaacttggtctccctcctatcggcaagacagagaagaccggtaaacgtagcacttcagcggcggttttagaagctcttcgcgaagtccatcccattgtggacaagatcttgcagtaccgcgaactcgcgaaattgaaaggcacctatattgaccgtcttccggcattagtccacccgaaaacgggacgcctccatacccgcttcaaccaaacagccacggcgaccggtcgtttgtcctcctctgatccaaaccttcagaatattccagtacgtaccccattgggccagaagatccgccgtgcgtttgtagctgaggagggttggcgtttagtggccctcgattatcgtcaaattgaattacgtgtccttgcccatctttctggcgatgagaacctcatccgcgtgtttcaggaaggcaaagacattcacactcaaacggcaagctggatgtttggattatcagctgaagcgatcgatcctttgatgcgtcgtgcagcgaagaccatcaatttcggtgttctctacggtatgagtgcctttcgtttgtcgcaggaattaggcattccctatgaagaagctcaggcgttcattcagaaatactttcaaagctatcccaaagttaaagcatggatcgagaagactctccgtgaaggccgcacacgtggttacgtagagaccttatttggacgtcgccgctatgttcccgatttaaacgctcgcgtgaaaggcaagcgtgaagccgccgaacgcatggcgttcaacatgcctgtacagggcacggcagctgacctcatgaaacttgcaatggtgcgcctttttccacaattgcgtgaagttggtgcccgcatgctcttgcaggtccacgatgaactcttgttagaagcgccaaaagagcgtgcggaagaggtggcagccctcgcgaaagaagttatggaaggcgtgtggcccttagcggtgcctcttgaagtcgaagttggtattggcgaggattggctggctgccaaagga

SEQ ID NO: 4322 - protein, 841 aa, synthetic construct
  REGION 1..841: note = Variant of DNA polymerase I from Thermus sp. strain 2.9
MHHHHHHGGSGVLPVFEPKGRVLLVDGHHLAYRNFFALKGLTTSLGEPVQGVYGFAKSLLKALKEDGDVVIVVFDAKAPSFRHEAYEAYKAGRAPTPEDFPRQLALMKELVDLLGLERLEVPGFEADDVLATLAKKAEREGYEVQILTADRDLFQLLSPRISVLHPEGHRITPEWLWEKYGLRPEQWVDFRALAGDPSDNIPGVKGIGEKTALKLLKEWGSLENLLKNLDQVKPESVREKILAHLEDLKLSRELSRVRTDLPLEVDFGRRREPDWEGLKAFLERLEFGSLLHEFGLLESPLLAEEAPWPPPEGAFLGYRLSRPEPMWAELLALAASAQGRVYRAEDPHGALRGLFEVRGLLAKDLAVVALREGLDLPPTDDPMLLAYLLDPSNTTPEGVARRYGGEWTEDAAKRALLAERLHANLLGRLQGEERLLWLYEEVEKPLSRVLAHMEATGVKLDVAYLENLSLEVAAHMRRLEEEVFRLAGQSFRLNSRDQLERVLFDELGLPPIGKTEKTGKRSTSAAVLEALREVHPIVDKILQYRELAKLKGTYIDRLPALVHPKTGRLHTRFNQTATATGRLSSSDPNLQNIPVRTPLGQKIRRAFVAEEGWRLVALDYRQIELRVLAHLSGDENLIRVFQEGKDIHTQTASWMFGLSAEAIDPLMRRAAKTINFGVLYGMSAFRLSQELGIPYEEAQAFIQKYFQSYPKVKAWIEKTLREGRTRGYVETLFGRRRYVPDLNARVKGKREAAERMAFNMPVQGTAADLMKLAMVRLFPQLREVGARMLLQVHDELLLEAPKERAEEVAALAKEVMEGVWPLAVPLEVEVGIGEDWLAAKG

SEQ ID NO: 4323 - DNA, 2523 bp, synthetic construct
  misc_feature 1..2523: note = Variant of DNA polymerase I from Thermus sp. strain 2.9
  source 1..2523: mol_type = other DNA
atgcaccatcatcatcatcatggcggtagcggcgtgttaccggtgttcgagcctaaaggtcgcgtgcttctggttgatggccatcatctcgcgtatcgtaacttctttgccctgaaaggattaaccaccagcctgggcgagccggtacagggtgtctacggctttgcaaagtcgctcctgaaagctctgaaagaagacggtgatgtggtgattgttgtctttgatgcgaaagcgccaagttttcgccacgaagcgtacgaagcttacaaagccgggcgtgctccaacgccggaagactttcctcgccaattggcgcttatgaaggaattagtggatttgcttggcctcgaacgcttggaagttcccggtttcgaggcagacgacgtattagcgactctcgcaaagaaagccgaacgtgagggctatgaagtccagatcttgacagcagatcgcgatcttttccagcttttatctccgcgcatctcggtgttacacccggaagggcatcgtatcaccccggaatggctctgggagaaatatggtttgcgtcccgaacaatgggtggattttcgcgccttagcaggcgatccgagcgacaatattccgggagttaaaggtatcggcgagaagacggcgctcaagctccttaaagaatgggggtcgttggagaacttgcttaagaatttagatcaggtcaaaccagagtcagtgcgtgagaagattcttgctcacctcgaagacctcaaattaagccgcgaattgtcccgtgtacgcaccgatttgccgctcgaagttgatttcggtcgccgccgcgaacctgactgggagggtcttaaagcgtttttagagcgtcttgaatttggttcgctcttgcatgaattcggccttttagaaagcccgttactggccgaagaagcaccttggccaccgcccgagggcgcgtttttaggttaccgtttgagtcgcccggaaccgatgtgggccgaattactggctcttgcagcgtctgcccagggacgtgtgtatcgcgcggaagaccctcatggtgcgctccgcggcctcttcgaagtccgtggactccttgccaaagacttagctgttgttgcattgcgcgaaggtcttgatttacctccgactgatgatccaatgcttcttgcgtacctcttggacccgtcaaacacgacgcccgaaggcgtagcccgtcgttacggcggcgagtggaccgaagatgcagcgaaacgcgcgttattggccgaacgtttgcacgccaatttattaggacgtttgcaaggcgaggaacgtctcctctggctttacgaagaagtggagaaaccattgagtcgcgtgctcgcgcatatggaagctaccggtgtcaaattagacgtggcgtatttggagaatctcagccttgaagttgctgcccacatgcgccgcttggaggaagaagtattccgtttagcaggccgttcctttcgccttaactctcgcgatcagttagaacgtgtgttgttcgatgaacttggtctccctcctatcggcaagacagagaagaccggtaaacgtagcacttcagcggcggttttagaagctcttcgcgaagtccatcccattgtggacaagatcttgcagtaccgcgaactcgcgaaattgaaaggcacctatattgaccgtcttccggcattagtccacccgaaaacgggacgcctccatacccgcttcaaccaaacagccacggcgaccggtcgtttgtcctcctctgatccaaaccttcagaatattccagtacgtaccccattgggccagaagatccgccgtgcgtttgtagctgaggagggttggcgtttagtggccctcgattatcgtcaaattgaattacgtgtccttgcccatctttctggcgatgagaacctcatccgcgtgtttcaggaaggcaaagacattcacactcaaacggcaagctggatgtttggattatcagctgaagcgatcgatcctttgatgcgtcgtgcagcgaagaccatcaatttcggtgttctctacggtatgagtgcctttcgtttgtcgcaggaattaggcattccctatgaagaagctcaggcgttcattcagaaatactttcaaagctatcccagtgttaaagcatggatcgagaagactctccgtgaaggccgcacacgtggttacgtagagaccttatttggacgtcgccgctatgttcccgatttaaacgctcgcgtgaaaggcaagcgtgaagccgccgaacgcatggcgttcaacatgcctgtacagggcacggcagctgacctcatgaaacttgcaatggtgcgcctttttccacaattgcgtgaagttggtgcccgcatgctcttgcaggtccacgatgaactcttgttagaagcgccaaaagagcgtgcggaagaggtggcagccctcgcgaaagaagttatggaaggcgtgtggcccttagcggtgcctcttgaagtcgaagttggtattggcgaggattggctggctgccaaagga

SEQ ID NO: 4324 - protein, 841 aa, synthetic construct
  REGION 1..841: note = Variant of DNA polymerase I from Thermus sp. strain 2.9
MHHHHHHGGSGVLPVFEPKGRVLLVDGHHLAYRNFFALKGLTTSLGEPVQGVYGFAKSLLKALKEDGDVVIVVFDAKAPSFRHEAYEAYKAGRAPTPEDFPRQLALMKELVDLLGLERLEVPGFEADDVLATLAKKAEREGYEVQILTADRDLFQLLSPRISVLHPEGHRITPEWLWEKYGLRPEQWVDFRALAGDPSDNIPGVKGIGEKTALKLLKEWGSLENLLKNLDQVKPESVREKILAHLEDLKLSRELSRVRTDLPLEVDFGRRREPDWEGLKAFLERLEFGSLLHEFGLLESPLLAEEAPWPPPEGAFLGYRLSRPEPMWAELLALAASAQGRVYRAEDPHGALRGLFEVRGLLAKDLAVVALREGLDLPPTDDPMLLAYLLDPSNTTPEGVARRYGGEWTEDAAKRALLAERLHANLLGRLQGEERLLWLYEEVEKPLSRVLAHMEATGVKLDVAYLENLSLEVAAHMRRLEEEVFRLAGRSFRLNSRDQLERVLFDELGLPPIGKTEKTGKRSTSAAVLEALREVHPIVDKILQYRELAKLKGTYIDRLPALVHPKTGRLHTRFNQTATATGRLSSSDPNLQNIPVRTPLGQKIRRAFVAEEGWRLVALDYRQIELRVLAHLSGDENLIRVFQEGKDIHTQTASWMFGLSAEAIDPLMRRAAKTINFGVLYGMSAFRLSQELGIPYEEAQAFIQKYFQSYPSVKAWIEKTLREGRTRGYVETLFGRRRYVPDLNARVKGKREAAERMAFNMPVQGTAADLMKLAMVRLFPQLREVGARMLLQVHDELLLEAPKERAEEVAALAKEVMEGVWPLAVPLEVEVGIGEDWLAAKG

SEQ ID NO: 4325 - DNA, 2523 bp, synthetic construct
  misc_feature 1..2523: note = Variant of DNA polymerase I from Thermus sp. strain 2.9
  source 1..2523: mol_type = other DNA
atgcaccatcatcatcatcatggcggtagcggcgtgttaccggtgttcgagcataaaggtcgcgtgcttctggttgatggccatcatctcgcgtatcgtaacttctttgccctgaaaggattaaccaccagcctgggcgagccggtacagggtgtctacggctttgcaaagtcgctcctgaaagctctgaaagaagacggtgatgtggtgattgttgtctttgatgcgaaagcgccaagttttcgccacgaagcgtacgaagcttacaaagccgggcgtgctccaacgccggaagactttcctcgccaattggcgcttatgaaggaattagtggatttgcttggcctcgaacgcttggaagttcccggtttcgaggcagacgacgtattagcgactctcgcaaagaaagccgaacgtgagggctatgaagtccagatcttgacagcagatcgcgatcttttccagcttttatctccgcgcatctcggtgttacacccggaagggcatcgtatcaccccggaatggctctgggagaaatatggtttgcgtcccgaacaatgggtggattttcgcgccttagcaggcgatccgagcgacaatattccgggagttaaaggtatcggcgagaagacggcgctcaagctccttaaagaatgggggtcgttggagaacttgcttaagaatttagatcaggtcaaaccagagtcagtgcgtgagaagattcttgctcacctcgaagacctcaaattaagccgcgaattgtcccgtgtacgcaccgatttgccgctcgaagttgatttcggtcgccgccgcgaacctgactgggagggtcttaaagcgtttttagagcgtcttgaatttggttcgctcttgcatgaattcggccttttagaaagcccgttactggccgaagaagcaccttggccaccgcccgagggcgcgtttttaggttaccgtttgacccgcccggaaccgatgtgggccgaattactggctcttgcagcgtctgcccagggacgtgtgtatcgcgcggaagaccctcatggtgcgctccgcggcctcttcgaagtccgtggactccttgccaaagacttagctgttgttgcattgcgcgaaggtcttgatttacctccgactgatgatccaatgcttcttgcgtacctcttggacccgtcaaacacgacgcccgaaggcgtagcccgtcgttacggcggcgagtggaccgaagatgcagcgaaacgcgcgttattggccgaacgtttgcacgccaatttattaggacgtttgcaaggcgaggagcgtctcctctggctttacgaagaagtggagaaaccattgagtcgcgtgctcgcgcatatggaagctaccggtgtcaaattagacgtggcgtatttggagaatctcagccttgaagttgctgcccacatgcgccgcttggaggaagaagtagtccgtttagcaggccgttcctttcgccttaactctcgcgatcagttagaacgtgtgttgttcgatgaacttggtctccctcctatcggcaagacagagaagaccggtaaacgtagcacttcagcggcggttttagaagctcttcgcgaagtccatcccattgtggacaagatcttgcagtaccgcgaaatggcgaaattgaaaggcacctatattgaccgtcttccggcattagtccacccgaaaacgggacgcctccatacccgcttcaaccaaacagccacggcgaccggtcgtttgtcctcctctgatccaaaccttcagaatattccagtacgtaccccattgggccagaagatccgccgtgcgtttgtagctgaggagggttggcgtttagtggccctcgattatcgtcaaattgaattacgtgtccttgcccatctttctggcgatgagaacctcatccgcgtgtttcaggaaggcaaagacattcacactcaaacggcaagctggatgtttggattaagcgctgaagcgatcgatcctttgatgcgtcgtgcagcgaagaccatcaatttcggtgttctctacggtatgagtgcctttcgtttgtcgcaggaattaggcattccctatgaagaagctcaggcgttcattcagaaatactttcaaagctatcccaaagttaaagcatggatcgagaagactctccgtgaaggccgccaccgtggttacgtagagaccttatttggacgtcgccgctatgttcccgatttaaacgctcgcgtgaaaggcaagcgtgaagccgccgaacgcatggcgttcaacatgcctgtacagggcacggcagctgacctcatgaaacttgcaatggtgcgcctttttccacaattgcgtgaagttggtgcccgcatgctcttgcaggtccacgatgaactcttgttagaagcgccaaaagagcgtgcggaagaggtggcagccctcgcgaaagaagttatggaaggcgtgtggcccttagcggtgcctcttgaagtcgaagttggtattggcgaggattggctggctgccaaagga

SEQ ID NO: 4326 - protein, 841 aa, synthetic construct
  REGION 1..841: note = Variant of DNA polymerase I from Thermus sp. strain 2.9
MHHHHHHGGSGVLPVFEHKGRVLLVDGHHLAYRNFFALKGLTTSLGEPVQGVYGFAKSLLKALKEDGDVVIVVFDAKAPSFRHEAYEAYKAGRAPTPEDFPRQLALMKELVDLLGLERLEVPGFEADDVLATLAKKAEREGYEVQILTADRDLFQLLSPRISVLHPEGHRITPEWLWEKYGLRPEQWVDFRALAGDPSDNIPGVKGIGEKTALKLLKEWGSLENLLKNLDQVKPESVREKILAHLEDLKLSRELSRVRTDLPLEVDFGRRREPDWEGLKAFLERLEFGSLLHEFGLLESPLLAEEAPWPPPEGAFLGYRLTRPEPMWAELLALAASAQGRVYRAEDPHGALRGLFEVRGLLAKDLAVVALREGLDLPPTDDPMLLAYLLDPSNTTPEGVARRYGGEWTEDAAKRALLAERLHANLLGRLQGEERLLWLYEEVEKPLSRVLAHMEATGVKLDVAYLENLSLEVAAHMRRLEEEVVRLAGRSFRLNSRDQLERVLFDELGLPPIGKTEKTGKRSTSAAVLEALREVHPIVDKILQYREMAKLKGTYIDRLPALVHPKTGRLHTRFNQTATATGRLSSSDPNLQNIPVRTPLGQKIRRAFVAEEGWRLVALDYRQIELRVLAHLSGDENLIRVFQEGKDIHTQTASWMFGLSAEAIDPLMRRAAKTINFGVLYGMSAFRLSQELGIPYEEAQAFIQKYFQSYPKVKAWIEKTLREGRHRGYVETLFGRRRYVPDLNARVKGKREAAERMAFNMPVQGTAADLMKLAMVRLFPQLREVGARMLLQVHDELLLEAPKERAEEVAALAKEVMEGVWPLAVPLEVEVGIGEDWLAAKG

SEQ ID NO: 4327 - DNA, 2523 bp, synthetic construct
  misc_feature 1..2523: note = Variant of DNA polymerase I from Thermus sp. strain 2.9
  source 1..2523: mol_type = other DNA
atgcaccatcatcatcatcatggcggtagcggcgtgttaccggtgttcgagcctaaaggtcgcgtgcttctggttgatggccatcatctcgcgtatcgtaacttctttgccctgaaaggattaaccaccagcctgggcgagccggtacagggtgtctacggctttgcaaagtcgctcctgaaagctctgaaagaagacggtgatgtggtgattgttgtctttgatgcgaaagcgccaagttttcgccacgaagcgtacgaagcttacaaagccgggcgtgctccaacgccggaagactttcctcgccaattggcgcttatgaaggaattagtggatttgcttggcctcgaacgcttggaagttcccggtttcgaggcagacgacgtattagcgactctcgcaaagaaagccgaacgtgagggctatgaagtccagatcttgacagcagatcgcgatcttttccagcttttatctccgcgcatctcggtgttacacccggaagggcatcgtatcaccccggaatggctctgggagaaatatggtttgcgtcccgaacaatgggtggattttcgcgccttagcaggcgatccgagcgacaatattccgggagttaaaggtatcggcgagaagacggcgctcaagctccttaaagaatgggggtcgttggagaacttgcttaagaatttagatcaggtcaaaccagagtcagtgcgtgagaagattcttgctcacctcgaagacctcgagttaagccgcgaattgtcccgtgtacgcaccgatttgccgctcgaagttgatttcggtcgccgccgcgaacctgactgggagggtcttaaagcgtttttagagcgtcttgaatttggttcgctcttgcatgaattcggccttttagaaagcccgttactggccgaagaagcaccttggccaccgcccgagggcgcgtttttaggttaccgtttgagtcgcccggaaccgatgtgggccgaattactggctcttgcagcgtctgcccagggacgtgtgtatcgcgcggaagaccctcatggtgcgctccgcggcctcttcgaagtccgtggactccttgccaaagacttagctgttgttgcattgcgcgaaggtcttgatttacctccgactgatgatccaatgcttcttgcgtacctcttggacccgtcaaacacgacgcccgaaggcgtagcccgtcgttacggcggcgagtggaccgaagatgcagcgaaacgcgcgttattggccgaacgtttgcacgccaatttattaggacgtttgcaaggcgaggaacgtctcctctggctttacgaagaagtggagaaaccattgagtcgtgtgctcgctcatatggaagctaccggtgtcaaattagacgtggcgtatttggagaatctcagccttgaagttgctgcccacatgcgccgcttggaggaagaagtattccgtttagcaggccgttcctttcgccttaactctcgcgatcagttagaacgtgtgttgttcgatgaacttggtctccctcctatcggcaagacagagaagaccggtaaacgtagcacttcagcggcggttttagaagctcttcgcgaagtccatcccattgtggacaagatcttgcagtaccgcgaactcgcgaaattgaaaggcacctatattgaccgtcttccggcattagtccacccgaaaacgggacgcctccatacccgcttcaaccaaacagccacggcgaccggtcgtttgtcctcctctgatccaaaccttcagaatattccagtacgtaccccattgggccagaagatccgccgtgcgtttgtagctgaggagggttggcgtttagtggccctcgattatcgtcaaattgaattacgtgtccttgcccatctttctggcgatgagaacctcatccgcgtgtttcaagaaggcaaagacattcacactcaaacggcaagctggatgtttggattatcagctgaagcgatcgatcctttgatgcgtcgtgcagcgaagaccatcaatttcggtgttctctacggtatgagtgcctttcgtttgtcgcaggagttaggcattccctatgaagaagctcaggcgttcattcagaaatactttcaaagctatcccaaagttaaagcatggatcgagaagactctccgtgaaggccgccaccgtggttacgtagagaccttatttggacgtcgccgctatgttcccgatttaaacggccgcgtgaaaggcaagcgtgaagccgccgaacgcatggcgttcaacatgcctgtacagggcacggcagctgacctcatgaaacttgcaatggtgcgcctttttccacaattgcgtgaagttggtgcccgcatgctcttgcaggtccatgatgaactcttgttcgaagcgccaaaagagcgtgcggaagaggtggcagccctcgcgaaagaagttatggaaggcgtgtggcccttagcggtgcctcttgaagtcgaagttggtattggcgaggattggctggctgccaaagga

SEQ ID NO: 4328 - protein, 841 aa, synthetic construct
  REGION 1..841: note = Variant of DNA polymerase I from Thermus sp. strain 2.9
MHHHHHHGGSGVLPVFEPKGRVLLVDGHHLAYRNFFALKGLTTSLGEPVQGVYGFAKSLLKALKEDGDVVIVVFDAKAPSFRHEAYEAYKAGRAPTPEDFPRQLALMKELVDLLGLERLEVPGFEADDVLATLAKKAEREGYEVQILTADRDLFQLLSPRISVLHPEGHRITPEWLWEKYGLRPEQWVDFRALAGDPSDNIPGVKGIGEKTALKLLKEWGSLENLLKNLDQVKPESVREKILAHLEDLELSRELSRVRTDLPLEVDFGRRREPDWEGLKAFLERLEFGSLLHEFGLLESPLLAEEAPWPPPEGAFLGYRLSRPEPMWAELLALAASAQGRVYRAEDPHGALRGLFEVRGLLAKDLAVVALREGLDLPPTDDPMLLAYLLDPSNTTPEGVARRYGGEWTEDAAKRALLAERLHANLLGRLQGEERLLWLYEEVEKPLSRVLAHMEATGVKLDVAYLENLSLEVAAHMRRLEEEVFRLAGRSFRLNSRDQLERVLFDELGLPPIGKTEKTGKRSTSAAVLEALREVHPIVDKILQYRELAKLKGTYIDRLPALVHPKTGRLHTRFNQTATATGRLSSSDPNLQNIPVRTPLGQKIRRAFVAEEGWRLVALDYRQIELRVLAHLSGDENLIRVFQEGKDIHTQTASWMFGLSAEAIDPLMRRAAKTINFGVLYGMSAFRLSQELGIPYEEAQAFIQKYFQSYPKVKAWIEKTLREGRHRGYVETLFGRRRYVPDLNGRVKGKREAAERMAFNMPVQGTAADLMKLAMVRLFPQLREVGARMLLQVHDELLFEAPKERAEEVAALAKEVMEGVWPLAVPLEVEVGIGEDWLAAKG

SEQ ID NO: 4329 - DNA, 2523 bp, synthetic construct
  misc_feature 1..2523: note = Variant of DNA polymerase I from Thermus sp. strain 2.9
  source 1..2523: mol_type = other DNA
atgcaccatcatcatcatcatggcggtagcggcgtgttaccggtgttcgagcctaaaggtcgcgtgcttctggttgatggccatcatctcgcgtatcgtaacttctttgccctgaaaggattaaccaccagcctgggcgagccggtacagggtgtctacggctttgcaaagtcgctcctgaaagctctgaaagaagacggtgatgtggtgattgttgtctttgatgcgaaagcgccaagttttcgccacgaagcgtacgaagcttacaaagccgggcgtgctccaacgccggaagactttcctcgccaattggcgcttatgaaggaattagtggatttgcttggcctcgaacgcttggaagttcccggtttcgaggcagacgacgtattagcgactctcgcaaagaaagccgaacgtgagggctatgaagtccagatcttgacagcagatcgcgatcttttccagcttttatctccgcgcatctcggtgttacacccggaagggcatcgtatcaccccggaatggctctgggagaaatatggtttgcgtcccgaacaatgggtggattttcgcgccttagcaggcgatccgagcgacaatattccgggagttaaaggtatcggcgagaagacggcgctcaagctccttaaagaatgggggtcgttggagaacttgcttaagaatttagatcaggtcaaaccagagtcagtgcgtgagaagattcttgctcacctcgaagacctcaaattaagccgcgaattgtcccgtgtacgcaccgatttgccgctcgaagttgatttcggtcgccgccgcgaacctgactgggagggtcttaaagcgtttttagagcgtcttgaatttggttcgctcttgcatgaattcggccttttagaaagcccgttactggccgaagaagcaccttggccaccgcccgagggcgcgtttttaggttaccgtttgagtcgcccggaaccgatgtgggccgaattactggctcttgcagcgtctgcccagggacgtgtgtatcgcgcggaagaccctcatggtgcgctccgcggcctcttcgaagtccgtggactccttgccaaagacttagctgttgttgcattgcgcgaaggtcttgatttacctccgactgatgatccaatgcttcttgcgtacctcttggacccgtcaaacacgacgcccgaaggcgtagcccgtcgttacggcggcgagtggaccgaagatgcagcgaaacgcgcgttattggccgaacgtttgcacgccaatttattaggacgtttgcaaggcgaggaacgtctcctctggctttacgaagaagtggagaaaccattgagtcgcgtgctcgcgcatatggaagctaccggtgtcaaattagacgtggcgtatttggagaatctcagccttgaagttgctgcccacatgcgccgcttggaggaagaagtattccgtttagcaggccgttcctttcgccttaactctcgcgatcagttagaacgtgtgttgttcgatgaacttggtctccctcctatcggcaagacagagaagaccggtaaacgtagcacttcagcggcggttttagaagctcttcgcgaagtccatcccattgtggacaagatcttgcagtaccgcgaactcgcgaaattgaaaggcacctatattgaccgtcttccggcattagtccacccgaaaacgggacgcctccatacccgcttcaaccaaacagccacggcgaccggtcgtttgtcctcctctgatccaaaccttcagaatattccagtacgtaccccattgggccagaagatccgccgtgcgtttgtagctgaggagggttggcgtttagtggccctcgattatcgtcaaattgaattacgtgtccttgcccatctttctggcgatgagaacctcatccgcgtgtttcaggaaggcaaagacattcacactcaaacggcaagctggatgtttggattatcagctgaagcgatcgatcctttgatgcgtcgtgcagcgaagaccatcatgttcggtgttctctacggtatgagtgcctttcgtttgtcgcaggaattaggcattccctatgaagaagctcaggcgttcattcagaaatactttcaaagctatcccaaagttaaagcatggatcgagaagactctccgtgaaggccgcacacgtggttacgtagagaccttatttggacgtcgccgctatgttcccgatttaaacgctcgcgtgaaaggcaagcgtgaagccgccgaacgcatggcgttcaacatgcctgtacagggcacggcagctgacctcatgaaacttgcaatggtgcgcctttttccacaattgcgtgaagttggtgcccgcatgctcttgcaggtccacgatgaactcttgttagaagcgccaaaagagcgtgcggaagaggtggcagccctcgcgaaagaagttatggaaggcgtgtggcccttagcggtgcctcttgaggtcgaagttggtattggcgaggattggctggctgccaaagga

SEQ ID NO: 4330 - protein, 841 aa, synthetic construct
  REGION 1..841: note = Variant of DNA polymerase I from Thermus sp. strain 2.9
MHHHHHHGGSGVLPVFEPKGRVLLVDGHHLAYRNFFALKGLTTSLGEPVQGVYGFAKSLLKALKEDGDVVIVVFDAKAPSFRHEAYEAYKAGRAPTPEDFPRQLALMKELVDLLGLERLEVPGFEADDVLATLAKKAEREGYEVQILTADRDLFQLLSPRISVLHPEGHRITPEWLWEKYGLRPEQWVDFRALAGDPSDNIPGVKGIGEKTALKLLKEWGSLENLLKNLDQVKPESVREKILAHLEDLKLSRELSRVRTDLPLEVDFGRRREPDWEGLKAFLERLEFGSLLHEFGLLESPLLAEEAPWPPPEGAFLGYRLSRPEPMWAELLALAASAQGRVYRAEDPHGALRGLFEVRGLLAKDLAVVALREGLDLPPTDDPMLLAYLLDPSNTTPEGVARRYGGEWTEDAAKRALLAERLHANLLGRLQGEERLLWLYEEVEKPLSRVLAHMEATGVKLDVAYLENLSLEVAAHMRRLEEEVFRLAGRSFRLNSRDQLERVLFDELGLPPIGKTEKTGKRSTSAAVLEALREVHPIVDKILQYRELAKLKGTYIDRLPALVHPKTGRLHTRFNQTATATGRLSSSDPNLQNIPVRTPLGQKIRRAFVAEEGWRLVALDYRQIELRVLAHLSGDENLIRVFQEGKDIHTQTASWMFGLSAEAIDPLMRRAAKTIMFGVLYGMSAFRLSQELGIPYEEAQAFIQKYFQSYPKVKAWIEKTLREGRTRGYVETLFGRRRYVPDLNARVKGKREAAERMAFNMPVQGTAADLMKLAMVRLFPQLREVGARMLLQVHDELLLEAPKERAEEVAALAKEVMEGVWPLAVPLEVEVGIGEDWLAAKG

SEQ ID NO: 4331 - DNA, 2523 bp, synthetic construct
  misc_feature 1..2523: note = Variant of DNA polymerase I from Thermus sp. strain 2.9
  source 1..2523: mol_type = other DNA
atgcaccatcatcatcatcatggcggtagcggcgtgttaccggtgttcgagcctaaaggtcgcgtgcttctggttgatggccatcatctcgcgtatcgtaacttctttgccctgaaaggattaaccaccagcctgggcgagccggtacagggtgtctacggctttgcaaagtcgctcctgaaagctctgaaagaagacggtgatgtggtgattgttgtctttgatgcgaaagcgccaagttttcgccacgaagcgtacgaagcttacaaagccgggcgtgctccaacgccggaagactttcctcgccaattggcgcttatgaaggaattagtggatttgcttggcctcgaacgcttggaagttcccggtttcgaggcagacgacgtattagcgactctcgcaaagaaagccgaacgtgagggctatgaagtccagatcttgacagcagatcgcgatcttttccagcttttatctccgcgcatctcggtgttacacccggaagggcatcgtatcaccccggaatggctctgggagaaatatggtttgcgtcccgaacaatgggtggattttcgcgccttagcaggcgatccgagcgacaatattccgggagttaaaggtatcggcgagaagacggcgctcaagctccttaaagaatgggggtcgttggagaacttgcttaagaatttagatcaggtcaaaccagagtcagtgcgtgagaagattcttgctcacctcgaagacctcaaattaagccgcgaattgtcccgtgtacgcaccgatttgccgctcgaagttgatttcggtcgccgccgcgaacctgactgggagggtcttaaagcgtttttagagcgtcttgaatttggttcgctcttgcatgaattcggccttttagaaagcccgttactggccgaagaagcaccttggccaccgcccgagggcgcgtttttaggttaccgtttgagtcgcccggaaccgatgtgggccgaattactggctcttgcagcgtctgcccagggacgtgtgtatcgcgcggaagaccctcatggtgcgctccgcggcctcttcgaagtccgtggactccttgccaaagacttagctgttgttgcattgcgcgaaggtcttgatttacctccgactgatgatccaatgcttcttgcgtacctcttggacccgtcaaacacgacgcccgaaggcgtagcccgtcgttacggcggcgagtggaccgaagatgcagcgaaacgcgcgttattggccgaacgtttgagggccaatttattaggacgtttgcaaggcgaggaacgtctcctctggctttacgaagaagtggagaaaccattgagtcgcgtgctcgcgcatatggaagctaccggtgtcaaattagacgtggcgtatttggagaatctcagccttgaagttgctgcccacatgcgccgcttggaggaagaagtattccgtttagcaggccgttcctttcgccttaactctcgcgatcagttagaacgtgtgttgttcgatgaacttggtctccctcctatcggcaagacagagaagaccggtaaacgtagcacttcagcggcggttttagaagctcttcgcgaagtccatcccattgtggacaagatcttgcagtaccgcgaactcgcgaaattgaaaggcacctatattgaccgtcttccggcattagtccacccgaaaacgggacgcctccatacccgcttcaaccaaacagccacggcgaccggtcgtttgtcctcctctgatccaaaccttcagaatattccagtacgtaccccattgggccagaagatccgccgtgcgtttgtagctgaggagggttggcgtttagtggccctcgattatcgtcaaattgaattacgtgtccttgcccatctttctggcgatgagaacctcatccgcgtgtttcaggaaggcaaagacattcacactcaaacggcaagctggatgtttggattatcagctgaagcgatcgatcctttgatgcgtcgtgcagcgaagaccatcaatttcggtgttctctacggtatgagtgcctttcgtttgtcgcaggaattaggcattccctatgaagaagctcaggcgttcattcagaaatactttcaaagctatcccaaagttaaagcatggatcgagaagactctccgtgaaggccgcacacgtggttacgtagagaccttatttggacgtcgccgctatgttcccgatttaaacgctcgcgtgaaaggcaagcgtgaagccgccgaacgcatggcgttcaacatgcctgtacagggcacggcagctgacctcatgaaacttgcaatggtgcgcctttttccacaattgcgtgaagttggtgcccgcatgctcttgcaggtccacgatgaactcttgttagaagcgccaaaagagcgtgcggaagaggtggcagccctcgcgaaagaagttatggaaggcgtgtggcccttagcggtgcctcttgaagtcgaagttggtattggcgaggattggctggctgccaaagga

SEQ ID NO: 4332 - protein, 841 aa, synthetic construct
  REGION 1..841: note = Variant of DNA polymerase I from Thermus sp. strain 2.9
MHHHHHHGGSGVLPVFEPKGRVLLVDGHHLAYRNFFALKGLTTSLGEPVQGVYGFAKSLLKALKEDGDVVIVVFDAKAPSFRHEAYEAYKAGRAPTPEDFPRQLALMKELVDLLGLERLEVPGFEADDVLATLAKKAEREGYEVQILTADRDLFQLLSPRISVLHPEGHRITPEWLWEKYGLRPEQWVDFRALAGDPSDNIPGVKGIGEKTALKLLKEWGSLENLLKNLDQVKPESVREKILAHLEDLKLSRELSRVRTDLPLEVDFGRRREPDWEGLKAFLERLEFGSLLHEFGLLESPLLAEEAPWPPPEGAFLGYRLSRPEPMWAELLALAASAQGRVYRAEDPHGALRGLFEVRGLLAKDLAVVALREGLDLPPTDDPMLLAYLLDPSNTTPEGVARRYGGEWTEDAAKRALLAERLRANLLGRLQGEERLLWLYEEVEKPLSRVLAHMEATGVKLDVAYLENLSLEVAAHMRRLEEEVFRLAGRSFRLNSRDQLERVLFDELGLPPIGKTEKTGKRSTSAAVLEALREVHPIVDKILQYRELAKLKGTYIDRLPALVHPKTGRLHTRFNQTATATGRLSSSDPNLQNIPVRTPLGQKIRRAFVAEEGWRLVALDYRQIELRVLAHLSGDENLIRVFQEGKDIHTQTASWMFGLSAEAIDPLMRRAAKTINFGVLYGMSAFRLSQELGIPYEEAQAFIQKYFQSYPKVKAWIEKTLREGRTRGYVETLFGRRRYVPDLNARVKGKREAAERMAFNMPVQGTAADLMKLAMVRLFPQLREVGARMLLQVHDELLLEAPKERAEEVAALAKEVMEGVWPLAVPLEVEVGIGEDWLAAKG

SEQ ID NO: 4333 - DNA, 2523 bp, synthetic construct
  misc_feature 1..2523: note = Variant of DNA polymerase I from Thermus sp. strain 2.9
  source 1..2523: mol_type = other DNA
atgcaccatcatcatcatcatggcggtagcggcgtgttaccggtgttcgagcctaaaggtcgcgtgcttctggttgatggccatcatctcgcgtatcgtaacttctttgccctgaaaggattaaccaccagcctgggcgagccggtacagggtgtctacggctttgcaaagtcgctcctgaaagctctgaaagaagacggtgatgtggtgattgttgtctttgatgcgaaagcgccaagttttcgccacgaagcgtacgaagcttacaaagccgggcgtgctccaacgccggaagactttcctcgccaattggcgcttatgaaggaattagtggatttgcttggcctcgaacgcttggaagttcccggtttcgaggcagacgacgtattagcgactctcgcaaagaaagccgaacgtgagggctatgaagtccagatcttgacagcagatcgcgatcttttccagcttttatctccgcgcatctcggtgttacacccggaagggcatcgtatcaccccggaatggctctgggagaaatatggtttgcgtcccgaacaatgggtggattttcgcgccttagcaggcgatccgagcgacaatattccgggagttaaaggtatcggcgagaagacggcgctcaagctccttaaagaatgggggtcgttggagaacttgcttaagaatttagatcaggtcaaaccagagtcagtgcgtgagaagattcttgctcacctcgaagacctcaaattaagccgcgaattgtcccgtgtacgcaccgatttgccgctcgaagttgatttcggtcgccgccgcgaacctgactgggagggtcttaaagcgtttttagagcgtcttgaatttggttcgctcttgcatgaattcggccttttagaaagcccgttactggccgaagaagcaccttggccaccgcccgagggcgcgtttttaggttaccgtttgagtcgcccggaaccgatgtgggccgaattactggctcttgcagcgtctgcccagggacgtgtgtatcgcgcggaagaccctcatggtgcgctccgcggcctcttcgaagtccgtggactctgtgccaaagacttagctgttgttgcattgcgcgaaggtcttgatttacctccgactgatgatccaatgcttcttgcgtacctcttggacccgtcaaacacgacgcccgaaggcgtagcccgtcgttacggcggcgagtggaccgaagatgcagcgaaacgcgcgttattggccgaacgtttgcacgccaatttattaggacgtttgcaaggcgaggaacgtctcctctggctttacgaagaagtggagaaaccattgagtcgcgtgctcgcgcatatggaagctaccggtgtcaaattagacgtggcgtatttggagaatctcagccttgaagttgctgcccacatgcgccgcttggaggaagaagtattccgtttagcaggccgttcctttcgccttaactctcgcgatcagttagaacgtgtgttgttcgatgaacttggtctccctcctatcggcaagacagagaagaccggtaaacgtagcacttcagcggcggttttagaagctcttcgcgaagtccatcccattgtggacaagatcttgcagtaccgcgaactcgcgaaattgaaaggcacctatattgaccgtcttccggcattagtccacccgaaaacgggacgcctccatacccgcttcaaccaaacagccacggcgaccggtcgtttgtcctcctctgatccaaaccttcagaatattccagtacgtaccccattgggccagaagatccgccgtgcgtttgtagctgaggagggttggcgtttagtggccctcgattatcgtcaaattgaattacgtgtccttgcccatctttctggcgatgagaacctcatccgcgtgtttcaggaaggcaaagacattcacactcaaacggcaagctggatgtttggattatcagctgaagcgatcgatcctttgatgcgtcgtgcagcgaagaccatcaatttcggtgttctctacggtatgagtgcctttcgtttgtcgcaggaattaggcattccctatgaagaagctcaggcgttcattcagaaatactttcaaagctatcccaaagttaaagcatggatcgagaagactctccgtgaaggccgcacacgtggttacgtagagaccttatttggacgtcgccgctatgttcccgatttaaacgctcgcgtgaaaggcaagcgtgaagccgccgaacgcatggcgttcaacatgcctgtacagggcacggcagctgacctcatgaaacttgcaatggtgcgcctttttccacaattgcgtgaagttggtgcccgcatgctcttgcaggtccacgatgaactcttgttagaagcgccaaaagagcgtgcggaagaggtggcagccctcgcgaaagaagttatggaaggcgtgtggcccttagcggtgcctcttgaagtcgaagttggtattggcgaggattggctggctgccaaagga

SEQ ID NO: 4334 - protein, 841 aa, synthetic construct
  REGION 1..841: note = Variant of DNA polymerase I from Thermus sp. strain 2.9
MHHHHHHGGSGVLPVFEPKGRVLLVDGHHLAYRNFFALKGLTTSLGEPVQGVYGFAKSLLKALKEDGDVVIVVFDAKAPSFRHEAYEAYKAGRAPTPEDFPRQLALMKELVDLLGLERLEVPGFEADDVLATLAKKAEREGYEVQILTADRDLFQLLSPRISVLHPEGHRITPEWLWEKYGLRPEQWVDFRALAGDPSDNIPGVKGIGEKTALKLLKEWGSLENLLKNLDQVKPESVREKILAHLEDLKLSRELSRVRTDLPLEVDFGRRREPDWEGLKAFLERLEFGSLLHEFGLLESPLLAEEAPWPPPEGAFLGYRLSRPEPMWAELLALAASAQGRVYRAEDPHGALRGLFEVRGLCAKDLAVVALREGLDLPPTDDPMLLAYLLDPSNTTPEGVARRYGGEWTEDAAKRALLAERLHANLLGRLQGEERLLWLYEEVEKPLSRVLAHMEATGVKLDVAYLENLSLEVAAHMRRLEEEVFRLAGRSFRLNSRDQLERVLFDELGLPPIGKTEKTGKRSTSAAVLEALREVHPIVDKILQYRELAKLKGTYIDRLPALVHPKTGRLHTRFNQTATATGRLSSSDPNLQNIPVRTPLGQKIRRAFVAEEGWRLVALDYRQIELRVLAHLSGDENLIRVFQEGKDIHTQTASWMFGLSAEAIDPLMRRAAKTINFGVLYGMSAFRLSQELGIPYEEAQAFIQKYFQSYPKVKAWIEKTLREGRTRGYVETLFGRRRYVPDLNARVKGKREAAERMAFNMPVQGTAADLMKLAMVRLFPQLREVGARMLLQVHDELLLEAPKERAEEVAALAKEVMEGVWPLAVPLEVEVGIGEDWLAAKG

SEQ ID NO: 4335 - DNA, 2523 bp, synthetic construct
  misc_feature 1..2523: note = Variant of DNA polymerase I from Thermus sp. strain 2.9
  source 1..2523: mol_type = other DNA
atgcaccatcatcatcatcatggcggtagcggcgtgttaccggtgttcgagcctaaaggtcgcgtgcttctggttgatggccatcatctcgcgtatcgtaacttctttgccctgaaaggattaaccaccagcctgggcgagccggtacagggtgtctacggctttgcaaagtcgctcctgaaagctctgaaagaagacggtgatgtggtgattgttgtctttgatgcgaaagcgccaagttttcgccacgaagcgtacgaagcttacaaagccgggcgtgctccaacgccggaagactttcctcgccaattggcgcttatgaaggaattagtggatttgcttggcctcgaacgcttggaagttcccggtttcgaggcagacgacgtattagcgactctcgcaaagaaagccgaacgtgagggctatgaagtccagatcttgacagcagatcgcgatcttttccagcttttatctccgcgcatctcggtgttacacccggaagggcatcgtatcaccccggaatggctctgggagaaatatggtttgcgtcccgaacaatgggtggattttcgcgccttagcaggcgatccgagcgacaatattccgggagttaaaggtatcggcgagaagacggcgctcaagctccttaaagaatgggggtcgttggagaacttgcttaagaatttagatcaggtcaaaccagagtcagtgcgtgagaagattcttgctcacctcgaagacctcaaattaagccgcgaattgtcccgtgtacgcaccgatttgccgctcgaagttgatttcggtcgccgccgcgaacctgactgggagggtcttaaagcgtttttagagcgtcttgaatttggttcgctcttgcatgaattcggccttttagaaagcccgttactggccgaagaagcaccttggccaccgcccgagggcgcgtttttaggttaccgtttgagtcgcccggaaccgatgtgggccgaattactggctcttgcagcgtctgcccagggacgtgtgtatcgcgcggaagaccctcatggtgcgctccgcggcctcttcgaagtccgtggactccttgccaaagacttagctgttgttgcattgcgcgaaggtcttgatttacctccgactgatgatccaatgcttcttgcgtacctcttggacccgtcaaacacgacgcccgaaggcgtagcccgtcgttacggcggcgagtggaccgaagatgcagcgaaacgcgcgttattggccgaacgtttgcacgccaatttattaggacgtttgcaaggcgaggaacgtctcctctggctttacgaagaagtggagaaaccattgagtcgcgtgctcgcgcatatggaagctaccggtgtcaaattagacgtggcgtatttggagaatctcagccttgaagttgctgcccacatgcgccgcttggaggaagaagtattccgtttagcaggccgttcctttcgccttaactctcgcgatcagttagaacgtgtgttgttcgatgaacttggtctccctcctatcggcaagacagagaagaccggtaaacgtagcacttcagcggcggttttagaagctcttcgcgaagtccatcccattgtggacaagatcttgcagtaccgcgaactcgcgaaattgaaaggcacctatattgaccgtcttccggcattagtccacccgaaaacgggacgcctccatacccgcttcaaccaaacagccacggcgaccggtcgtttgtcctcctctgatccaaaccttcagaatattccagtacgtaccccattgggccagaagatccgccgtgcgtttgtagctgaggagggttggcgtttagtggccctcgattatcgtcaaattgaattacgtgtccttgcccatctttctggcgatgagaacctcatccgcgtgtttcaggaaggcaaagacattcacactcaaacggcaagctggatgtttggattatcagctgaagcgatcgatcctttgatgcgtcgtgcagcgaagaccatcaatttcggtgttctctacggtatgagtgcctttcgtttgtcgcaggaattaggcattccctatgaagaagctcaggcgttcattcagaaatactttcaaagctatcccaaagttaaagcatggatcgagaagactctccgtgaaggccgcacacgtggttacgtagagaccttatttggacgtcgccgctatgttcccgatttaaacgctcgcgtgaaaggcaagcgtgaagccgccgaacgcatggcgttcaacatgcctgtacagggcacggcagctgacctcatgaaacttgcaatggtgcgcctttttccacaattgcgtgaagttggtgcccgcatgctcttgcaggtccacgatgaactcttgttagaagcgccaaaagagcgtgcggaagaggtggcagccctcgcgaaagaagttatggaaggcgtgtggcccttagcggtgcctcttggggtcgaagttggtattggcgaggattggctggctgccaaagga

SEQ ID NO: 4336 - protein, 841 aa, synthetic construct
  REGION 1..841: note = Variant of DNA polymerase I from Thermus sp. strain 2.9
MHHHHHHGGSGVLPVFEPKGRVLLVDGHHLAYRNFFALKGLTTSLGEPVQGVYGFAKSLLKALKEDGDVVIVVFDAKAPSFRHEAYEAYKAGRAPTPEDFPRQLALMKELVDLLGLERLEVPGFEADDVLATLAKKAEREGYEVQILTADRDLFQLLSPRISVLHPEGHRITPEWLWEKYGLRPEQWVDFRALAGDPSDNIPGVKGIGEKTALKLLKEWGSLENLLKNLDQVKPESVREKILAHLEDLKLSRELSRVRTDLPLEVDFGRRREPDWEGLKAFLERLEFGSLLHEFGLLESPLLAEEAPWPPPEGAFLGYRLSRPEPMWAELLALAASAQGRVYRAEDPHGALRGLFEVRGLLAKDLAVVALREGLDLPPTDDPMLLAYLLDPSNTTPEGVARRYGGEWTEDAAKRALLAERLHANLLGRLQGEERLLWLYEEVEKPLSRVLAHMEATGVKLDVAYLENLSLEVAAHMRRLEEEVFRLAGRSFRLNSRDQLERVLFDELGLPPIGKTEKTGKRSTSAAVLEALREVHPIVDKILQYRELAKLKGTYIDRLPALVHPKTGRLHTRFNQTATATGRLSSSDPNLQNIPVRTPLGQKIRRAFVAEEGWRLVALDYRQIELRVLAHLSGDENLIRVFQEGKDIHTQTASWMFGLSAEAIDPLMRRAAKTINFGVLYGMSAFRLSQELGIPYEEAQAFIQKYFQSYPKVKAWIEKTLREGRTRGYVETLFGRRRYVPDLNARVKGKREAAERMAFNMPVQGTAADLMKLAMVRLFPQLREVGARMLLQVHDELLLEAPKERAEEVAALAKEVMEGVWPLAVPLGVEVGIGEDWLAAKG

SEQ ID NO: 4337 - DNA, 2523 bp, synthetic construct
  misc_feature 1..2523: note = Variant of DNA polymerase I from Thermus sp. strain 2.9
  source 1..2523: mol_type = other DNA
atgcaccatcatcatcatcatggcggtagcggcgtgttaccggtgttcgagcctaaaggtcgcgtgcttctggttgatggccatcatctcgcgtatcgtaacttctttgccctgaaaggattaaccaccagcctgggcgagccggtacagggtgtctacggctttgcaaagtcgctcctgaaagctctgaaagaagacggtgatgtggtgattgttgtctttgatgcgaaagcgccaagttttcgccacgaagcgtacgaagcttacaaagccgggcgtgctccaacgccggaagactttcctcgccaattggcgcttatgaaggaattagtggatttgcttggcctcgaacgcttggaagttcccggtttcgaggcagacgacgtattagcgactctcgcaaagaaagccgaacgtgagggctatgaagtccagatcttgacagcagatcgcgatcttttccagcttttatctccgcgcatctcggtgttacacccggaagggcatcgtatcaccccggaatggctctgggagaaatatggtttgcgtcccgaacaatgggtggattttcgcgccttagcaggcgatccgagcgacaatattccgggagttaaaggtatcggcgagaagacggcgctcaagctccttaaagaatgggggtcgttggagaacttgcttaagaatttagatcaggtcaaaccagagtcagtgcgtgagaagattcttgctcacctcgaagacctcaaattaagccgcgaattgtcccgtgtacgcaccgatttgccgctcgaagttgatttcggtcgccgccgcgaacctgactgggagggtcttaaagcgtttttagagcgtcttgaatttggttcgctcctgcatgaattcggccttttagaaagcccgttactggccgaagaagcaccttggccaccgcccgagggcgcgtttttaggttaccgtttgagtcgcccggaaccgatgtgggccgaattactggctcttgcagcgtctgcccagggacgtgtgtatcgcgcggaagaccctcatggtgcgctccgcggcctcttcgaagtccgtggactccttgccaaagacttagctgttgttgcattgcgcgaaggtcttgatttacctccgactgatgatccaatgcttcttgcgtacctcttggacccgtcaaacacgacgcccgaaggcgtagcccgtcgttacggcggcgagtggaccgaagatgcagcgaaacgcgcgttattggccgaacgtttgcacgccaatttattaggacgtttgcaaggcgaggaacgtctcctctggctttacgaagaagtggagaaaccattgagtcgcgtgctcgcgcatatggaagctaccggtgtcaaattagacgtggcgtatttggagaatctcagccttgaagttgctgcccacatgcgccgcttggaggaagaagtattccgtttagcaggccgttcctttcgccttaactctcgcgatcagttagaacgtgtgttgttcgatgaacttggtctccctcctatcggcaagacagagaagaccggtaaacgtagcacttcagcggcggttttagaagctcttcgcgaagtccatcccattgtggacaagatcttgcagtaccgcgaaatggcgaaattgaaaggcacctatattgaccgtcttccggcattagtccacccgaaaacgggacgcctccatacccgcttcaaccaaacagccacggcgaccggtcgtttgtcctcctctgatccaaaccttcagaatattccagtacgtaccccattgggccagaagatccgccgtgcgtttgtagctgaggagggttggcgtttagtggccctcgattatcgtcaaattgaattacgtgtccttgcccatctttctggcgatgagaacctcatccgcgtgtttcaggaaggcaaagacattcacactcaaacggcaagctggatgtttggattatcagctgaagcgatcgatcctttgatgcgtcgtgcagcgaagaccatcaatttcggtgttctctacggtatgagtgcatttcgtttgtcgcaggaattaggcattccctatgaagaagctcaggcgttcattcagaaatactttcaaagctatcccaaagttaaagcatggatcgagaagactctccgtgaaggccgcacacgtggttacgtagagaccttatttggacgtcgccgctatgttcccgatttaaacgctcgcgtgaaaggcaagcgtgaagccgccgaacgcatggcgttcaacatgcctgtacagggcacggcagctgacctcatgaaacttgcaatggtgcgcctttttccacaattgcgtgaagttggtgcccgcatgctcttgcaggtccacgatgaactcttgttagaagcgccaaaagagcgtgcggaagaggtggcagccctcgcgaaagaagttatggaaggcgtgtggcccttagcggtgcctcttgaagtcgaagttggtattggcgaggattggctggctgccaaagga

SEQ ID NO: 4338 - protein, 841 aa, synthetic construct
  REGION 1..841: note = Variant of DNA polymerase I from Thermus sp. strain 2.9
MHHHHHHGGSGVLPVFEPKGRVLLVDGHHLAYRNFFALKGLTTSLGEPVQGVYGFAKSLLKALKEDGDVVIVVFDAKAPSFRHEAYEAYKAGRAPTPEDFPRQLALMKELVDLLGLERLEVPGFEADDVLATLAKKAEREGYEVQILTADRDLFQLLSPRISVLHPEGHRITPEWLWEKYGLRPEQWVDFRALAGDPSDNIPGVKGIGEKTALKLLKEWGSLENLLKNLDQVKPESVREKILAHLEDLKLSRELSRVRTDLPLEVDFGRRREPDWEGLKAFLERLEFGSLLHEFGLLESPLLAEEAPWPPPEGAFLGYRLSRPEPMWAELLALAASAQGRVYRAEDPHGALRGLFEVRGLLAKDLAVVALREGLDLPPTDDPMLLAYLLDPSNTTPEGVARRYGGEWTEDAAKRALLAERLHANLLGRLQGEERLLWLYEEVEKPLSRVLAHMEATGVKLDVAYLENLSLEVAAHMRRLEEEVFRLAGRSFRLNSRDQLERVLFDELGLPPIGKTEKTGKRSTSAAVLEALREVHPIVDKILQYREMAKLKGTYIDRLPALVHPKTGRLHTRFNQTATATGRLSSSDPNLQNIPVRTPLGQKIRRAFVAEEGWRLVALDYRQIELRVLAHLSGDENLIRVFQEGKDIHTQTASWMFGLSAEAIDPLMRRAAKTINFGVLYGMSAFRLSQELGIPYEEAQAFIQKYFQSYPKVKAWIEKTLREGRTRGYVETLFGRRRYVPDLNARVKGKREAAERMAFNMPVQGTAADLMKLAMVRLFPQLREVGARMLLQVHDELLLEAPKERAEEVAALAKEVMEGVWPLAVPLEVEVGIGEDWLAAKG

SEQ ID NO: 4339 - DNA, 2523 bp, synthetic construct
  misc_feature 1..2523: note = Variant of DNA polymerase I from Thermus sp. strain 2.9
  source 1..2523: mol_type = other DNA
atgcaccatcatcatcatcatggcggtagcggcgtgttaccggtgttcgagcctaaaggtcgcgtgcttctggttgatggccatcatctcgcgtatcgtaacttctttgccctgaaaggattaaccaccagcctgggcgagccggtacagggtgtctacggctttgcaaagtcgctcctgaaagctctgaaagaagacggtgatgtggtgattgttgtctttgatgcgaaagcgccaagttttcgccacgaagcgtacgaagcttacaaagccgggcgtgctccaacgccggaagactttcctcgccaattggcgcttatgaaggaattagtggatttgcttggcctcgaacgcttggaagttcccggtttcgaggcagacgacgtattagcgactctcgcaaagaaagccgaacgtgagggctatgaagtccagatcttgacagcagatcgcgatcttttccagcttttatctccgcgcatctcggtgttacacccggaagggcatcgtatcaccccggaatggctctgggagaaatatggtttgcgtcccgaacaatgggtggattttcgcgccttagcaggcgatccgagcgacaatattccgggagttaaaggtatcggcgagaagacggcgctcaagctccttaaagaatgggggtcgttggagaacttgcttaagaatttagatcaggtcaaaccagagtcagtgcgtgagaagattcttgctcacctcgaagacctcaaattaagccgcgaattgtcccgtgtacgcaccgatttgccgctcgaagttgatttcggtcgccgccgcgaacctgactgggagggtcttaaagcgtttttagagcgtcttgaatttggttcgctcttgcatgaattcggccttttagaaagcccgttactggccgaagaagcaccttggccaccgcccgagggcgcgtttttaggttaccgtttgagtcgcccggaaccgatgtgggccgaattactggctcttgcagcgtctgcccagggacgtgtgtatcgcgcggaagaccctcatggtgcgctccgcggcctcttcgaagtccgtggactccttgccaaagacttagctgttgttgcattgcgcgaaggtcttgatttacctccgactgatgatccaatgcttcttgcgtacctcttggacccgtcaaacacgacgcccgaaggcgtagcccgtcgttacggcggcgagtggaccgaagatgcagcgaaacgcgcgttattggccgaacgtttgcacgccaatttattaggacgtttgcaaggcgaggaacgtctcctctggctttacgaagaagtggagaaaccattgagtcgcgtgctcgcgcatatggaacttaccggtgtcaaattagacgtggcgtatttggagaatctcagccttgaagttgctgcccacatgcgccgcttggaggaagaagtattccgtttagcaggccgttcctttcgccttaactctcgcgatcagttagaacgtgtgttgttcgatgaacttggtctccctcctatcggcaagacagagaagaccggtaaacgtagcacttcagcggcggttttagaagctcttcgcgaagtccatcccattgtggacaagatcttgcagtaccgcgaactcgcgaaattgaaaggcacctatattgaccgtcttccggcattagtccacccgaaaacgggacgcctccatacccgcttcaaccaaacagccacggcgaccggtcgtttgtcctcctctgatccaaaccttcagaatattccagtacgtaccccattgggccagaagatccgccgtgcgtttgtagctgaggagggttggcgtttagtggccctcgattatcgtcaaattgaattacgtgtccttgcccatctttctggcgatgagaacctcatccgcgtgtttcaggaaggcaaagacattcacactcaaacggcaagctggatgtttggattatcagctgaagcgatcgatcctttgatgcgtcgtgcagcgaagaccatcaatttcggtgttctctacggtatgagtgcctttcgtttgtcgcaggaattaggcattccctatgaagaagctcaggcgttcattcagaaatactttcaaagctatcccaaagttaaagcatggatcgagaagactctccgtgaaggccgcacacgtggttacgtagagaccttatttggacgtcgccgctatgttcccgatttaaacgctcgcgtgaaaggcaagcgtgaagccgccgaacgcatggcgttcaacatgcctgtacagggcacggcagctgacctcatgaaacttgcaatggtgcgcctttttccacaattgcgtgaagttggtgcccgcatgctcttgcaggtccacgatgaactcttgttagaagcgccaaaagagcgtgcggaagaggtggcagccctcgcgaaagaagttatggaaggcgtgtggcccttagcggtgcctcttgaagtcgaagttggtattggcgaggattggctggctgccaaagga

SEQ ID NO: 4340 - protein, 841 aa, synthetic construct
  REGION 1..841: note = Variant of DNA polymerase I from Thermus sp. strain 2.9
MHHHHHHGGSGVLPVFEPKGRVLLVDGHHLAYRNFFALKGLTTSLGEPVQGVYGFAKSLLKALKEDGDVVIVVFDAKAPSFRHEAYEAYKAGRAPTPEDFPRQLALMKELVDLLGLERLEVPGFEADDVLATLAKKAEREGYEVQILTADRDLFQLLSPRISVLHPEGHRITPEWLWEKYGLRPEQWVDFRALAGDPSDNIPGVKGIGEKTALKLLKEWGSLENLLKNLDQVKPESVREKILAHLEDLKLSRELSRVRTDLPLEVDFGRRREPDWEGLKAFLERLEFGSLLHEFGLLESPLLAEEAPWPPPEGAFLGYRLSRPEPMWAELLALAASAQGRVYRAEDPHGALRGLFEVRGLLAKDLAVVALREGLDLPPTDDPMLLAYLLDPSNTTPEGVARRYGGEWTEDAAKRALLAERLHANLLGRLQGEERLLWLYEEVEKPLSRVLAHMELTGVKLDVAYLENLSLEVAAHMRRLEEEVFRLAGRSFRLNSRDQLERVLFDELGLPPIGKTEKTGKRSTSAAVLEALREVHPIVDKILQYRELAKLKGTYIDRLPALVHPKTGRLHTRFNQTATATGRLSSSDPNLQNIPVRTPLGQKIRRAFVAEEGWRLVALDYRQIELRVLAHLSGDENLIRVFQEGKDIHTQTASWMFGLSAEAIDPLMRRAAKTINFGVLYGMSAFRLSQELGIPYEEAQAFIQKYFQSYPKVKAWIEKTLREGRTRGYVETLFGRRRYVPDLNARVKGKREAAERMAFNMPVQGTAADLMKLAMVRLFPQLREVGARMLLQVHDELLLEAPKERAEEVAALAKEVMEGVWPLAVPLEVEVGIGEDWLAAKG

SEQ ID NO: 4341 - DNA, 2523 bp, synthetic construct
  misc_feature 1..2523: note = Variant of DNA polymerase I from Thermus sp. strain 2.9
  source 1..2523: mol_type = other DNA
atgcaccatcatcatcatcatggcggtagcggcgtgttaccggtgttcgagcctaaaggtcgcgtgcttctggttgatggccatcatctcgcgtatcgtaacttctttgccctgaaaggattaaccaccagcctgggcgagccggtacagggtgtctacggctttgcaaagtcgctcctgaaagctctgaaagaagacggtgatgtggtgattgttgtctttgatgcgaaagcgccaagttttcgccacgaagcgtacgaagcttacaaagccgggcgtgctccaacgccggaagactttcctcgccaattggcgcttatgaaggaattagtggatttgcttggcctcgaacgcttggaagttcccggtttcgaggcagacgacgtattagcgactctcgcaaagaaagccgaacgtgagggctatgaagtccagatcttgacagcagatcgcgatcttttccagcttttatctccgcgcatctcggtgttacacccggaagggcatcgtatcaccccggaatggctctgggagaaatatggtttgcgtcccgaacaatgggtggattttcgcgccttagcaggcgatccgagcgacaatattccgggagttaaaggtatcggcgagaagacggcgctcaagctccttaaagaatgggggtcgttggagaacttgcttaagaatttagatcaggtcaaaccagagtcagtgcgtgagaagattcttgctcacctcgaagacctcaaattaagccgcgaattgtcccgtgtacgcaccgatttgccgctcgaagttgatttcggtcgccgccgcgaacctgactgggagggtcttaaagcgtttttagagcgtcttgaatttggttcgctcttgcatgaattcggccttttagaaagcccgttactggccgaagaagcaccttggccaccgcccgagggcgcgtttttaggttaccgtttgagtcgcccggaaccgatgtgggccgaattactggctcttgcagcgtctgcccagggacgtgtgtatcgcgcggaagaccctcatggtgcgctccgcggcctcttcgaagtccgtggactccttgccaaagacttagctgttgttgcattgcgcgaaggtcttgatttacctccgactgatgatccaatgcttcttgcgtacctcttggacccgtcaaacacgacgcccgaaggcgtagcccgtcgttacggcggcgagtggaccgaagatgcagcgaaacgcgcgttattggccgaacgtttgcacgccaatttattaggacgtttgcaaggcgaggaacgtctcctctggctttacgaagaagtggagaaaccattgagtcgcgtgctcgcgcatatggaagctaccggtgtcaaattagacgtggcgtatttggagaatctcagccttgaagttgctgcccacatgcgccgcttggaggaagaagtattccgtttagcaggccgttcctttcgccttaactctcgcgatcagttagaacgtgtgttgttcgatgaacttggtctccctcctatcggcaagacagagaagaccggtaaacgtagcacttcagcggcggttttagaagctcttcgcgaagtccatcccattgtggacaagatcttgcagtaccgcgaactcgcgaaattgaaaggcacctatattgaccgtcttccggcattagtccacccgaaaacgggacgcctccatacccgcttcaaccaaacagccacggcgaccggtcgtttgtcctcctctgatccaaaccttcagaatattccagtacgtaccccattgggccagaagatccgccgtgcgtttgtagctgaggagggttggcgtttagtggccctcgattatcgtcaaattgaattacgtgtccttgcccatctttctggcgatgagaacctcatccgcgtgtttcaggaaggcaaagacattcacactcaaacggcaagctggatgtttggattatcagctgaagcgatcgatcctttgatgcgtcgtgcagcgaagaccatcaatttcggtgttctctacggtatgagtgcctttcgtttgtcgcaggaattaggcattccctatgaagaagctcaggcgttcattcagaaatactttcaaagctatcccaaagttaaagcatggatcgagaagactctccgtgaaggccgcacacgtggttacgtagagaccttatttggacgtcgccgctatgttcccgatttaaacgctcgcgtgaaaggcaagcgtgaagccgccgaacgcatggcgttcaacatgcctgtacagggcacggcagctgacctcatgaaacttgcaatggtgcgcctttttccacaattgcgtgaagttggtgcccgcatgctcttgcaggtccacgatgaactcttgttagaagcgccaaaagagcgtgcggaagaggtggcagccctcgcgaaagaagttatggaaggcgtgtggcccttagcggtggggcttgaagtcgaagttggtattggcgaggattggctggctgccaaagga

SEQ ID NO: 4342 - protein, 841 aa, synthetic construct
  REGION 1..841: note = Variant of DNA polymerase I from Thermus sp. strain 2.9
MHHHHHHGGSGVLPVFEPKGRVLLVDGHHLAYRNFFALKGLTTSLGEPVQGVYGFAKSLLKALKEDGDVVIVVFDAKAPSFRHEAYEAYKAGRAPTPEDFPRQLALMKELVDLLGLERLEVPGFEADDVLATLAKKAEREGYEVQILTADRDLFQLLSPRISVLHPEGHRITPEWLWEKYGLRPEQWVDFRALAGDPSDNIPGVKGIGEKTALKLLKEWGSLENLLKNLDQVKPESVREKILAHLEDLKLSRELSRVRTDLPLEVDFGRRREPDWEGLKAFLERLEFGSLLHEFGLLESPLLAEEAPWPPPEGAFLGYRLSRPEPMWAELLALAASAQGRVYRAEDPHGALRGLFEVRGLLAKDLAVVALREGLDLPPTDDPMLLAYLLDPSNTTPEGVARRYGGEWTEDAAKRALLAERLHANLLGRLQGEERLLWLYEEVEKPLSRVLAHMEATGVKLDVAYLENLSLEVAAHMRRLEEEVFRLAGRSFRLNSRDQLERVLFDELGLPPIGKTEKTGKRSTSAAVLEALREVHPIVDKILQYRELAKLKGTYIDRLPALVHPKTGRLHTRFNQTATATGRLSSSDPNLQNIPVRTPLGQKIRRAFVAEEGWRLVALDYRQIELRVLAHLSGDENLIRVFQEGKDIHTQTASWMFGLSAEAIDPLMRRAAKTINFGVLYGMSAFRLSQELGIPYEEAQAFIQKYFQSYPKVKAWIEKTLREGRTRGYVETLFGRRRYVPDLNARVKGKREAAERMAFNMPVQGTAADLMKLAMVRLFPQLREVGARMLLQVHDELLLEAPKERAEEVAALAKEVMEGVWPLAVGLEVEVGIGEDWLAAKG

SEQ ID NO: 4343 - DNA, 2523 bp, synthetic construct
  misc_feature 1..2523: note = Variant of DNA polymerase I from Thermus sp. strain 2.9
  source 1..2523: mol_type = other DNA
atgcaccatcatcatcatcatggcggtagcggcgtgttaccggtgttcgagcctaaaggtcgcgtgcttctggttgatggccatcatctcgcgtatcgtaacttctttgccctgaaaggattaaccaccagcctgggcgagccggtacagggtgtctacggctttgcaaagtcgctcctgaaagctctgaaagaagacggtgatgtggtgattgttgtctttgatgcgaaagcgccaagttttcgccacgaagcgtacgaagcttacaaagccgggcgtgctccaacgccggaagactttcctcgccaattggcgcttatgaaggaattagtggatttgcttggcctcgaacgcttggaagttcccggtttcgaggcagacgacgtattagcgactctcgcaaagaaagccgaacgtgagggctatgaagtccagatcttgacagcagatcgcgatcttttccagcttttatctccgcgcatctcggtgttacacccggaagggcatcgtatcaccccggaatggctctgggagaaatatggtttgcgtcccgaacaatgggtggattttcgcgccttagcaggcgatccgagcgacaatattccgggagttaaaggtatcggcgagaagacggcgctcaagctccttaaagaatgggggtcgttggagaacttgcttaagaatttagatcaggtcaaaccagagtcagtgcgtgagaagattcttgctcacctcgaagacctcaaattaagccgcgaattgtcccgtgtacgcaccgatttgccgctcgaagttgatttcggtcgccgccgcgaacctgactgggagggtcttaaagcgtttttagagcgtcttgaatttggttcgctcttgcatgaattcggccttttagaaagcccgttactggccgaagaagcaccttggccaccgcccgagggcgcgtttttaggttaccgtttgagtcgcccggaaccgatgtgggccgaattactggctcttgcagcgtctgcccagggacgtgtgtatcgcgcggaagaccctcatggtgcgctccgcggcctcttcgaagtccgtggactccttgccaaagacttagctgttgttgcattgcgcgaaggtcttgattggcctccgactgatgatccaatgcttcttgcgtacctcttggacccgtcaaacacgacgcccgaaggcgtagcccgtcgttacggcggcgagtggaccgaagatgcagcgaaacgcgcgttattggccgaacgtttgcacgccaatttattaggacgtttgcaaggcgaggaacgtctcctctggctttacgaagaagtggagaaaccattgagtcgcgtgctcgcgcatatggaagctaccggtgtcaaattagacgtggcgtatttggagaatctcagccttgaagttgctgcccacatgcgccgcttggaggaagaagtattccgtttagcaggccgttcctttcgccttaactctcgcgatcagttagaacgtgtgttgttcgatgaacttggtctccctcctatcggcaagacagagaagaccggtaaacgtagcacttcagcggcggttttagaagctcttcgcgaagtccatcccattgtggacaagatcttgcagtaccgcgaactcgcgaaattgaaaggcacctatattgaccgtcttccggcattagtccacccgaaaacgggacgcctccatacccgcttcaaccaaacagccacggcgaccggtcgtttgtcctcctctgatccaaaccttcagaatattccagtacgtaccccattgggccagaagatccgccgtgcgtttgtagctgaggagggttggcgtttagtggccctcgattatcgtcaaattgaattacgtgtccttgcccatctttctggcgatgagaacctcatccgcgtgtttcaggaaggcaaagacattcacactcaaacggcaagctggatgtttggattatcagctgaagcgatcgatcctttgatgcgtcgtgcagcgaagaccatcaatttcggtgttctctacggtatgagtgcctttcgtttgtcgcaggaattaggcattccctatgaagaagctctggcgttcattcagaaatactttcaaagctatcccaaagttaaagcatggatcgagaagactctccgtgaaggccgcacacgtggttacgtagagaccttatttggacgtcgccgctatgttcccgatttaaacgctcgcgtgaaaggcaagcgtgaagccgccgaacgcatggcgttcaacatgcctgtacagggcacggcagctgacctcatgaaacttgcaatggtgcgcctttttccacaattgcgtgaagttggtgcccgcatgctcttgcaggtccacgatgaactcttgttagaagcgccaaaagagcgtgcggaagaggtggcagccctcgcgaaagaagttatggaaggcgtgtggcccttagcggtgcctcttgaagtcgaagttggtattggcgaggattggctggctgccaaagga

SEQ ID NO: 4344 - protein, 841 aa, synthetic construct
  REGION 1..841: note = Variant of DNA polymerase I from Thermus sp. strain 2.9
MHHHHHHGGSGVLPVFEPKGRVLLVDGHHLAYRNFFALKGLTTSLGEPVQGVYGFAKSLLKALKEDGDVVIVVFDAKAPSFRHEAYEAYKAGRAPTPEDFPRQLALMKELVDLLGLERLEVPGFEADDVLATLAKKAEREGYEVQILTADRDLFQLLSPRISVLHPEGHRITPEWLWEKYGLRPEQWVDFRALAGDPSDNIPGVKGIGEKTALKLLKEWGSLENLLKNLDQVKPESVREKILAHLEDLKLSRELSRVRTDLPLEVDFGRRREPDWEGLKAFLERLEFGSLLHEFGLLESPLLAEEAPWPPPEGAFLGYRLSRPEPMWAELLALAASAQGRVYRAEDPHGALRGLFEVRGLLAKDLAVVALREGLDWPPTDDPMLLAYLLDPSNTTPEGVARRYGGEWTEDAAKRALLAERLHANLLGRLQGEERLLWLYEEVEKPLSRVLAHMEATGVKLDVAYLENLSLEVAAHMRRLEEEVFRLAGRSFRLNSRDQLERVLFDELGLPPIGKTEKTGKRSTSAAVLEALREVHPIVDKILQYRELAKLKGTYIDRLPALVHPKTGRLHTRFNQTATATGRLSSSDPNLQNIPVRTPLGQKIRRAFVAEEGWRLVALDYRQIELRVLAHLSGDENLIRVFQEGKDIHTQTASWMFGLSAEAIDPLMRRAAKTINFGVLYGMSAFRLSQELGIPYEEALAFIQKYFQSYPKVKAWIEKTLREGRTRGYVETLFGRRRYVPDLNARVKGKREAAERMAFNMPVQGTAADLMKLAMVRLFPQLREVGARMLLQVHDELLLEAPKERAEEVAALAKEVMEGVWPLAVPLEVEVGIGEDWLAAKG

SEQ ID NO: 4345 - DNA, 2523 bp, synthetic construct
  misc_feature 1..2523: note = Variant of DNA polymerase I from Thermus sp. strain 2.9
  source 1..2523: mol_type = other DNA
atgcaccatcatcatcatcatggcggtagcggcgtgttaccggtgttcgagcctaaaggtcgcgtgcttctggttgatggccatcatctcgcgtatcgtaacttctttgccctgaaaggattaaccaccagcctgggcgagccggtacagggtgtctacggctttgcaaagtcgctcctgaaagctctgaaagaagacggtgatgtggtgattgttgtctttgatgcgaaagcgccaagttttcgccacgaagcgtacgaagcttacaaagccgggcgtgctccaacgccggaagactttcctcgccaattggcgcttatgaaggaattagtggatttgcttggcctcgaacgcttggaagttcccggtttcgaggcagacgacgtattagcgactctcgcaaagaaagccgaacgtgagggctatgaagtccagatcttgacagcagatcgcgatcttttccagcttttatctccgcgcatctcggtgttacacccggaagggcatcgtatcaccccggaatggctctgggagaaatatggtttgcgtcccgaacaatgggtggattttcgcgccttagcaggcgatccgagcgacaatattccgggagttaaaggtatcggcgagaagacggcgctcaagctccttaaagaatgggggtcgttggagaacttgcttaagaatttagatcaggtcaaaccagagtcagtgcgtgagaagattcttgctcacctcgaagacctcaaattaagccgcgaattgtcccgtgtacgcaccgatttgccgctcgaagttgatttcggtcgccgccgcgaacctgactgggagggtcttaaagcgtttttagagcgtcttgaatttggttcgctcttgcatgaattcggccttttagaaagcccgttactggccgaagaagcaccttggccaccgcccgagggcgcgtttttaggttaccgtttgagtcgcccggaaccgatgtgggccgaattactggctcttgcagcgtctgcccagggacgtgtgtatcgcgcggaagaccctcatggtgcgctccgcggcctcttcgaagtccgtggactccttgccaaagacttagctgttgttgcattgcgcgaaggtcttgatttacctccgactgatgatccaatgcttcttgcgtacctcttggacccgtcaaacacgacgcccgaaggcgtagcccgtcgttacggcggcgagtggaccgaagatgcagcgaaacgcgcgttattggccgaacgtttgcacgccaatttattaggacgtttgcaaggcgaggaacgtctcctctggctttacgaagaagtggagaaaccattgagtcgcgtgctcgcgcatatggaagctaccggtgtcaaattagacgtggcgtatttggagaatctcagccttgaagttgctgcccacatgcgccgcttggaggaagaagtattccgtttagcaggccgttcctttcgccttaactctcgcgatcagttagaacgtgtgttgttcgatgaacttggtctccctcctatcggcaagacagagaagaccggtaaacgtagcacttcagcggcggttttagaagctcttcgcgaagtccatcccattgtggacaagatcttgcagtaccgcgaactcgcgaaattgaaaggcacctatattgaccgtcttccggcattagtccacccgaaaacgggacgcctccatacccgcttcaaccaaacagccacggcgaccggtcgtttgtcctcctctgatccaaaccttcagaatattccagtacgtaccccattgggccagaagatccgccgtgcgtttgtagctgaggagggttggcgtttagtggccctcgattatcgtcaaattgaattacgtgtccttgcccatctttctggcgatgagaacctcatccgcgtgtttcaggaaggcaaagacattcacactcaaacggcaagctggatgtttggattatcagctgaagcgatcgatcctttgatgcgtcgtgcagcgaagaccatcaatttcggtgttctctacggtatgagtgcctttcgtttgtcgcaggaattaggcattccctatgaagaagctcaggcgttcattcagaaatactttcaaagctatcccaaagttaaagcacagatcgagaagactctccgtgaaggccgcacacgtggttacgtagagaccttatttggacgtcgccgctatgttcccgatttaaacgctcgcgtgaaaggcaagcgtgaagccgccgaacgcatggcgttcaacatgcctgtacagggcacggcagctgacctcatgaaacttgcaatggtgcgcctttttccacaattgcgtgaagttggtgcccgcatgctcttgcaggtccacgatgaactcttgttagaagcgccaaaagagcgtgcggaagaggtggcagccctcgcgaaagaagttatggaaggcgtgtggcccttagcggtgcctcttgaagtcgaagttggtattggcgaggattggctggctgccaaagga

SEQ ID NO: 4346 - protein, 841 aa, synthetic construct
  REGION 1..841: note = Variant of DNA polymerase I from Thermus sp. strain 2.9
MHHHHHHGGSGVLPVFEPKGRVLLVDGHHLAYRNFFALKGLTTSLGEPVQGVYGFAKSLLKALKEDGDVVIVVFDAKAPSFRHEAYEAYKAGRAPTPEDFPRQLALMKELVDLLGLERLEVPGFEADDVLATLAKKAEREGYEVQILTADRDLFQLLSPRISVLHPEGHRITPEWLWEKYGLRPEQWVDFRALAGDPSDNIPGVKGIGEKTALKLLKEWGSLENLLKNLDQVKPESVREKILAHLEDLKLSRELSRVRTDLPLEVDFGRRREPDWEGLKAFLERLEFGSLLHEFGLLESPLLAEEAPWPPPEGAFLGYRLSRPEPMWAELLALAASAQGRVYRAEDPHGALRGLFEVRGLLAKDLAVVALREGLDLPPTDDPMLLAYLLDPSNTTPEGVARRYGGEWTEDAAKRALLAERLHANLLGRLQGEERLLWLYEEVEKPLSRVLAHMEATGVKLDVAYLENLSLEVAAHMRRLEEEVFRLAGRSFRLNSRDQLERVLFDELGLPPIGKTEKTGKRSTSAAVLEALREVHPIVDKILQYRELAKLKGTYIDRLPALVHPKTGRLHTRFNQTATATGRLSSSDPNLQNIPVRTPLGQKIRRAFVAEEGWRLVALDYRQIELRVLAHLSGDENLIRVFQEGKDIHTQTASWMFGLSAEAIDPLMRRAAKTINFGVLYGMSAFRLSQELGIPYEEAQAFIQKYFQSYPKVKAQIEKTLREGRTRGYVETLFGRRRYVPDLNARVKGKREAAERMAFNMPVQGTAADLMKLAMVRLFPQLREVGARMLLQVHDELLLEAPKERAEEVAALAKEVMEGVWPLAVPLEVEVGIGEDWLAAKG

SEQ ID NO: 4347 - DNA, 2523 bp, synthetic construct
  misc_feature 1..2523: note = Variant of DNA polymerase I from Thermus sp. strain 2.9
  source 1..2523: mol_type = other DNA
atgcaccatcatcatcatcatggcggtagcggcgtgttaccggtgttcgagcctaaaggtcgcgtgcttctggttgatggccatcatctcgcgtatcgtaacttctttgccctgaaaggattaaccaccagcctgggcgagccggtacagggtgtctacggctttgcaaagtcgctcctgaaagctctgaaagaagacggtgatgtggtgattgttgtctttgatgcgaaagcgccaagttttcgccacgaagcgtacgaagcttacaaagccgggcgtgctccaacgccggaagactttcctcgccaattggcgcttatgaaggaattagtggatttgcttggcctcgaacgcttggaagttcccggtttcgaggcagacgacgtattagcgactctcgcaaagaaagccgaacgtgagggctatgaagtccagatcttgacagcagatcgcgatcttttccagcttttatctccgcgcatctcggtgttacacccggaagggcatcgtatcaccccggaatggctctgggagaaatatggtttgcgtcccgaacaatgggtggattttcgcgccttagcaggcgatccgagcgacaatattccgggagttaaaggtatcggcgagaagacggcgctcaagctccttaaagaatgggggtcgttggagaacttgcttaagaatttagatcaggtcaaaccagagtcagtgcgtgagaagattcttgctcacctcgaagacctcaaattaagccgcgaattgtcccgtgtacgcaccgatttgccgctcgaagttgatttcggtcgccgccgcgaacctgactgggagggtcttaaagcgtttttagagcgtcttgaatttggttcgctcttgcatgaattcggccttttagaaagcccgttactggccgaagaagcaccttggccaccgcccgagggcgcgtttttaggttaccgtttgagtcgcccggaaccgatgtgggccgaattactggctcttgcagcgtctgcccagggacgtgtgtatcgcgcggaagaccctcatggtgcgctccgcggcctcttcgaagtccgtggactccttgccaaagacttagctgttgttgcattgcgcgaaggtcttgatttacctccgactgatgatccaatgcttcttgcgtacctcttggacccgtcaaacacgacgcccgaaggcgtagcccgtcgttacggcggcgagtggaccgaagatgcagcgaaacgcgcgttattggccgaacgtttgcacgccaatttattaggacgtttgcaaggcgaggaacgtctcctctggctttacgaagaagtggagaaaccattgagtcgcgtgctcgcgcatatggaagctaccggtgtcaaattagacgtggcgtatttggagaatctcagccttgaagttgctgcccacatgcgccgcttggaggaagaagtattccgtttagcaggccgttcctttcgccttaactctcgcgatcagttagaacgtgtgttgttcgatgaacttggtctccctcctatcggcaagacagagaagaccggtaaacgtagcacttcagcggcggttttagaagctcttcgcgaagtccatcccattgtggacaagatcttgcagtaccgcgaactcgcgaaattgaaaggcacctatattgaccgtcttccggcattagtccacccgaaaacgggacgcctccatacccgcttcaaccaaacagccacggcgaccggtcgtttgtcctcctctgatccaaaccttcagaatattccagtacgtaccccattgggccagaagatccgccgtgcgtttgtagctgaggagagttggcgtttagtggccctcgattatcgtcaaattgaattacgtgtccttgcccatctttctggcgatgagaacctcatccgcgtgtttcaggaaggcaaagacattcacactcaaacggcaagctggatgtttggattatcagctgaagcgatcgatcctttgatgcgtcgtgcagcgaagaccatcaatttcggtgttctctacggtatgagtgcctttcgtttgtcgcaggaattaggcattccctatgaagaagctcaggcgttcattcagaaatactttcaaagctatcccaaagttaaagcatggatcgagaagactctccgtgaaggccgcacacgtggttacgtagagaccttatttggacgtcgccgctatgttcccgatttaaacgctcgcgtgaaaggcaagcgtgaagccgccgaacgcatggcgttcaacatgcctgtacagggcacggcagctgacctcatgaaacttgcaatggtgcgcctttttccacaattgcgtgaagttggtgcccgcatgctcttgcaggtccacgatgaactcttgttagaagcgccaaaagagcgtgcggaagaggtggcagccctcgcgaaagaagttatggaaggcgtgtggcccttagcggtgcctcttgaagtcgaagttggtattggcgaggattggctggctgccaaagga

SEQ ID NO: 4348 - protein, 841 aa, synthetic construct
  REGION 1..841: note = Variant of DNA polymerase I from Thermus sp. strain 2.9
MHHHHHHGGSGVLPVFEPKGRVLLVDGHHLAYRNFFALKGLTTSLGEPVQGVYGFAKSLLKALKEDGDVVIVVFDAKAPSFRHEAYEAYKAGRAPTPEDFPRQLALMKELVDLLGLERLEVPGFEADDVLATLAKKAEREGYEVQILTADRDLFQLLSPRISVLHPEGHRITPEWLWEKYGLRPEQWVDFRALAGDPSDNIPGVKGIGEKTALKLLKEWGSLENLLKNLDQVKPESVREKILAHLEDLKLSRELSRVRTDLPLEVDFGRRREPDWEGLKAFLERLEFGSLLHEFGLLESPLLAEEAPWPPPEGAFLGYRLSRPEPMWAELLALAASAQGRVYRAEDPHGALRGLFEVRGLLAKDLAVVALREGLDLPPTDDPMLLAYLLDPSNTTPEGVARRYGGEWTEDAAKRALLAERLHANLLGRLQGEERLLWLYEEVEKPLSRVLAHMEATGVKLDVAYLENLSLEVAAHMRRLEEEVFRLAGRSFRLNSRDQLERVLFDELGLPPIGKTEKTGKRSTSAAVLEALREVHPIVDKILQYRELAKLKGTYIDRLPALVHPKTGRLHTRFNQTATATGRLSSSDPNLQNIPVRTPLGQKIRRAFVAEESWRLVALDYRQIELRVLAHLSGDENLIRVFQEGKDIHTQTASWMFGLSAEAIDPLMRRAAKTINFGVLYGMSAFRLSQELGIPYEEAQAFIQKYFQSYPKVKAWIEKTLREGRTRGYVETLFGRRRYVPDLNARVKGKREAAERMAFNMPVQGTAADLMKLAMVRLFPQLREVGARMLLQVHDELLLEAPKERAEEVAALAKEVMEGVWPLAVPLEVEVGIGEDWLAAKG

SEQ ID NO: 4349 - DNA, 2523 bp, synthetic construct
  misc_feature 1..2523: note = Variant of DNA polymerase I from Thermus sp. strain 2.9
  source 1..2523: mol_type = other DNA
atgcaccatcatcatcatcatggcggtagcggcgtgttaccggtgttcgagcctaaaggtcgcgtgcttctggttgatggccatcatctcgcgtatcgtaacttctttgccctgaaaggattaaccaccagcctgggcgagccggtacagggtgtctacggctttgcaaagtcgctcctgaaagctctgaaagaagacggtgatgtggtgattgttgtctttgatgcgaaagcgccaagttttcgccacgaagcgtacgaagcttacaaagccgggcgtgctccaacgccggaagactttcctcgccaattggcgcttatgaaggaattagtggatttgcttggcctcgaacgcttggaagttcccggtttcgaggcagacgacgtattagcgactctcgcaaagaaagccgaacgtgagggctatgaagtccagatcttgacagcagatcgcgatcttttccagcttttatctccgcgcatctcggtgttacacccggaagggcatcgtatcaccccggaatggctctgggagaaatatggtttgcgtcccgaacaatgggtggattttcgcgccttagcaggcgatccgagcgacaatattccgggagttaaaggtatcggcgagaagacggcgctcaagctccttaaagaatgggggtcgttggagaacttgcttaagaatttagatcaggtcaaaccagagtcagtgcgtgagaagattcttgctcacctcgaagacctcaaattaagccgcgaattgtcccgtgtacgcaccgatttgccgctcgaagttgatttcggtcgccgccgcgaacctgactgggagggtcttaaagcgtttttagagcgtcttgaatttggttcgctcttgcatgaattcggccttttagaaagcccgttactggccgaagaagcaccttggccaccgcccgagggcgcgtttttaggttaccgtttgagtcgcccggaaccgatgtgggccgaattactggctcttgcagcgtctgcccagggacgtgtgtatcgcgcggaagaccctcatggtgcgctccgcggcctcttcgaagtccgtggactccttgccaaagacttagctgttgttgcattgcgcgaaggtcttgatttacctccgactgatgatccaatgcttcttgcgtacctcttggacccgtcaaacacgacgcccgaaggcgtagcccgtcgttacggcggcgagtggaccgaagatgcagcgaaacgcgcgttattggccgaacgtttgcacgccaatttattaggacgtttgcaaggcgaggaacgtctcctctggctttacgaagaagtggagaaaccattgagtcgcgtgctcgcgcatatggaagctaccggtgtcaaattagacgtggcgtatttggagaatctcagccttgaagttgctgcccacatgcgccgcttggaggaagaagtattccgtttagcaggccgttcctttcgccttaactctcgcgatcagttagaacgtgtgttgttcgatgaacttggtctccctcctatcggcaagacagagaagaccggtaaacgtagcacttcagcggcggttttagaagctcttcgcgaagtccatcccattgtggacaagatcttgcagtaccgcgaactcgcgaaattgaaaggcacctatattgaccgtcttccggcattagtccacccgaaaacgggacgcctccatacccgcttcaaccaaacagccacggcgaccggtcgtttgtcctcctctgatccaaaccttcagaatattccagtacgtaccccattgggccagaagatccgccgtgcgtttgtagctgaggagggttggcgtttagtggccctcgattatcgtcaaattgaattacgtgtcatggcccatctttctggcgatgagaacctcatccgcgtgtttcaggaaggcaaagacattcacactcaaacggcaagctggatgtttggattatcagctgaagcgatcgatcctttgatgcgtcgtgcagcgaagaccatcaatttcggtgttctctacggtatgagtgcctttcgtttgtcgcaggaattaggcattccctatgaagaagctcaggcgttcattcagaaatactttcaaagctatcccaaagttaaagcatggatcgagaagactctccgtgaaggccgcacacgtggttacgtagagaccttatttggacgtcgccgctatgttcccgatttaaacgctcgcgtgaaaggcaagcgtgaagccgccgaacgcatggcgttcaacatgcctgtacagggcacggcagctgacctcatgaaacttgcaatggtgcgcctttttccacaattgcgtgaagttggtgcccgcatgctcttgcaggtccacgatgaactcttgttagaagcgccaaaagagcgtgcggaagaggtggcagccctcgcgaaagaagttatggaaggcgtgtggcccttagcggtgcctcttgaagtcgaagttggtattggcgaggattggctggctgccaaagga

SEQ ID NO: 4350 - protein, 841 aa, synthetic construct
  REGION 1..841: note = Variant of DNA polymerase I from Thermus sp. strain 2.9
MHHHHHHGGSGVLPVFEPKGRVLLVDGHHLAYRNFFALKGLTTSLGEPVQGVYGFAKSLLKALKEDGDVVIVVFDAKAPSFRHEAYEAYKAGRAPTPEDFPRQLALMKELVDLLGLERLEVPGFEADDVLATLAKKAEREGYEVQILTADRDLFQLLSPRISVLHPEGHRITPEWLWEKYGLRPEQWVDFRALAGDPSDNIPGVKGIGEKTALKLLKEWGSLENLLKNLDQVKPESVREKILAHLEDLKLSRELSRVRTDLPLEVDFGRRREPDWEGLKAFLERLEFGSLLHEFGLLESPLLAEEAPWPPPEGAFLGYRLSRPEPMWAELLALAASAQGRVYRAEDPHGALRGLFEVRGLLAKDLAVVALREGLDLPPTDDPMLLAYLLDPSNTTPEGVARRYGGEWTEDAAKRALLAERLHANLLGRLQGEERLLWLYEEVEKPLSRVLAHMEATGVKLDVAYLENLSLEVAAHMRRLEEEVFRLAGRSFRLNSRDQLERVLFDELGLPPIGKTEKTGKRSTSAAVLEALREVHPIVDKILQYRELAKLKGTYIDRLPALVHPKTGRLHTRFNQTATATGRLSSSDPNLQNIPVRTPLGQKIRRAFVAEEGWRLVALDYRQIELRVMAHLSGDENLIRVFQEGKDIHTQTASWMFGLSAEAIDPLMRRAAKTINFGVLYGMSAFRLSQELGIPYEEAQAFIQKYFQSYPKVKAWIEKTLREGRTRGYVETLFGRRRYVPDLNARVKGKREAAERMAFNMPVQGTAADLMKLAMVRLFPQLREVGARMLLQVHDELLLEAPKERAEEVAALAKEVMEGVWPLAVPLEVEVGIGEDWLAAKG

SEQ ID NO: 4351 - DNA, 2523 bp, synthetic construct
  misc_feature 1..2523: note = Variant of DNA polymerase I from Thermus sp. strain 2.9
  source 1..2523: mol_type = other DNA
atgcaccatcatcatcatcatggcggtagcggcgtgttaccggtgttcgagcctaaaggtcgcgtgcttctggttgatggccatcatctcgcgtatcgtaacttctttgccctgaaaggattaaccaccagcctgggcgagccggtacagggtgtctacggctttgcaaagtcgctcctgaaagctctgaaagaagacggtgatgtggtgattgttgtctttgatgcgaaagcgccaagttttcgccacgaagcgtacgaagcttacaaagccgggcgtgctccaacgccggaagactttcctcgccaattggcgcttatgaaggaattagtggatttgcttggcctcgaacgcttggaagttcccggtttcgaggcagacgacgtattagcgactctcgcaaagaaagccgaacgtgagggctatgaagtccagatcttgacagcagatcgcgatcttttccagcttttatctccgcgcatctcggtgttacacccggaagggcatcgtatcaccccggaatggctctgggagaaatatggtttgcgtcccgaacaatgggtggattttcgcgccttagcaggcgatccgagcgacaatattccgggagttaaaggtatcggcgagaagacggcgctcaagctccttaaagaatgggggtcgttggagaacttgcttaagaatttagatcaggtcaaaccagagtcagtgcgtgagaagattcttgctcacctcgaagacctcaaattaagccgcgaattgtcccgtgtacgcaccgatttgccgctcgaagttgatttcggtcgccgccgcgaacctgactgggagggtcttaaagcgtttttagagcgtcttgaatttggttcgctcttgcatgaattcggccttttagaaagcccgttactggccgaagaagcaccttggccaccgcccgagggcgcgtttttaggttaccgtttgagtcgcccggaaccgatgtgggccgaattactggctcttgcagcgtctgcccagggacgtgtgtatcgcgcggaagaccctcatggtgcgctccgcggcctcttcgaagtccgtggactccttgccaaagacttagctgttgttgcattgcgcgaaggtcttgatttacctccgactgatgatccaatgcttcttgcgtacctcttggacccgtcaaacacgacgcccgaaggcgtagcccgtcgttacggcggcgagtggaccgaagatgcagcgaaacgcgcgttattggccgaacgtttgcacgccaatttattaggacgtttgcaaggcgaggaacgtctcctctggctttacgaagaagtggagaaaccattgagtcgcgtgctcgcgcatatggaagctaccggtgtcaaattagacgtggcgtatttggagaatctcagccttgaagttgctgcccacatgcgccgcttggaggaagaagtattccgtttagcaggccgttcctttcgccttaactctcgcgatcagttagaacgtgtgttgttcgatgaacttggtctccctcctatcggcaagacagagaagaccggtaaacgtagcacttcagcggcggttttagaagctcttcgcgaagtccatcccattgtggacaagatcttgcagtaccgcgaactcgcgaaattgaaaggcacctatattgaccgtcttccggcattagtccacccgaaaacgggacgcctccatacccgcttcaaccaaacagccacggcgaccggtcgtttgtcctcctctgatccaaaccttcagaatattccagtacgtaccccattgggccagaagatccgccgtgcgtttgtagctgaggagggttggcgtttagtggccctcgattatcgtcaaattgaattacgtgtccttgcccatctttctggcgatgagaacctcatccgcgtgtttcaggaaggcaaagacattcacactcaaacggcaagctggatgtttggattatcagctgaagcgatcgatcctttgatgcgtcgtgcagcgaagaccatcaatttcggtgttctctacggtatgagtgcctttcgtttgtcgcaggaattaggcattccctatgaagaagctcaggcgttcattgtgaaatactttcaaagctatcccaaagttaaagcatggatcgagaagactctccgtgaaggccgcacacgtggttacgtagagaccttatttggacgtcgccgctatgttcccgatttaaacgctcgcgtgaaaggcaagcgtgaagccgccgaacgcatggcgttcaacatgcctgtacagggcacggcagctgacctcatgaaacttgcaatggtgcgcctttttccacaattgcgtgaagttggtgcccgcatgctcttgcaggtccacgatgaactcttgttagaagcgccaaaagagcgtgcggaagaggtggcagccctcgcgaaagaagttatggaaggcgtgtggcccttagcggtgcctcttgaagtcgaagttggtattggcgaggattggctggctgccaaagga

SEQ ID NO: 4352 - protein, 841 aa, synthetic construct
  REGION 1..841: note = Variant of DNA polymerase I from Thermus sp. strain 2.9
MHHHHHHGGSGVLPVFEPKGRVLLVDGHHLAYRNFFALKGLTTSLGEPVQGVYGFAKSLLKALKEDGDVVIVVFDAKAPSFRHEAYEAYKAGRAPTPEDFPRQLALMKELVDLLGLERLEVPGFEADDVLATLAKKAEREGYEVQILTADRDLFQLLSPRISVLHPEGHRITPEWLWEKYGLRPEQWVDFRALAGDPSDNIPGVKGIGEKTALKLLKEWGSLENLLKNLDQVKPESVREKILAHLEDLKLSRELSRVRTDLPLEVDFGRRREPDWEGLKAFLERLEFGSLLHEFGLLESPLLAEEAPWPPPEGAFLGYRLSRPEPMWAELLALAASAQGRVYRAEDPHGALRGLFEVRGLLAKDLAVVALREGLDLPPTDDPMLLAYLLDPSNTTPEGVARRYGGEWTEDAAKRALLAERLHANLLGRLQGEERLLWLYEEVEKPLSRVLAHMEATGVKLDVAYLENLSLEVAAHMRRLEEEVFRLAGRSFRLNSRDQLERVLFDELGLPPIGKTEKTGKRSTSAAVLEALREVHPIVDKILQYRELAKLKGTYIDRLPALVHPKTGRLHTRFNQTATATGRLSSSDPNLQNIPVRTPLGQKIRRAFVAEEGWRLVALDYRQIELRVLAHLSGDENLIRVFQEGKDIHTQTASWMFGLSAEAIDPLMRRAAKTINFGVLYGMSAFRLSQELGIPYEEAQAFIVKYFQSYPKVKAWIEKTLREGRTRGYVETLFGRRRYVPDLNARVKGKREAAERMAFNMPVQGTAADLMKLAMVRLFPQLREVGARMLLQVHDELLLEAPKERAEEVAALAKEVMEGVWPLAVPLEVEVGIGEDWLAAKG

SEQ ID NO: 4353 - DNA, 2523 bp, synthetic construct
  misc_feature 1..2523: note = Variant of DNA polymerase I from Thermus sp. strain 2.9
  source 1..2523: mol_type = other DNA
atgcaccatcatcatcatcatggcggtagcggcgtgttaccggtgttcgagcataaaggtcgcgtgcttctggttgatggccatcatctcgcgtatcgtaacttctttgccctgaaaggattaaccaccagcctgggcgagccggtacagggtgtctacggctttgcaaagtcgctcctgaaagctctgaaagaagacggtgatgtggtgattgttgtctttgatgcgaaagcgccaagttttcgccacgaagcgtacgaagcttacaaagccgggcgtgctccaacgccggaagactttcctcgccaattggcgcttatgaaggaattagtggatttgcttggcctcgaacgcttggaagttcccggtttcgaggcagacgacgtattagcgactctcgcaaagaaagccgaacgtgagggctatgaagtccagatcttgacagcagatcgcgatcttttccagcttttatctccgcgcatctcggtgttacacccggaagggcatcgtatcaccccggaatggctctgggagaaatatggtttgcgtcccgaacaatgggtggattttcgcgccttagcaggcgatccgagcgacaatattccgggagttaaaggtatcggcgagaagacggcgctcaagctccttaaagaatgggggtcgttggagaacttgcttaagaatttagatcaggtcaaaccagagtcagtgcgtgagaagattcttgctcacctcgaagacctcaaattaagccgcgaattgtcccgtgtacgcaccgatttgccgctcgaagttgatttcggtcgccgccgcgaacctgactgggagggtcttaaagcgtttttagagcgtcttgaatttggttcgctcctgcatgaattcggccttttagaaagcccgttactggccgaagaagcaccttggccaccgcccgagggcgcgtttttaggttaccgtttgagtcgcccggaaccgatgtgggccgaattactggctcttgcagcgtctgcccagggacgtgtgtatcgcgcggaagaccctcatggtgcgctccgcggcctcttcgaagtccgtggactccttgccaaagacttagctgttgttgcattgcgcgaaggtcttgatttacctccgactgatgatccaatgcttcttgcgtacctcttggacccgtcaaacacgacgcccgaaggcgtagcccgtcgttacggcggcgagtggaccgaagatgcagcgaaacgcgcgttattggccgaacgtttgcacgaaaatttattaggacgtttgcaaggcgaggaacgtctcctctggctttacgaagaagtggagaaaccattgagtcgcgtgctcgcgcatatggaagctaccggtgtcaaattagacgtggcgtatttggagaatctcagccttgaagttgctgcccacatgcgccgcttggaggaagaagtattccgtttagcaggccgttcctttcgccttaactctcgcgatcagttagaacgtgtgttgttcgatgaacttggtctccctcctatcggcaagacagagaagaccggtaaacgtagcacttcagcagcggttttagacgctcttcgcgaagtccatcccattgtggacaagatcttgcagtaccgcgaactcgcgaaattgaaaggcacctatattgaccgtcttccggcattagtccacccgaaaacgggacgcctccatacccgcttcaaccaaacagccacggcgaccggtcgtttgtcctcctctgatccaaaccttcagaatattccagtacgtaccccattgggccagaagatccgccgtgcgtttgtagctgaggagggttggcgtttagtggccctcgattatcgtcaaattgaattacgtgtccttgcccatctttctggcgatgagaacctcatccgcgtgtttcaggaaggcaaagacattcacactcaaacggcaagctggatgtttggattatcagctgaagcgatcgatcctttgatgcgtcgtgcagcgaagaccatcaatttcggtgttctctacggtatgagtgcctttcgtttgtcgcaggaattaggcattcccaaggaagaagctcaggcgttcattcagaaatactttcaaagctatcccaaagttaaagcatggatcgagaagactctccgtgaaggccgcacacgtggttacgtagagaccttatttggacgtcgccgctatgttcccgatttaaacgctcgcgtgaaaggcaagcgtgaagccgccgaacgcatggcgttcaacatgcctgtacagggcacggcagctgacctcatgaaacttgcaatggtgcgcctttttccacaattgcgtgaagttggtgcccgcatgctcttgcaggtccacgatgaactcttgttagaagcgccaaaagagcgtgcggaagaggtggcagccctcgcgaaagaagttatggaaggcgtgtggcccttagcggtgcctcttgaagtcgaagttggtattggcgaggattggctggctgccaaagga

SEQ ID NO: 4354 - protein, 841 aa, synthetic construct
  REGION 1..841: note = Variant of DNA polymerase I from Thermus sp. strain 2.9
MHHHHHHGGSGVLPVFEHKGRVLLVDGHHLAYRNFFALKGLTTSLGEPVQGVYGFAKSLLKALKEDGDVVIVVFDAKAPSFRHEAYEAYKAGRAPTPEDFPRQLALMKELVDLLGLERLEVPGFEADDVLATLAKKAEREGYEVQILTADRDLFQLLSPRISVLHPEGHRITPEWLWEKYGLRPEQWVDFRALAGDPSDNIPGVKGIGEKTALKLLKEWGSLENLLKNLDQVKPESVREKILAHLEDLKLSRELSRVRTDLPLEVDFGRRREPDWEGLKAFLERLEFGSLLHEFGLLESPLLAEEAPWPPPEGAFLGYRLSRPEPMWAELLALAASAQGRVYRAEDPHGALRGLFEVRGLLAKDLAVVALREGLDLPPTDDPMLLAYLLDPSNTTPEGVARRYGGEWTEDAAKRALLAERLHENLLGRLQGEERLLWLYEEVEKPLSRVLAHMEATGVKLDVAYLENLSLEVAAHMRRLEEEVFRLAGRSFRLNSRDQLERVLFDELGLPPIGKTEKTGKRSTSAAVLDALREVHPIVDKILQYRELAKLKGTYIDRLPALVHPKTGRLHTRFNQTATATGRLSSSDPNLQNIPVRTPLGQKIRRAFVAEEGWRLVALDYRQIELRVLAHLSGDENLIRVFQEGKDIHTQTASWMFGLSAEAIDPLMRRAAKTINFGVLYGMSAFRLSQELGIPKEEAQAFIQKYFQSYPKVKAWIEKTLREGRTRGYVETLFGRRRYVPDLNARVKGKREAAERMAFNMPVQGTAADLMKLAMVRLFPQLREVGARMLLQVHDELLLEAPKERAEEVAALAKEVMEGVWPLAVPLEVEVGIGEDWLAAKG

SEQ ID NO: 4355 - DNA, 2523 bp, synthetic construct
  misc_feature 1..2523: note = Variant of DNA polymerase I from Thermus sp. strain 2.9
  source 1..2523: mol_type = other DNA
atgcaccatcatcatcatcatggcggtagcggcgtgttaccggtgttcgagcctaaaggtcgcgtgcttctggttgatggccatcatctcgcgtatcgtaacttctttgccctgaaaggattaaccaccagcctgggcgagccggtacagggtgtctacggctttgcaaagtcgctcctgaaagctctgaaagaagacggtgatgtggtgattgttgtctttgatgcgaaagcgccaagttttcgccacgaagcgtacgaagcttacaaagccgggcgtgctccaacgccggaagactttcctcgccaattggcgcttatgaaggaattagtggatttgcttggcctcgaacgcttggaagttcccggtttcgaggcagacgacgtattagcgactctcgcaaagaaagccgaacgtgagggctatgaagtccagatcttgacagcagatcgcgatcttttccagcttttatctccgcgcatctcggtgttacacccggaagggcatcgtatcaccccggaatggctctgggagaaatatggtttgcgtcccgaacaatgggtggattttcgcgccttagcaggcgatccgagcgacaatattccgggagttaaaggtatcggcgagaagacggcgctcaagctccttaaagaatgggggtcgttggagaacttgcttaagaatttagatcaggtcaaaccagagtcagtgcgtgagaagattcttgctcacctcgaagacctcaaattaagccgcgaattgtcccgtgtacgcaccgatttgccgctcgaagttgatttcggtcgccgccgcgaacctgactgggagggtcttaaagcgtttttagagcgtcttgaatttggttcgctcttgcatgaattcggccttttagaaagcccgttactggccgaagaagcaccttggccaccgcccgagggcgcgtttttaggttaccgtttgagtcgcccggaaccgatgtgggccgaattactggctcttgcagcgtctgcccagggacgtgtgtatcgcgcggaagaccctcatggtgcgctccgcggcctcttcgaagtccgtggactccttgccaaagacttagctgttgttgcattgcgcgaaggtcttgatttacctccgactgatgatccaatgcttcttgcgtacctcttggacccgtcaaacacgacgcccgaaggcgtagcccgtcgttacggcggcgagtggaccgaagatgcagcgaaacgcgcgttattggccgaacgtttgcacgccaatttattaggacgtttgcaaggcgaggaacgtctcctctggctttacgaagaagtggagaaaccattgagtcgcgtgctcgcgcatatggaagctaccggtgtcaaattagacgtggcgtatttggagaatctcagccttgaagttgctgcccacatgcgccgcttggaggaagaagtattccgtttagcaggccgttcctttcgccttaactctcgcgatcagttagaacgtgtgttgttcgatgaacttggtctccctcctatcggcaagacagagaagaccggtaaacgtagcacttcaggggcggttttagaagctcttcgcgaagtccatcccattgtggacaagatcttgcagtaccgcgaactcgcgaaattgaaaggcacctatattgaccgtcttccggcattagtccacccgaaaacgggacgcctccatacccgcttcaaccaaacagccacggcgaccggtcgtttgtcctcctctgatccaaaccttcagaatattccagtacgtaccccattgggccagaagatccgccgtgcgtttgtagctgaggagggttggcgtttagtggccctcgattatcgtcaaattgaattacgtgtccttgcccatctttctggcgatgagaacctcatccgcgtgtttcaggaaggcaaagacattcacactcaaacggcaagctggatgtttggattatcagctgaagcgatcgatcctttgatgcgtcgtgcagcgaagaccatcaatttcggtgttctctacggtatgagtgcctttcgtttgtcgcaggaattaggcattccctatgaagaagctcaggcgttcattcagaaatactttcaaagctatcccaaagttaaagcatggatcgagaagactctccgtgaaggccgcacacgtggttacgtagagaccttatttggacgtcgccgctatgttcccgatttaaacgctcgcgtgaaaggcaagcgtgaagccgccgaacgcatggcgttcaacatgcctgtacagggcacggcagctgacctcatgaaacttgcaatggtgcgcctttttccacaattgcgtgaagttggtgcccgcatgctcttgcaggtccacgatgaactcttgttagaagcgccaaaagagcgtgcggaagaggtggcagccctcgcgaaagaagttatggaaggcgtgtggcccttagcggtgcctcttgaagtcgaagttggtattggcgaggattggctggctgccaaagga

SEQ ID NO: 4356 - protein, 841 aa, synthetic construct
  REGION 1..841: note = Variant of DNA polymerase I from Thermus sp. strain 2.9
MHHHHHHGGSGVLPVFEPKGRVLLVDGHHLAYRNFFALKGLTTSLGEPVQGVYGFAKSLLKALKEDGDVVIVVFDAKAPSFRHEAYEAYKAGRAPTPEDFPRQLALMKELVDLLGLERLEVPGFEADDVLATLAKKAEREGYEVQILTADRDLFQLLSPRISVLHPEGHRITPEWLWEKYGLRPEQWVDFRALAGDPSDNIPGVKGIGEKTALKLLKEWGSLENLLKNLDQVKPESVREKILAHLEDLKLSRELSRVRTDLPLEVDFGRRREPDWEGLKAFLERLEFGSLLHEFGLLESPLLAEEAPWPPPEGAFLGYRLSRPEPMWAELLALAASAQGRVYRAEDPHGALRGLFEVRGLLAKDLAVVALREGLDLPPTDDPMLLAYLLDPSNTTPEGVARRYGGEWTEDAAKRALLAERLHANLLGRLQGEERLLWLYEEVEKPLSRVLAHMEATGVKLDVAYLENLSLEVAAHMRRLEEEVFRLAGRSFRLNSRDQLERVLFDELGLPPIGKTEKTGKRSTSGAVLEALREVHPIVDKILQYRELAKLKGTYIDRLPALVHPKTGRLHTRFNQTATATGRLSSSDPNLQNIPVRTPLGQKIRRAFVAEEGWRLVALDYRQIELRVLAHLSGDENLIRVFQEGKDIHTQTASWMFGLSAEAIDPLMRRAAKTINFGVLYGMSAFRLSQELGIPYEEAQAFIQKYFQSYPKVKAWIEKTLREGRTRGYVETLFGRRRYVPDLNARVKGKREAAERMAFNMPVQGTAADLMKLAMVRLFPQLREVGARMLLQVHDELLLEAPKERAEEVAALAKEVMEGVWPLAVPLEVEVGIGEDWLAAKG

SEQ ID NO: 4357 - DNA, 2523 bp, synthetic construct
  misc_feature 1..2523: note = Variant of DNA polymerase I from Thermus sp. strain 2.9
  source 1..2523: mol_type = other DNA
atgcaccatcatcatcatcatggcggtagcggcgtgttaccggtgttcgagcctaaaggtcgcgtgcttctggttgatggccatcatctcgcgtatcgtaacttctttgccctgaaaggattaaccaccagcctgggcgagccggtacagggtgtctacggctttgcaaagtcgctcctgaaagctctgaaagaagacggtgatgtggtgattgttgtctttgatgcgaaagcgccaagttttcgccacgaagcgtacgaagcttacaaagccgggcgtgctccaacgccggaagactttcctcgccaattggcgcttatgaaggaattagtggatttgcttggcctcgaacgcttggaagttcccggtttcgaggcagacgacgtattagcgactctcgcaaagaaagccgaacgtgagggctatgaagtccagatcttgacagcagatcgcgatcttttccagcttttatctccgcgcatctcggtgttacacccggaagggcatcgtatcaccccggaatggctctgggagaaatatggtttgcgtcccgaacaatgggtggattttcgcgccttagcaggcgatccgagcgacaatattccgggagttaaaggtatcggcgagaagacggcgctcaagctccttaaagaatgggggtcgttggagaacttgcttaagaatttagatcaggtcaaaccagagtcagtgcgtgagaagattcttgctcacctcgaagacctcaaattaagccgcgaattgtcccgtgtacgcaccgatttgccgctcgaagttgatttcggtcgccgccgcgaacctgactgggagggtcttaaagcgtttttagagcgtcttgaatttggttcgctcttgcatgaattcggccttttagaaagcccgttactggccgaagaagcaccttggccaccgcccgagggcgcgtttttaggttaccgtttgagtcgcccggaaccgatgtgggccgaattactggctcttgcagcgtctgcccagggacgtgtgtatcgcgcggaagaccctcatggtgcgctccgcggcctcttcgaagtccgtggactccttgccaaagacttagctgttgttgcattgcgcgaaggtcttgatttacctccgactgatgatccaatgcttcttgcgtacctcttggacccgtcaaacacgacgcccgaaggcgtagcccgtcgttacggcggcgagtggaccgaagatgcagcgaaacgcgcgttattggccgaacgtttgcacgccaatttattaggacgtttgcaaggcgaggaacgtctcctctggctttacgaagaagtggagaaaccattgagtcgcgtgctcgcgcatatggaagctaccggtgtcaaattagacgtggcgtatttggagaatctcagccttgaagttgctgcccacatgcgccgcttggaggaagaagtattccgtttagcaggccgttcctttcgccttaactctcgcgatcagttagaagctgtgttgttcgatgaacttggtctccctcctatcggcaagacagagaagaccggtaaacgtagcacttcagcggcggttttagaagctcttcgcgaagtccatcccattgtggacaagatcttgcagtaccgcgaactcgcgaaattgaaaggcacctatattgaccgtcttccggcattagtccacccgaaaacgggacgcctccatacccgcttcaaccaaacagccacggcgaccggtcgtttgtcctcctctgatccaaaccttcagaatattccagtacgtaccccattgggccagaagatccgccgtgcgtttgtagctgaggagggttggcgtttagtggccctcgattatcgtcaaattgaattacgtgtccttgcccatctttctggcgatgagaacctcatccgcgtgtttcaggaaggcaaagacattcacactcaaacggcaagctggatgtttggattatcagctgaagcgatcgatcctttgatgcgtcgtgcagcgaagaccatcaatttcggtgttctctacggtatgagtgcctttcgtttgtcgcaggaattaggcattccctatgaagaagctcaggcgttcattcagaaatactttcaaagctatcccaaagttaaagcatggatcgagaagactctccgtgaaggccgcacacgtggttacgtagagaccttatttggacgtcgccgctatgttcccgatttaaacgctcgcgtgaaaggcaagcgtgaagccgccgaacgcatggcgttcaacatgcctgtacagggcacggcagctgacctcatgaaacttgcaatggtgcgcctttttccacaattgcgtgaagttggtgcccgcatgctcttgcaggtccacgatgaactcttgttagaagcgccaaaagagcgtgcggaagaggtggcagccctcgcgaaagaagttatggaaggcgtgtggcccttagcggtgcctcttgaagtcgaagttggtattggcgaggattggctggctgccaaagga

SEQ ID NO: 4358 - protein, 841 aa, synthetic construct
  REGION 1..841: note = Variant of DNA polymerase I from Thermus sp. strain 2.9
MHHHHHHGGSGVLPVFEPKGRVLLVDGHHLAYRNFFALKGLTTSLGEPVQGVYGFAKSLLKALKEDGDVVIVVFDAKAPSFRHEAYEAYKAGRAPTPEDFPRQLALMKELVDLLGLERLEVPGFEADDVLATLAKKAEREGYEVQILTADRDLFQLLSPRISVLHPEGHRITPEWLWEKYGLRPEQWVDFRALAGDPSDNIPGVKGIGEKTALKLLKEWGSLENLLKNLDQVKPESVREKILAHLEDLKLSRELSRVRTDLPLEVDFGRRREPDWEGLKAFLERLEFGSLLHEFGLLESPLLAEEAPWPPPEGAFLGYRLSRPEPMWAELLALAASAQGRVYRAEDPHGALRGLFEVRGLLAKDLAVVALREGLDLPPTDDPMLLAYLLDPSNTTPEGVARRYGGEWTEDAAKRALLAERLHANLLGRLQGEERLLWLYEEVEKPLSRVLAHMEATGVKLDVAYLENLSLEVAAHMRRLEEEVFRLAGRSFRLNSRDQLEAVLFDELGLPPIGKTEKTGKRSTSAAVLEALREVHPIVDKILQYRELAKLKGTYIDRLPALVHPKTGRLHTRFNQTATATGRLSSSDPNLQNIPVRTPLGQKIRRAFVAEEGWRLVALDYRQIELRVLAHLSGDENLIRVFQEGKDIHTQTASWMFGLSAEAIDPLMRRAAKTINFGVLYGMSAFRLSQELGIPYEEAQAFIQKYFQSYPKVKAWIEKTLREGRTRGYVETLFGRRRYVPDLNARVKGKREAAERMAFNMPVQGTAADLMKLAMVRLFPQLREVGARMLLQVHDELLLEAPKERAEEVAALAKEVMEGVWPLAVPLEVEVGIGEDWLAAKG

SEQ ID NO: 4359 - DNA, 2523 bp, synthetic construct
  misc_feature 1..2523: note = Variant of DNA polymerase I from Thermus sp. strain 2.9
  source 1..2523: mol_type = other DNA
atgcaccatcatcatcatcatggcggtagcggcgtgttaccggtgttcgagcctaaaggtcgcgtgcttctggttgatggccatcatctcgcgtatcgtaacttctttgccctgaaaggattaaccaccagcctgggcgagccggtacagggtgtctacggctttgcaaagtcgctcctgaaagctctgaaagaagacggtgatgtggtgattgttgtctttgatgcgaaagcgccaagttttcgccacgaagcgtacgaagcttacaaagccgggcgtgctccaacgccggaagactttcctcgccaattggcgcttatgaaggaattagtggatttgcttggcctcgaacgcttggaagttcccggtttcgaggcagacgacgtattagcgactctcgcaaagaaagccgaacgtgagggctatgaagtccagatcttgacagcagatcgcgatcttttccagcttttatctccgcgcatctcggtgttacacccggaagggcatcgtatcaccccggaatggctctgggagaaatatggtttgcgtcccgaacaatgggtggattttcgcgccttagcaggcgatccgagcgacaatattccgggagttaaaggtatcggcgagaagacggcgctcaagctccttaaagaatgggggtcgttggagaacttgcttaagaatttagatcaggtcaaaccagagtcagtgcgtgagaagattcttgctcacctcgaagacctcaaattaagccgcgaattgtcccgtgtacgcaccgatttgccgctcgaagttgatttcggtcgccgccgcgaacctgactgggagggtcttaaagcgtttttagagcgtcttgaatttggttcgctcttgcatgaattcggccttttagaaagcccgttactggccgaagaagcaccttggccaccgcccgagggcgcgtttttaggttaccgtttgagtcgcccggaaccgatgtgggccgaattactggctcttgcagcgtctgcccagggacgtgtgtatcgcgcggaagaccctcatggtgcgctccgcggcctcttcgaagtccgtggactccttgccaaagacttagctgttgttgcattgcgcgaaggtcttgatttacctccgactgatgatccaatgcttcttgcgtacctcttggacccgtcaaacacgacgcccgaaggcgtagcccgtcgttacggcggcgagtggaccgaagatgcagcgaaacgcgcgttattggccgaacgtttgcacgccaatttattaggacgtttgcaaggcgaggaacgtctcctctggctttacgaagaagtggagaaaccattgagtcgcgtgctcgcgcatatggaagctaccggtgtcaaattagacgtggcgtatttggagaatctcagccttgaagttgctgcccacatgcgccgcttggaggaagaagtattccgtttagcaggccgttcctttcgccttaactctcgcgatcagttagaacgtgtgttgttcgatgaacttggtctccctcctatcggcaagacagagaagaccggtaaacgtagcacttcagcggcggttttagaagctcttcgcgaagtccatcccattgtggacaagatcttgcagtaccgcgaactcgcgaaattgaaaggcacctatattgaccgtcttccggcattagtccacccgaaaacgggacgcctccatacccgcttcaaccaaacagccacggcgaccggtcgtttgtcctcctctgatccaaaccttcagaatattccagtacgtaccccattgggccagaagatccgccgtgcgtttgtagctgaggagggttggcgtttagtggccctcgattatcgtcaaattgaattacgtgtccttgcccatctttctggcgatgagaacctcatccgcgtgtttcaggaaggcaaagacattcacactcaaacggcaagctggatgtttggattatcagctgaagcgatcgatcctttgatgcgtcgtgcagcgaagaccatcaatttcggtgttctctacggtatgagtgcctttcgtttgtcgcaggaattaggcattccctatgaagaagctcaggcgttcattcagaaatactttcaaagctatcccaaagttaaagcatggatcgagaagactctccgtgaaggccgcacacgtggttacgtagagaccttatttggacgtcgccgctatgttcccgatttaaacgctcgcgtgaaaggcaagcgtgaagccgccgaacgcatggcgttcaacatgcctgtacagggcacggcagctgacctcatgaaacttgcaatggtgcgcctttttccacaattgcgtgaagttggtgcccgcatgctcttgcaggtccacgatgaactcttgttagaaatgccaaaagagcgtgcggaagaggtggcagccctcgcgaaagaagttatggaaggcgtgtggcccttagcggtgcctcttgaagtcgaagttggtattggcgaggattggctggctgccaaagga

SEQ ID NO: 4360 - protein, 841 aa, synthetic construct
  REGION 1..841: note = Variant of DNA polymerase I from Thermus sp. strain 2.9
MHHHHHHGGSGVLPVFEPKGRVLLVDGHHLAYRNFFALKGLTTSLGEPVQGVYGFAKSLLKALKEDGDVVIVVFDAKAPSFRHEAYEAYKAGRAPTPEDFPRQLALMKELVDLLGLERLEVPGFEADDVLATLAKKAEREGYEVQILTADRDLFQLLSPRISVLHPEGHRITPEWLWEKYGLRPEQWVDFRALAGDPSDNIPGVKGIGEKTALKLLKEWGSLENLLKNLDQVKPESVREKILAHLEDLKLSRELSRVRTDLPLEVDFGRRREPDWEGLKAFLERLEFGSLLHEFGLLESPLLAEEAPWPPPEGAFLGYRLSRPEPMWAELLALAASAQGRVYRAEDPHGALRGLFEVRGLLAKDLAVVALREGLDLPPTDDPMLLAYLLDPSNTTPEGVARRYGGEWTEDAAKRALLAERLHANLLGRLQGEERLLWLYEEVEKPLSRVLAHMEATGVKLDVAYLENLSLEVAAHMRRLEEEVFRLAGRSFRLNSRDQLERVLFDELGLPPIGKTEKTGKRSTSAAVLEALREVHPIVDKILQYRELAKLKGTYIDRLPALVHPKTGRLHTRFNQTATATGRLSSSDPNLQNIPVRTPLGQKIRRAFVAEEGWRLVALDYRQIELRVLAHLSGDENLIRVFQEGKDIHTQTASWMFGLSAEAIDPLMRRAAKTINFGVLYGMSAFRLSQELGIPYEEAQAFIQKYFQSYPKVKAWIEKTLREGRTRGYVETLFGRRRYVPDLNARVKGKREAAERMAFNMPVQGTAADLMKLAMVRLFPQLREVGARMLLQVHDELLLEMPKERAEEVAALAKEVMEGVWPLAVPLEVEVGIGEDWLAAKG

SEQ ID NO: 4361 - DNA, 2523 bp, synthetic construct
  misc_feature 1..2523: note = Variant of DNA polymerase I from Thermus sp. strain 2.9
  source 1..2523: mol_type = other DNA
atgcaccatcatcatcatcatggcggtagcggcgtgttaccggtgttcgagcataaaggtcgcgtgcttctggttgatggccatcatctcgcgtatcgtaacttctttgccctgaaaggattaaccaccagcctgggcgagccggtacagggtgtctacggctttgcaaagtcgctcctgaaagctctgaaagaagacggtgatgtggtgattgttgtctttgatgcgaaagcgccaagttttcgccacgaagcgtacgaagcttacaaagccgggcgtgctccaacgccggaagactttcctcgccaattggcgcttatgaaggaattagtggatttgcttggcctcgaacgcttggaagttcccggtttcgaggcagacgacgtattagcgactctcgcaaagaaagccgaacgtgagggctatgaagtccagatcttgacagcagatcgcgatcttttccagcttttatctccgcgcatctcggtgttacacccggaagggcatcgtatcaccccggaatggctctgggagaaatatggtttgcgtcccgaacaatgggtggattttcgcgccttagcaggcgatccgagcgacaatattccgggagttaaaggtatcggcgagaagacggcgctcaagctccttaaagaatgggggtcgttggagaacttgcttaagaatttagatcaggtcaaaccagagtcagtgcgtgagaagattcttgctcacctcgaagacctcaaattaagccgcgaattgtcccgtgtacgcaccgatttgccgctcgaagttgatttcggtcgccgccgcgaacctgactgggagggtcttaaagcgtttttagagcgtcttgaatttggttcgctcctgcatgaattcggccttttagaaagcccgttactggccgaagaagcaccttggccaccgcccgagggcgcgtttttaggttaccgtttgagtcgcccggaaccgatgtgggccgaattactggctcttgcagcgtctgcccagggacgtgtgtatcgcgcggaagaccctcatggtgcgctccgcggcctcttcgaagtccgtggactccttgccaaagacttagctgttgttgcattgcgcgaaggtcttgatttacctccgactgatgatccaatgcttcttgcgtacctcttggacccgtcaaacacgacgcccgaaggcgtagcccgtcgttacggcggcgagtggaccgaagatgcagcgaaacgcgcgttattggccgaacgtttgcacgcaaatttattaggacgtttgcaaggcgaggaacgtctcctctggctttacgaagaagtggagaaaccattgagtcgcgtgctcgcgcatatggaagctaccggtgtcaaattagacgtggcgtatttggagaatctcagccttgaagttgctgcccacatgcgccgcttggaggaagaagtattccgtttagcaggccgttcctttcgccttaactctcgcgatcagttagaacgtgtgttgttcgatgaacttggtctccctcctatcggcaagacagagaagaccggtaaacgtagcacttcagcagcggttttagaggctcttcgcgaagtccatcccattgtggacaagatcttgcagtaccgcgaactcgcgaaattgaaaggcacctatattgaccgtcttccggcattagtccacccgaaaacgggacgcctccatacccgcttcaaccaaacagccacggcgaccggtcgtttgtcctcctctgatccaaaccttcagaatattccagtacgtaccccattgggccagaagatccgccgtgcgtttgtagctgaggagggttggcgtttagtggccctcgattatcgtcaaattgaattacgtgtccttgcccatctttctggcgatgagaacctcatccgcgtgtttcaggaaggcaaagacattcacactcaaacggcaagctggatgtttggattaagtgctgaagcgatcgatcctttgatgcgtcgtgcagcgaagaccatcaatttcggtgttctctacggtatgagtgcctttcgtttgtcgcaggaattaggcattccctatgaagaagctcaggcgttcattcagaaatactttcaaagctatcccaaagttaaagcatggatcgagaagactctccgtgaaggccgcacacgtggttacgtagagaccttatttggacgtcgccgctatgttcccgatttaaacgctcgcgtgaaaggcaagcgtgaagccgccgaacgcatggcgttcaacatgcctgtacagggcacggcagctgacctcatgaaacttgcaatggtgcgcctttttccacaattgcgtgaagttggtgcccgcatgctcttgcaggtccacgatgaactcttgttagaagcgccaaaagagcgtgcggaagaggtggcagccctcgcgaaagaagttatggaaggcgtgtggcccttagcggtgcctcttgaagtcgaagttggtattggcgaggattggctggctgccaaagga

SEQ ID NO: 4362 - protein, 841 aa, synthetic construct
  REGION 1..841: note = Variant of DNA polymerase I from Thermus sp. strain 2.9
MHHHHHHGGSGVLPVFEHKGRVLLVDGHHLAYRNFFALKGLTTSLGEPVQGVYGFAKSLLKALKEDGDVVIVVFDAKAPSFRHEAYEAYKAGRAPTPEDFPRQLALMKELVDLLGLERLEVPGFEADDVLATLAKKAEREGYEVQILTADRDLFQLLSPRISVLHPEGHRITPEWLWEKYGLRPEQWVDFRALAGDPSDNIPGVKGIGEKTALKLLKEWGSLENLLKNLDQVKPESVREKILAHLEDLKLSRELSRVRTDLPLEVDFGRRREPDWEGLKAFLERLEFGSLLHEFGLLESPLLAEEAPWPPPEGAFLGYRLSRPEPMWAELLALAASAQGRVYRAEDPHGALRGLFEVRGLLAKDLAVVALREGLDLPPTDDPMLLAYLLDPSNTTPEGVARRYGGEWTEDAAKRALLAERLHANLLGRLQGEERLLWLYEEVEKPLSRVLAHMEATGVKLDVAYLENLSLEVAAHMRRLEEEVFRLAGRSFRLNSRDQLERVLFDELGLPPIGKTEKTGKRSTSAAVLEALREVHPIVDKILQYRELAKLKGTYIDRLPALVHPKTGRLHTRFNQTATATGRLSSSDPNLQNIPVRTPLGQKIRRAFVAEEGWRLVALDYRQIELRVLAHLSGDENLIRVFQEGKDIHTQTASWMFGLSAEAIDPLMRRAAKTINFGVLYGMSAFRLSQELGIPYEEAQAFIQKYFQSYPKVKAWIEKTLREGRTRGYVETLFGRRRYVPDLNARVKGKREAAERMAFNMPVQGTAADLMKLAMVRLFPQLREVGARMLLQVHDELLLEAPKERAEEVAALAKEVMEGVWPLAVPLEVEVGIGEDWLAAKG

SEQ ID NO: 4363 - DNA, 2523 bp, synthetic construct
  misc_feature 1..2523: note = Variant of DNA polymerase I from Thermus sp. strain 2.9
  source 1..2523: mol_type = other DNA
atgcaccatcatcatcatcatggcggtagcggcgtgttaccggtgttcgagcctaaaggtcgcgtgcttctggttgatggccatcatctcgcgtatcgtaacttctttgccctgaaaggattaaccaccagcctgggcgagccggtacagggtgtctacggctttgcaaagtcgctcctgaaagctctgaaagaagacggtgatgtggtgattgttgtctttgatgcgaaagcgccaagttttcgccacgaagcgtacgaagcttacaaagccgggcgtgctccaacgccggaagactttcctcgccaattggcgcttatgaaggaattagtggatttgcttggcctcgaacgcttggaagttcccggtttcgaggcagacgacgtattagcgactctcgcaaagaaagccgaacgtgagggctatgaagtccagatcttgacagcagatcgcgatcttttccagcttttatctccgcgcatctcggtgttacacccggaagggcatcgtatcaccccggaatggctctgggagaaatatggtttgcgtcccgaacaatgggtggattttcgcgccttagcaggcgatccgagcgacaatattccgggagttaaaggtatcggcgagaagacggcgctcaagctccttaaagaatgggggtcgttggagaacttgcttaagaatttagatcaggtcaaaccagagtcagtgcgtgagaagattcttgctcacctcgaagacctcaaattaagccgcgaattgtcccgtgtacgcaccgatttgccgctcgaagttgatttcggtcgccgccgcgaacctgactgggagggtcttaaagcgtttttagagcgtcttgaatttggttcgctcttgcatgaattcggccttttagaaagcccgttaagtgccgaagaagcaccttggccaccgcccgagggcgcgtttttaggttaccgtttgagtcgcccggaaccgatgtgggccgaattactggctcttgcagcgtctgcccagggacgtgtgtatcgcgcggaagaccctcatggtgcgctccgcggcctcttcgaagtccgtggactccttgccaaagacttagctgttgttgcattgcgcgaaggtcttgatttacctccgactgatgatccaatgcttcttgcgtacctcttggacccgtcaaacacgacgcccgaaggcgtagcccgtcgttacggcggcgagtggaccgaagatgcagcgaaacgcgcgttattggccgaacgtttgcacgccaatttattaggacgtttgcaaggcgaggaacgtctcctctggctttacgaagaagtggagaaaccattgagtcgcgtgctcgcgcatatggaagctaccggtgtcaaattagacgtggcgtatttggagaatctcagccttgaagttgctgcccacatgcgccgcttggaggaagaagtattccgtttagcaggccgttcctttcgccttaactctcgcgatcagttagaacgtgtgttgttcgatgaacttggtctccctcctatcggcaagacagagaagaccggtaaacgtagcacttcagcggcggttttagaagctcttcgcgaagtccatcccattgtggacaagatcttgcagtaccgcgaactcgcgaaattgaaaggcacctatattgaccgtcttccggcattagtccacccgaaaacgggacgcctccatacccgcttcaaccaaacagccacggcgaccggtcgtttgtcctcctctgatccaaaccttcagaatattccagtacgtaccccattgggccagaagatccgccgtgcgtttgtagctgaggagggttggcgtttagtggccctcgattatcgtcaaattgaattacgtgtccttgcccatctttctggcgatgagaacctcatccgcgtgtttcaggaaggcaaagacattcacactcaaacggcaagctggatgtttggattatcagctgaagcgatcgatcctttgatgcgtcgtgcagcgaagaccatcaatttcggtgttctctacggtatgagtgcctttcgtttgtcgcaggaattaggcattccctatgaagaagctcaggcgttcattcagaaatactttcaaagctatcccaaagttaaagcatggatcgagaagactctccgtgaaggccgcacacgtggttacgtagagaccttatttggacgtcgccgctatgttcccgatttaaacgctcgcgtgaaaggcaagcgtgaagccgccgaacgcatggcgttcaacatgcctgtacagggcacggcagctgacctcatgaaacttgcaatggtgcgcctttttccacaattgcgtgaagttggtgcccgcatgctcttgcaggtccacgatgaactcttgttagaagcgccaaaagagcgtgcggaagaggtggcagccctcgcgaaagaagttatggaaggcgtgtggcccttagcggtgcctcttgaagtcgaagttggtattggcgaggattggctggctgccaaagga

SEQ ID NO: 4364 - protein, 841 aa, synthetic construct
  REGION 1..841: note = Variant of DNA polymerase I from Thermus sp. strain 2.9
MHHHHHHGGSGVLPVFEPKGRVLLVDGHHLAYRNFFALKGLTTSLGEPVQGVYGFAKSLLKALKEDGDVVIVVFDAKAPSFRHEAYEAYKAGRAPTPEDFPRQLALMKELVDLLGLERLEVPGFEADDVLATLAKKAEREGYEVQILTADRDLFQLLSPRISVLHPEGHRITPEWLWEKYGLRPEQWVDFRALAGDPSDNIPGVKGIGEKTALKLLKEWGSLENLLKNLDQVKPESVREKILAHLEDLKLSRELSRVRTDLPLEVDFGRRREPDWEGLKAFLERLEFGSLLHEFGLLESPLSAEEAPWPPPEGAFLGYRLSRPEPMWAELLALAASAQGRVYRAEDPHGALRGLFEVRGLLAKDLAVVALREGLDLPPTDDPMLLAYLLDPSNTTPEGVARRYGGEWTEDAAKRALLAERLHANLLGRLQGEERLLWLYEEVEKPLSRVLAHMEATGVKLDVAYLENLSLEVAAHMRRLEEEVFRLAGRSFRLNSRDQLERVLFDELGLPPIGKTEKTGKRSTSAAVLEALREVHPIVDKILQYRELAKLKGTYIDRLPALVHPKTGRLHTRFNQTATATGRLSSSDPNLQNIPVRTPLGQKIRRAFVAEEGWRLVALDYRQIELRVLAHLSGDENLIRVFQEGKDIHTQTASWMFGLSAEAIDPLMRRAAKTINFGVLYGMSAFRLSQELGIPYEEAQAFIQKYFQSYPKVKAWIEKTLREGRTRGYVETLFGRRRYVPDLNARVKGKREAAERMAFNMPVQGTAADLMKLAMVRLFPQLREVGARMLLQVHDELLLEAPKERAEEVAALAKEVMEGVWPLAVPLEVEVGIGEDWLAAKG

SEQ ID NO: 4365 - DNA, 2523 bp, synthetic construct
  misc_feature 1..2523: note = Variant of DNA polymerase I from Thermus sp. strain 2.9
  source 1..2523: mol_type = other DNA
atgcaccatcatcatcatcatggcggtagcggcgtgttaccggtgttcgagcctaaaggtcgcgtgcttctggttgatggccatcatctcgcgtatcgtaacttctttgccctgaaaggattaaccaccagcctgggcgagccggtacagggtgtctacggctttgcaaagtcgctcctgaaagctctgaaagaagacggtgatgtggtgattgttgtctttgatgcgaaagcgccaagttttcgccacgaagcgtacgaagcttacaaagccgggcgtgctccaacgccggaagactttcctcgccaattggcgcttatgaaggaattagtggatttgcttggcctcgaacgcttggaagttcccggtttcgaggcagacgacgtattagcgactctcgcaaagaaagccgaacgtgagggctatgaagtccagatcttgacagcagatcgcgatcttttccagcttttatctccgcgcatctcggtgttacacccggaagggcatcgtatcaccccggaatggctctgggagaaatatggtttgcgtcccgaacaatgggtggattttcgcgccttagcaggcgatccgagcgacaatattccgggagttaaaggtatcggcgagaagacggcgctcaagctccttaaagaatgggggtcgttggagaacttgcttaagaatttagatcaggtcaaaccagagtcagtgcgtgagaagattcttgctcacctcgaagacctcaaattaagccgcgaattgtcccgtgtacgcaccgatttgccgctcgaagttgatttcggtcgccgccgcgaacctgactgggagggtcttaaagcgtttttagagcgtcttgaatttggttcgctcttgcatgaattcggccttttagaaagcccgttactggccgaagaagcaccttggccaccgcccgagggcgcgtttttaggttaccgtttgagtcgcccggaaccgatgtgggccgaattactggctcttgcagcgtctgcccagggacgtgtgtatcgcgcggaagaccctcatggtgcgctccgcggcctcttcgaagtccgtggactccttgccaaagacttagctgttgttgcattgcgcgaaggtcttgatttacctccgactgatgatccaatgcttcttgcgtacctcttggacccgtcaaacacgacgcccgaaggcgtagcccgtcgttacggcggcgagtggaccgaagatgcagcgaaacgcgcgttattggccgaacgtttgcacgccaatttattaggacgtttgcaaggcgaggaacgtctcctctggctttacgaagaagtggagaaaccattgagtcgcgtgctcgcgcatatggaagctaccggtgtcaaattagacgtggcgtatttggagaatctcagccttgaagttgctgcccacatgcgccgcttggaggaagaagtattccgtttagcaggccgttcctttcgccttaactctcgcgatcagttagaacgtgtgttgttcgatgaacttggtctccctcctatcggcaagacagagaagaccggtaaacgtagcacttcagcggcggttttagaagctcttcgcgaagtccatcccattgtggacaagatcttgcagtaccgcgaactcgcgaaattgaaaggcacctatattgaccgtcttccggcattagtccacccgaaaacgggacgcctccatacccgcttcaaccaaacagccacggcgaccggtcgtttgtcctcctctgatccaaaccttcagaatattccagtacgtaccccattgggccagaagatccgccgtgcgtttgtagctgaggagggttggcgtttagtggccctcgattatcgtcaaattgaattacgtgtccttgcccatctttctggcgatgagaacctcatccgcgtgtttcaggaaggcaaagacattcacactcaaacggcaagctggatgtttggattatcagctgaagcgatcgatcctttgatgcgtcgtgcagcgaagaccatcaatttcggtgttctctacggtatgagtgcctttcgtttgtcgcaggaattaggcattccctatgaagaagctcaggcgttcattcagaaatactttcaaagctatcccaaagttaaagcatggatcgagaagactctccgtgaaggccgcacacgtggttacgtagagaccttatttggacgtcgccgctatgttcccgatttaaacgctcgcgtgaaaggcaagcgtgaagccgccgaacgcatggcgttcaacatgcctgtacagggcacggcagctgacctcatgaaacttgcaatggtgcgcctttttccacaattgcgtgaagttggtgcccgcatgctcttgcaggtccacgatgaactcttgttagaagcgccaaaagagcgtgcggaagaggtggcagccctcgcgaaagaagttatggaaggcctgtggcccttagcggtgcctcttgaagtcgaagttggtattggcgaggattggctggctgccaaagga

SEQ ID NO: 4366 - protein, 841 aa, synthetic construct
  REGION 1..841: note = Variant of DNA polymerase I from Thermus sp. strain 2.9
MHHHHHHGGSGVLPVFEPKGRVLLVDGHHLAYRNFFALKGLTTSLGEPVQGVYGFAKSLLKALKEDGDVVIVVFDAKAPSFRHEAYEAYKAGRAPTPEDFPRQLALMKELVDLLGLERLEVPGFEADDVLATLAKKAEREGYEVQILTADRDLFQLLSPRISVLHPEGHRITPEWLWEKYGLRPEQWVDFRALAGDPSDNIPGVKGIGEKTALKLLKEWGSLENLLKNLDQVKPESVREKILAHLEDLKLSRELSRVRTDLPLEVDFGRRREPDWEGLKAFLERLEFGSLLHEFGLLESPLLAEEAPWPPPEGAFLGYRLSRPEPMWAELLALAASAQGRVYRAEDPHGALRGLFEVRGLLAKDLAVVALREGLDLPPTDDPMLLAYLLDPSNTTPEGVARRYGGEWTEDAAKRALLAERLHANLLGRLQGEERLLWLYEEVEKPLSRVLAHMEATGVKLDVAYLENLSLEVAAHMRRLEEEVFRLAGRSFRLNSRDQLERVLFDELGLPPIGKTEKTGKRSTSAAVLEALREVHPIVDKILQYRELAKLKGTYIDRLPALVHPKTGRLHTRFNQTATATGRLSSSDPNLQNIPVRTPLGQKIRRAFVAEEGWRLVALDYRQIELRVLAHLSGDENLIRVFQEGKDIHTQTASWMFGLSAEAIDPLMRRAAKTINFGVLYGMSAFRLSQELGIPYEEAQAFIQKYFQSYPKVKAWIEKTLREGRTRGYVETLFGRRRYVPDLNARVKGKREAAERMAFNMPVQGTAADLMKLAMVRLFPQLREVGARMLLQVHDELLLEAPKERAEEVAALAKEVMEGLWPLAVPLEVEVGIGEDWLAAKG

SEQ ID NO: 4367 - DNA, 2523 bp, synthetic construct
  misc_feature 1..2523: note = Variant of DNA polymerase I from Thermus sp. strain 2.9
  source 1..2523: mol_type = other DNA
atgcaccatcatcatcatcatggcggtagcggcgtgttaccggtgttcgagcctaaaggtcgcgtgcttctggttgatggccatcatctcgcgtatcgtaacttctttgccctgaaaggattaaccaccagcctgggcgagccggtacagggtgtctacggctttgcaaagtcgctcctgaaagctctgaaagaagacggtgatgtggtgattgttgtctttgatgcgaaagcgccaagttttcgccacgaagcgtacgaagcttacaaagccgggcgtgctccaacgccggaagactttcctcgccaattggcgcttatgaaggaattagtggatttgcttggcctcgaacgcttggaagttcccggtttcgaggcagacgacgtattagcgactctcgcaaagaaagccgaacgtgagggctatgaagtccagatcttgacagcagatcgcgatcttttccagcttttatctccgcgcatctcggtgttacacccggaagggcatcgtatcaccccggaatggctctgggagaaatatggtttgcgtcccgaacaatgggtggattttcgcgccttagcaggcgatccgagcgacaatattccgggagttaaaggtatcggcgagaagacggcgctcaagctccttaaagaatgggggtcgttggagaacttgcttaagaatttagatcaggtcaaaccagagtcagtgcgtgagaagattcttgctcacctcgaagacctcaaattaagccgcgaattgtcccgtgtacgcaccgatttgccgctcgaagttgatttcggtcgccgccgcgaacctgactgggagggtcttaaagcgtttttagagcgtcttgaatttggttcgctcttgcatgaattcggccttttagaaagcccgttactggccgaagaagcaccttggccaccgcccgagggcgcgtttttaggttaccgtttgagtcgcccggaaccgatgtgggccgaattactggctcttgcagcgtctgcccagggacgtgtgtatcgcgcggaagaccctcatggtgcgctccgcggcctcttcgaagtccgtggactccttgccaaagacttagctgttgttgcattgcgcgaaggtcttgatttacctccgactgatgatccaatgcttcttgcgtacctcttggacccgtcaaacacgacgcccgaaggcgtagcccgtcgttacggcggcgagtggaccgaagatgcagcgaaacgcgcgttattggccgaacgtttgcacgccaatttattaggacgtttgcaaggcgaggaacgtctcctctggctttacgaagaagtggagaaaccattgagtcgcgtgctcgcgcatatggaagctaccggtgtcaaattagacgtggcgtatttggagaatctcagccttgaagttgctgcccacatgcgccgcttggaggaagaagtattccgtttagcaggccgttcctttcgccttaactctcgcgatcagttagaacgtgtgttgttcgatgaacttggtctccctcctatcggcaagacagagaagaccggtaaacgtagcacttcagcggcggttttagaagctcttcgcgaagtccatcccattgtggacaagatcttgcagtaccgcgaactcgcgaaattgaaaggcacctatattgaccgtcttccggcattagtccacccgaaaacgggacgcctccatacccgcttcaaccaaacagccacggcgaccggtcgtttgtcctcctctgatccaaaccttcagaatattccagtacgtaccccattgggccagaagatccgccgtgcgtttgtagctgaggagggttggcgtttagtggccctcgattatcgtcaaattgaattacgtgtccttgcccatctttctggcgatgagaacctcatccgcgtgtttcaggaaggcaaagacattcacactcaaacggcaagctggatgtttggattatcagctgaagcgatcgatcctttgatgcgtcgtgcagcgaagaccatcaatttcggtgttctctacggtatgagtgcctttcgtttgtcgcaggaattaggcattccctatgaagaagctcaggcgttcattcagaaatactttcaaagctatcccaaagttaaagcatggatcgagaagactctccgtgaaggccgcacacgtggttacgtagagaccgagtttggacgtcgccgctatgttcccgatttaaacgctcgcgtgaaaggcaagcgtgaagccgccgaacgcatggcgttcaacatgcctgtacagggcacggcagctgacctcatgaaacttgcaatggtgcgcctttttccacaattgcgtgaagttggtgcccgcatgctcttgcaggtccacgatgaactcttgttagaagcgccaaaagagcgtgcggaagaggtggcagccctcgcgaaagaagttatggaaggcgtgtggcccttagcggtgcctcttgaagtcgaagttggtattggcgaggattggctggctgccaaagga

SEQ ID NO: 4368 - protein, 841 aa, synthetic construct
  REGION 1..841: note = Variant of DNA polymerase I from Thermus sp. strain 2.9
MHHHHHHGGSGVLPVFEPKGRVLLVDGHHLAYRNFFALKGLTTSLGEPVQGVYGFAKSLLKALKEDGDVVIVVFDAKAPSFRHEAYEAYKAGRAPTPEDFPRQLALMKELVDLLGLERLEVPGFEADDVLATLAKKAEREGYEVQILTADRDLFQLLSPRISVLHPEGHRITPEWLWEKYGLRPEQWVDFRALAGDPSDNIPGVKGIGEKTALKLLKEWGSLENLLKNLDQVKPESVREKILAHLEDLKLSRELSRVRTDLPLEVDFGRRREPDWEGLKAFLERLEFGSLLHEFGLLESPLLAEEAPWPPPEGAFLGYRLSRPEPMWAELLALAASAQGRVYRAEDPHGALRGLFEVRGLLAKDLAVVALREGLDLPPTDDPMLLAYLLDPSNTTPEGVARRYGGEWTEDAAKRALLAERLHANLLGRLQGEERLLWLYEEVEKPLSRVLAHMEATGVKLDVAYLENLSLEVAAHMRRLEEEVFRLAGRSFRLNSRDQLERVLFDELGLPPIGKTEKTGKRSTSAAVLEALREVHPIVDKILQYRELAKLKGTYIDRLPALVHPKTGRLHTRFNQTATATGRLSSSDPNLQNIPVRTPLGQKIRRAFVAEEGWRLVALDYRQIELRVLAHLSGDENLIRVFQEGKDIHTQTASWMFGLSAEAIDPLMRRAAKTINFGVLYGMSAFRLSQELGIPYEEAQAFIQKYFQSYPKVKAWIEKTLREGRTRGYVETEFGRRRYVPDLNARVKGKREAAERMAFNMPVQGTAADLMKLAMVRLFPQLREVGARMLLQVHDELLLEAPKERAEEVAALAKEVMEGVWPLAVPLEVEVGIGEDWLAAKG

SEQ ID NO: 4369 - DNA, 2523 bp, synthetic construct
  misc_feature 1..2523: note = Variant of DNA polymerase I from Thermus sp. strain 2.9
  source 1..2523: mol_type = other DNA
atgcaccatcatcatcatcatggcggtagcggcgtgttaccggtgttcgagcctaaaggtcgcgtgcttctggttgatggccatcatctcgcgtatcgtaacttctttgccctgaaaggattaaccaccagcctgggcgagccggtacagggtgtctacggctttgcaaagtcgctcctgaaagctctgaaagaagacggtgatgtggtgattgttgtctttgatgcgaaagcgccaagttttcgccacgaagcgtacgaagcttacaaagccgggcgtgctccaacgccggaagactttcctcgccaattggcgcttatgaaggaattagtggatttgcttggcctcgaacgcttggaagttcccggtttcgaggcagacgacgtattagcgactctcgcaaagaaagccgaacgtgagggctatgaagtccagatcttgacagcagatcgcgatcttttccagcttttatctccgcgcatctcggtgttacacccggaagggcatcgtatcaccccggaatggctctgggagaaatatggtttgcgtcccgaacaatgggtggattttcgcgccttagcaggcgatccgagcgacaatattccgggagttaaaggtatcggcgagaagacggcgctcaagctccttaaagaatgggggtcgttggagaacttgcttaagaatttagatcaggtcaaaccagagtcagtgcgtgagaagattcttgctcacctcgaagacctcaaattaagccgcgaattgtcccgtgtacgcaccgatttgccgctcgaagttgatttcggtcgccgccgcgaacctgactgggagggtcttaaagcgtttttagagcgtcttgaatttggttcgctcttgcatgaattcggccttttagaaagcccgttactggccgaagaagcaccttggccaccgcccgagggcgcgtttttaggttaccgtttgagtcgcccggaaccgatgtgggccgaattactggctcttgcagcgtctgcccagggacgtgtgtatcgcgcggaagaccctcatggtgcgctccgcggcctcttcgaagtccgtggactccttgccaaagacttagctgttgttgcattgcgcgaaggtcttgatttacctccgactgatgatccaatgcttcttgcgtacctcttggacccgtcaaacacgacgcccgaaggcgtagcccgtcgttacggcggcgagtggaccgaagatgcagcgaaacgcgcgttattggccgaacgtttgcacgccaatttattaggacgtttgcaaggcgaggaacgtctcctctggctttacgaagaagtggagaaaccattgagtcgcgtgctcgcgcatatggaagctaccggtgtcaaattagacgtggcgtatttggagaatctcagccttgaagttgctgcccacatgcgccgcttggaggaagaagtattccgtttagcaggccgttcctttcgccttaactctcgcgatcagttagaacgtgtgttgttcgatgaacttggtctccctcctatcggcaagacagagaagaccggtaaacgtagcacttcagcggcggttttagaagctcttcgcgaagtccatcccattgtggacaagatcttgcagtaccgcgaactcgcgaaattgaaaggcacctatattgaccgtcttccggcattagtccacccgaaaacgggacgcctccatacccgcttcaaccaaacagccacggcgaccggtcgtttgtcctcctctgatccaaaccttcagaatattccagtacgtaccccattgggccagaagatccgccgtgcgtttgtagctgaggagggttggcgtttagtggccctcgattatcgtcaaattgaattacgtgtccttgcccatctttctggcgatgagaacctcatccgcgtgtttcaggaaggcaaagacattcacactcaaacggcaagctggatgtttggattatcagctgaagcgatcgatcctttgatgcgtcgtgcagcgaagaccatcaatttcggtgttctctacggtatgagtgcctttcgtttgtcgcaggaattaggcattccctatgaagaagctcaggcgttcattcagaaatactttcaaagctatcccaaagttaaagcatggatcgagaagactctccgtgaaggccgcacacgtggttacgtagagaccttatttggacgtcgccgctatgttcccgatttaaacgctcgcgtgaaaggcaagcgtgaagccgccgaacgcatggcgttcaacatgcctgtacagggcacggcagctgacctcatgaaacttgcaatggtgcgcctttttccacaattgcgtgaagttggtgcccgcatgctcttgcaggtccacgatgaactcttgttagaagcgccaaaatctcgtgcggaagaggtggcagccctcgcgaaagaagttatggaaggcgtgtggcccttagcggtgcctcttgaagtcgaagttggtattggcgaggattggctggctgccaaagga

SEQ ID NO: 4370 - protein, 841 aa, synthetic construct
  REGION 1..841: note = Variant of DNA polymerase I from Thermus sp. strain 2.9
MHHHHHHGGSGVLPVFEPKGRVLLVDGHHLAYRNFFALKGLTTSLGEPVQGVYGFAKSLLKALKEDGDVVIVVFDAKAPSFRHEAYEAYKAGRAPTPEDFPRQLALMKELVDLLGLERLEVPGFEADDVLATLAKKAEREGYEVQILTADRDLFQLLSPRISVLHPEGHRITPEWLWEKYGLRPEQWVDFRALAGDPSDNIPGVKGIGEKTALKLLKEWGSLENLLKNLDQVKPESVREKILAHLEDLKLSRELSRVRTDLPLEVDFGRRREPDWEGLKAFLERLEFGSLLHEFGLLESPLLAEEAPWPPPEGAFLGYRLSRPEPMWAELLALAASAQGRVYRAEDPHGALRGLFEVRGLLAKDLAVVALREGLDLPPTDDPMLLAYLLDPSNTTPEGVARRYGGEWTEDAAKRALLAERLHANLLGRLQGEERLLWLYEEVEKPLSRVLAHMEATGVKLDVAYLENLSLEVAAHMRRLEEEVFRLAGRSFRLNSRDQLERVLFDELGLPPIGKTEKTGKRSTSAAVLEALREVHPIVDKILQYRELAKLKGTYIDRLPALVHPKTGRLHTRFNQTATATGRLSSSDPNLQNIPVRTPLGQKIRRAFVAEEGWRLVALDYRQIELRVLAHLSGDENLIRVFQEGKDIHTQTASWMFGLSAEAIDPLMRRAAKTINFGVLYGMSAFRLSQELGIPYEEAQAFIQKYFQSYPKVKAWIEKTLREGRTRGYVETLFGRRRYVPDLNARVKGKREAAERMAFNMPVQGTAADLMKLAMVRLFPQLREVGARMLLQVHDELLLEAPKSRAEEVAALAKEVMEGVWPLAVPLEVEVGIGEDWLAAKG

SEQ ID NO: 4371 - DNA, 2523 bp, synthetic construct
  misc_feature 1..2523: note = Variant of DNA polymerase I from Thermus sp. strain 2.9
  source 1..2523: mol_type = other DNA
atgcaccatcatcatcatcatggcggtagcggcgtgttaccggtgttcgagcctaaaggtcgcgtgcttctggttgatggccatcatctcgcgtatcgtaacttctttgccctgaaaggattaaccaccagcctgggcgagccggtacagggtgtctacggctttgcaaagtcgctcctgaaagctctgaaagaagacggtgatgtggtgattgttgtctttgatgcgaaagcgccaagttttcgccacgaagcgtacgaagcttacaaagccgggcgtgctccaacgccggaagactttcctcgccaattggcgcttatgaaggaattagtggatttgcttggcctcgaacgcttggaagttcccggtttcgaggcagacgacgtattagcgactctcgcaaagaaagccgaacgtgagggctatgaagtccagatcttgacagcagatcgcgatcttttccagcttttatctccgcgcatctcggtgttacacccggaagggcatcgtatcaccccggaatggctctgggagaaatatggtttgcgtcccgaacaatgggtggattttcgcgccttagcaggcgatccgagcgacaatattccgggagttaaaggtatcggcgagaagacggcgctcaagctccttaaagaatgggggtcgttggagaacttgcttaagaatttagatcaggtcaaaccagagtcagtgcgtgagaagattcttgctcacctcgaagacctcaaattaagccgcgaattgtcccgtgtacgcaccgatttgccgctcgaagttgatttcggtcgccgccgcgaacctgactgggagggtcttaaagcgtttttagagcgtcttgaatttggttcgctcttgcatgaattcggccttttagaaagcccgttactggccgaagaagcaccttggccaccgcccgagggcgcgtttttaggttaccgtttgagtcgcccggaaccgatgtgggccgaaatgctggctcttgcagcgtctgcccagggacgtgtgtatcgcgcggaagaccctcatggtgcgctccgcggcctcttcgaagtccgtggactccttgccaaagacttagctgttgttgcattgcgcgaaggtcttgatttacctccgactgatgatccaatgcttcttgcgtacctcttggacccgtcaaacacgacgcccgaaggcgtagcccgtcgttacggcggcgagtggaccgaagatgcagcgaaacgcgcgttattggccgaacgtttgcacgccaatttattaggacgtttgcaaggcgaggaacgtctcctctggctttacgaagaagtggagaaaccattgagtcgcgtgctcgcgcatatggaagctaccggtgtcaaattagacgtggcgtatttggagaatctcagccttgaagttgctgcccacatgcgccgcttggaggaagaagtattccgtttagcaggccgttcctttcgccttaactctcgcgatcagttagaacgtgtgttgttcgatgaacttggtctccctcctatcggcaagacagagaagaccggtaaacgtagcacttcagcggcggttttagaagctcttcgcgaagtccatcccattgtggacaagatcttgcagtaccgcgaactcgcgaaattgaaaggcacctatattgaccgtcttccggcattagtccacccgaaaacgggacgcctccatacccgcttcaaccaaacagccacggcgaccggtcgtttgtcctcctctgatccaaaccttcagaatattccagtacgtaccccattgggccagaagatccgccgtgcgtttgtagctgaggagggttggcgtttagtggccctcgattatcgtcaaattgaattacgtgtccttgcccatctttctggcgatgagaacctcatccgcgtgtttcaggaaggcaaagacattcacactcaaacggcaagctggatgtttggattatcagctgaagcgatcgatcctttgatgcgtcgtgcagcgaagaccatcaatttcggtgttctctacggtatgagtgcctttcgtttgtcgcaggaattaggcattccctatgaagaagctcaggcgttcattcagaaatactttcaaagctatcccaaagttaaagcatggatcgagaagactctccgtgaaggccgcacacgtggttacgtagagaccttatttggacgtcgccgctatgttcccgatttaaacgctcgcgtgaaaggcaagcgtgaagccgccgaacgcatggcgttcaacatgcctgtacagggcacggcagctgacctcatgaaacttgcaatggtgcgcctttttccacaattgcgtgaagttggtgcccgcatgctcttgcaggtccacgatgaactcttgttagaagcgccaaaagagcgtgcggaagaggtggcagccctcgcgaaagaagttatggaaggcgtgtggcccttagcggtgcctcttgaagtcgaagttggtattggcgaggattggctggctgccaaagga

SEQ ID NO: 4372 - protein, 841 aa, synthetic construct
  REGION 1..841: note = Variant of DNA polymerase I from Thermus sp. strain 2.9
MHHHHHHGGSGVLPVFEPKGRVLLVDGHHLAYRNFFALKGLTTSLGEPVQGVYGFAKSLLKALKEDGDVVIVVFDAKAPSFRHEAYEAYKAGRAPTPEDFPRQLALMKELVDLLGLERLEVPGFEADDVLATLAKKAEREGYEVQILTADRDLFQLLSPRISVLHPEGHRITPEWLWEKYGLRPEQWVDFRALAGDPSDNIPGVKGIGEKTALKLLKEWGSLENLLKNLDQVKPESVREKILAHLEDLKLSRELSRVRTDLPLEVDFGRRREPDWEGLKAFLERLEFGSLLHEFGLLESPLLAEEAPWPPPEGAFLGYRLSRPEPMWAEMLALAASAQGRVYRAEDPHGALRGLFEVRGLLAKDLAVVALREGLDLPPTDDPMLLAYLLDPSNTTPEGVARRYGGEWTEDAAKRALLAERLHANLLGRLQGEERLLWLYEEVEKPLSRVLAHMEATGVKLDVAYLENLSLEVAAHMRRLEEEVFRLAGRSFRLNSRDQLERVLFDELGLPPIGKTEKTGKRSTSAAVLEALREVHPIVDKILQYRELAKLKGTYIDRLPALVHPKTGRLHTRFNQTATATGRLSSSDPNLQNIPVRTPLGQKIRRAFVAEEGWRLVALDYRQIELRVLAHLSGDENLIRVFQEGKDIHTQTASWMFGLSAEAIDPLMRRAAKTINFGVLYGMSAFRLSQELGIPYEEAQAFIQKYFQSYPKVKAWIEKTLREGRTRGYVETLFGRRRYVPDLNARVKGKREAAERMAFNMPVQGTAADLMKLAMVRLFPQLREVGARMLLQVHDELLLEAPKERAEEVAALAKEVMEGVWPLAVPLEVEVGIGEDWLAAKG

SEQ ID NO: 4373 - DNA, 2523 bp, synthetic construct
  misc_feature 1..2523: note = Variant of DNA polymerase I from Thermus sp. strain 2.9
  source 1..2523: mol_type = other DNA
atgcaccatcatcatcatcatggcggtagcggcgtgttaccggtgttcgagcctaaaggtcgcgtgcttctggttgatggccatcatctcgcgtatcgtaacttctttgccctgaaaggattaaccaccagcctgggcgagccggtacagggtgtctacggctttgcaaagtcgctcctgaaagctctgaaagaagacggtgatgtggtgattgttgtctttgatgcgaaagcgccaagttttcgccacgaagcgtacgaagcttacaaagccgggcgtgctccaacgccggaagactttcctcgccaattggcgcttatgaaggaattagtggatttgcttggcctcgaacgcttggaagttcccggtttcgaggcagacgacgtattagcgactctcgcaaagaaagccgaacgtgagggctatgaagtccagatcttgacagcagatcgcgatcttttccagcttttatctccgcgcatctcggtgttacacccggaagggcatcgtatcaccccggaatggctctgggagaaatatggtttgcgtcccgaacaatgggtggattttcgcgccttagcaggcgatccgagcgacaatattccgggagttaaaggtatcggcgagaagacggcgctcaagctccttaaagaatgggggtcgttggagaacttgcttaagaatttagatcaggtcaaaccagagtcagtgcgtgagaagattcttgctcacctcgaagacctcaaattaagccgcgaattgtcccgtgtacgcaccgatttgccgctcgaagttgatttcggtcgccgccgcgaacctgactgggagggtcttaaagcgtttttagagcgtcttgaatttggttcgctcttgcatgaattcggccttttagaaagcccgttactggccgaagaagcaccttggccaccgcccgagggcgcgtttttaggttaccgtttgagtcgcccggaaccgatgtgggccgaattactggctcttgcagcgtctgcccagggacgtgtgtatcgcgcggaagaccctcatggtgcgctccgcggcctcttcgaagtccgtggactccttgccaaagacttagctgttgttgcattgcgcgaaggtcttgatttacctccgactgatgatccaatgcttcttgcgtacctcttggacccgtcaaacacgacgcccgaaggcgtagcccgtcgttacggcggcgagtggaccgaagatgcagcgaaacgcgcgttattggccgaacgtttgcacgccaatttattaggacgtttgcaaggcgaggaacgtctcctctggctttacgaagaagtggagaaaccattgagtcgcgtgctcgcgcatatggaagctaccggtgtcaaattagacgtggcgtatttggagaatctcagccttgaagttgctgcccacatgcgccgcttggaggaagaagtattccgtttagcaggccgttcctttcgccttaactctcgcgatcagttagaacgtgtgttgttcgatgaacttggtctccctcctatcggcaagacagagaagaccggtaaacgtagcacttcagcggcggttttagaagctcttcgcgaagtccatcccattgtggacaagatcttgcagtaccgcgaactcgcgaaattgaaaggcacctatattgaccgtcttccggcattagtccacccgaaaacgggacgcctccatacccgcttcaaccaaacagccacggcgaccggtcgtttgtcctcctctgatccaaaccttcagaatattccagtacgtaccccattgggccagaagatccgccgtgcgtttgtagctgaggagggttggcgtttagtggccctcgattatcgtcttattgaattacgtgtccttgcccatctttctggcgatgagaacctcatccgcgtgtttcaggaaggcaaagacattcacactcaaacggcaagctggatgtttggattatcagctgaagcgatcgatcctttgatgcgtcgtgcagcgaagaccatcaatttcggtgttctctacggtatgagtgcctttcgtttgtcgcaggaattaggcattccctatgaagaagctcaggcgttcattcagaaatactttcaaagctatcccaaagttaaagcatggatcgagaagactctccgtgaaggccgcacacgtggttacgtagagaccttatttggacgtcgccgctatgttcccgatttaaacgctcgcgtgaaaggcaagcgtgaagccgccgaacgcatggcgttcaacatgcctgtacagggcacggcagctgacctcatgaaacttgcaatggtgcgcctttttccacaattgcgtgaagttggtgcccgcatgctcttgcaggtccacgatgaactcttgttagaagcgccaaaagagcgtgcggaagaggtggcagccctcgcgaaagaagttatggaaggcgtgtggcccttagcggtgcctcttgaagtcgaagttggtattggcgaggattggctggctgccaaagga

SEQ ID NO: 4374 - protein, 841 aa, synthetic construct
  REGION 1..841: note = Variant of DNA polymerase I from Thermus sp. strain 2.9
MHHHHHHGGSGVLPVFEPKGRVLLVDGHHLAYRNFFALKGLTTSLGEPVQGVYGFAKSLLKALKEDGDVVIVVFDAKAPSFRHEAYEAYKAGRAPTPEDFPRQLALMKELVDLLGLERLEVPGFEADDVLATLAKKAEREGYEVQILTADRDLFQLLSPRISVLHPEGHRITPEWLWEKYGLRPEQWVDFRALAGDPSDNIPGVKGIGEKTALKLLKEWGSLENLLKNLDQVKPESVREKILAHLEDLKLSRELSRVRTDLPLEVDFGRRREPDWEGLKAFLERLEFGSLLHEFGLLESPLLAEEAPWPPPEGAFLGYRLSRPEPMWAELLALAASAQGRVYRAEDPHGALRGLFEVRGLLAKDLAVVALREGLDLPPTDDPMLLAYLLDPSNTTPEGVARRYGGEWTEDAAKRALLAERLHANLLGRLQGEERLLWLYEEVEKPLSRVLAHMEATGVKLDVAYLENLSLEVAAHMRRLEEEVFRLAGRSFRLNSRDQLERVLFDELGLPPIGKTEKTGKRSTSAAVLEALREVHPIVDKILQYRELAKLKGTYIDRLPALVHPKTGRLHTRFNQTATATGRLSSSDPNLQNIPVRTPLGQKIRRAFVAEEGWRLVALDYRLIELRVLAHLSGDENLIRVFQEGKDIHTQTASWMFGLSAEAIDPLMRRAAKTINFGVLYGMSAFRLSQELGIPYEEAQAFIQKYFQSYPKVKAWIEKTLREGRTRGYVETLFGRRRYVPDLNARVKGKREAAERMAFNMPVQGTAADLMKLAMVRLFPQLREVGARMLLQVHDELLLEAPKERAEEVAALAKEVMEGVWPLAVPLEVEVGIGEDWLAAKG

SEQ ID NO: 4375 - DNA, 2523 bp, synthetic construct
  misc_feature 1..2523: note = Variant of DNA polymerase I from Thermus sp. strain 2.9
  source 1..2523: mol_type = other DNA
atgcaccatcatcatcatcatggcggtagcggcgtgttaccggtgttcgagcctaaaggtcgcgtgcttctggttgatggccatcatctcgcgtatcgtaacttctttgccctgaaaggattaaccaccagcctgggcgagccggtacagggtgtctacggctttgcaaagtcgctcctgaaagctctgaaagaagacggtgatgtggtgattgttgtctttgatgcgaaagcgccaagttttcgccacgaagcgtacgaagcttacaaagccgggcgtgctccaacgccggaagactttcctcgccaattggcgcttatgaaggaattagtggatttgcttggcctcgaacgcttggaagttcccggtttcgaggcagacgacgtattagcgactctcgcaaagaaagccgaacgtgagggctatgaagtccagatcttgacagcagatcgcgatcttttccagcttttatctccgcgcatctcggtgttacacccggaagggcatcgtatccatccggaatggctctgggagaaatatggtttgcgtcccgaacaatgggtggattttcgcgccttagcaggcgatccgagcgacaatattccgggagttaaaggtatcggcgagaagacggcgctcaagctccttaaagaatgggggtcgttggagaacttgcttaagaatttagatcaggtcaaaccagagtcagtgcgtgagaagattcttgctcacctcgaagacctcaaattaagccgcgaattgtcccgtgtacgcaccgatttgccgctcgaagttgatttcggtcgccgccgcgaacctgactgggagggtcttaaagcgtttttagagcgtcttgaatttggttcgctcttgcatgaattcggccttttagaaagcccgttactggccgaagaagcaccttggccaccgcccgagggcgcgtttttaggttaccgtttgagtcgcccggaaccgatgtgggccgaattactggctcttgcagcgtctgcccagggacgtgtgtatcgcgcggaagaccctcatggtgcgctccgcggcctcttcgaagtccgtggactccttgccaaagacttagctgttgttgcattgcgcgaaggtcttgatttacctccgactgatgatccaatgcttcttgcgtacctcttggacccgtcaaacacgacgcccgaaggcgtagcccgtcgttacggcggcgagtggaccgaagatgcagcgaaacgcgcgttattggccgaacgtttgcacgccaatttattaggacgtttgcaaggcgaggaacgtctcctctggctttacgaagaagtggagaaaccattgagtcgcgtgctcgcgcatatggaagctaccggtgtcaaattagacgtggcgtatttggagaatctcagccttgaagttgctgcccacatgcgccgcttggaggaagaagtattccgtttagcaggccgttcctttcgccttaactctcgcgatcagttagaacgtgtgttgttcgatgaacttggtctccctcctatcggcaagacagagaagaccggtaaacgtagcacttcagcggcggttttagaagctcttcgcgaagtccatcccattgtggacaagatcttgcagtaccgcgaactcgcgaaattgaaaggcacctatattgaccgtcttccggcattagtccacccgaaaacgggacgcctccatacccgcttcaaccaaacagccacggcgaccggtcgtttgtcctcctctgatccaaaccttcagaatattccagtacgtaccccattgggccagaagatccgccgtgcgtttgtagctgaggagggttggcgtttagtggccctcgattatcgtcaaattgaattacgtgtccttgcccatctttctggcgatgagaacctcatccgcgtgtttcaggaaggcaaagacattcacactcaaacggcaagctggatgtttggattatcagctgaagcgatcgatcctttgatgcgtcgtgcagcgaagaccatcaatttcggtgttctctacggtatgagtgcctttcgtttgtcgcaggaattaggcattccctatgaagaagctcaggcgttcattcagaaatactttcaaagctatcccaaagttaaagcatggatcgagaagactctccgtgaaggccgcacacgtggttacgtagagaccttatttggacgtcgccgctatgttcccgatttaaacgctcgcgtgaaaggcaagcgtgaagccgccgaacgcatggcgttcaacatgcctgtacagggcacggcagctgacctcatgaaacttgcaatggtgcgcctttttccacaattgcgtgaagttggtgcccgcatgctcttgcaggtccacgatgaactcttgttagaagcgccaaaagagcgtgcggaagaggtggcagccctcgcgaaagaagttatggaaggcgtgtggcccttagcggtgcctcttgaagtcgaagttggtattggcgaggattggctggctgccaaagga

SEQ ID NO: 4376 - protein, 841 aa, synthetic construct
  REGION 1..841: note = Variant of DNA polymerase I from Thermus sp. strain 2.9
MHHHHHHGGSGVLPVFEPKGRVLLVDGHHLAYRNFFALKGLTTSLGEPVQGVYGFAKSLLKALKEDGDVVIVVFDAKAPSFRHEAYEAYKAGRAPTPEDFPRQLALMKELVDLLGLERLEVPGFEADDVLATLAKKAEREGYEVQILTADRDLFQLLSPRISVLHPEGHRIHPEWLWEKYGLRPEQWVDFRALAGDPSDNIPGVKGIGEKTALKLLKEWGSLENLLKNLDQVKPESVREKILAHLEDLKLSRELSRVRTDLPLEVDFGRRREPDWEGLKAFLERLEFGSLLHEFGLLESPLLAEEAPWPPPEGAFLGYRLSRPEPMWAELLALAASAQGRVYRAEDPHGALRGLFEVRGLLAKDLAVVALREGLDLPPTDDPMLLAYLLDPSNTTPEGVARRYGGEWTEDAAKRALLAERLHANLLGRLQGEERLLWLYEEVEKPLSRVLAHMEATGVKLDVAYLENLSLEVAAHMRRLEEEVFRLAGRSFRLNSRDQLERVLFDELGLPPIGKTEKTGKRSTSAAVLEALREVHPIVDKILQYRELAKLKGTYIDRLPALVHPKTGRLHTRFNQTATATGRLSSSDPNLQNIPVRTPLGQKIRRAFVAEEGWRLVALDYRQIELRVLAHLSGDENLIRVFQEGKDIHTQTASWMFGLSAEAIDPLMRRAAKTINFGVLYGMSAFRLSQELGIPYEEAQAFIQKYFQSYPKVKAWIEKTLREGRTRGYVETLFGRRRYVPDLNARVKGKREAAERMAFNMPVQGTAADLMKLAMVRLFPQLREVGARMLLQVHDELLLEAPKERAEEVAALAKEVMEGVWPLAVPLEVEVGIGEDWLAAKG

SEQ ID NO: 4377 - DNA, 2523 bp, synthetic construct
  misc_feature 1..2523: note = Variant of DNA polymerase I from Thermus sp. strain 2.9
  source 1..2523: mol_type = other DNA
atgcaccatcatcatcatcatggcggtagcggcgtgttaccggtgttcgagcctaaaggtcgcgtgcttctggttgatggccatcatctcgcgtatcgtaacttctttgccctgaaaggattaaccaccagcctgggcgagccggtacagggtgtctacggctttgcaaagtcgctcctgaaagctctgaaagaagacggtgatgtggtgattgttgtctttgatgcgaaagcgccaagttttcgccacgaagcgtacgaagcttacaaagccgggcgtgctccaacgccggaagactttcctcgccaattggcgcttatgaaggaattagtggatttgcttggcctcgaacgcttggaagttcccggtttcgaggcagacgacgtattagcgactctcgcaaagaaagccgaacgtgagggctatgaagtccagatcttgacagcagatcgcgatcttttccagcttttatctccgcgcatctcggtgttacacccggaagggcatcgtatcaccccggaatggctctgggagaaatatggtttgcgtcccgaacaatgggtggattttcgcgccttagcaggcgatccgagcgacaatattccgggagttaaaggtatcggcgagaagacggcgctcaagctccttaaagaatgggggtcgttggagaacttgcttaagaatttagatcaggtcaaaccagagtcagtgcgtgagaagattcttgctcacctcgaagacctcaaattaagccgcgaattgtcccgtgtacgcaccgatttgccgctcgaagttgatttcggtcgccgccgcgaacctgactgggagggtcttaaagcgtttttagagcgtcttgaatttggttcgctcttgcatgaattcggccttttagaaagcccgttactggccgaagaagcaccttggccaccgcccgagggcttgtttttaggttaccgtttgagtcgcccggaaccgatgtgggccgaattactggctcttgcagcgtctgcccagggacgtgtgtatcgcgcggaagaccctcatggtgcgctccgcggcctcttcgaagtccgtggactccttgccaaagacttagctgttgttgcattgcgcgaaggtcttgatttacctccgactgatgatccaatgcttcttgcgtacctcttggacccgtcaaacacgacgcccgaaggcgtagcccgtcgttacggcggcgagtggaccgaagatgcagcgaaacgcgcgttattggccgaacgtttgcacgccaatttattaggacgtttgcaaggcgaggaacgtctcctctggctttacgaagaagtggagaaaccattgagtcgcgtgctcgcgcatatggaagctaccggtgtcaaattagacgtggcgtatttggagaatctcagccttgaagttgctgcccacatgcgccgcttggaggaagaagtattccgtttagcaggccgttcctttcgccttaactctcgcgatcagttagaacgtgtgttgttcgatgaacttggtctccctcctatcggcaagacagagaagaccggtaaacgtagcacttcagcggcggttttagaagctcttcgcgaagtccatcccattgtggacaagatcttgcagtaccgcgaactcgcgaaattgaaaggcacctatattgaccgtcttccggcattagtccacccgaaaacgggacgcctccatacccgcttcaaccaaacagccacggcgaccggtcgtttgtcctcctctgatccaaaccttcagaatattccagtacgtaccccattgggccagaagatccgccgtgcgtttgtagctgaggagggttggcgtttagtggccctcgattatcgtcaaattgaattacgtgtccttgcccatctttctggcgatgagaacctcatccgcgtgtttcaggaaggcaaagacattcacactcaaacggcaagctggatgtttggattatcagctgaagcgatcgatcctttgatgcgtcgtgcagcgaagaccatcaatttcggtgttctctacggtatgagtgcctttcgtttgtcgcaggaattaggcattccctatgaagaagctcaggcgttcattcagaaatactttcaaagctatcccaaagttaaagcatggatcgagaagactctccgtgaaggccgcacacgtggttacgtagagaccttatttggacgtcgccgctatgttcccgatttaaacgctcgcgtgaaaggcaagcgtgaagccgccgaacgcatggcgttcaacatgcctgtacagggcacggcagctgacctcatgaaacttgcaatggtgcgcctttttccacaattgcgtgaagttggtgcccgcatgctcttgcaggtccacgatgaactcttgttagaagcgccaaaagagcgtgcggaagaggtggcagccctcgcgaaagaagttatggaaggcgtgtggcccttagcggtgcctcttgaagtcgaagttggtattggcgaggattggctggctgccaaagga

SEQ ID NO: 4378 - protein, 841 aa, synthetic construct
  REGION 1..841: note = Variant of DNA polymerase I from Thermus sp. strain 2.9
MHHHHHHGGSGVLPVFEPKGRVLLVDGHHLAYRNFFALKGLTTSLGEPVQGVYGFAKSLLKALKEDGDVVIVVFDAKAPSFRHEAYEAYKAGRAPTPEDFPRQLALMKELVDLLGLERLEVPGFEADDVLATLAKKAEREGYEVQILTADRDLFQLLSPRISVLHPEGHRITPEWLWEKYGLRPEQWVDFRALAGDPSDNIPGVKGIGEKTALKLLKEWGSLENLLKNLDQVKPESVREKILAHLEDLKLSRELSRVRTDLPLEVDFGRRREPDWEGLKAFLERLEFGSLLHEFGLLESPLLAEEAPWPPPEGLFLGYRLSRPEPMWAELLALAASAQGRVYRAEDPHGALRGLFEVRGLLAKDLAVVALREGLDLPPTDDPMLLAYLLDPSNTTPEGVARRYGGEWTEDAAKRALLAERLHANLLGRLQGEERLLWLYEEVEKPLSRVLAHMEATGVKLDVAYLENLSLEVAAHMRRLEEEVFRLAGRSFRLNSRDQLERVLFDELGLPPIGKTEKTGKRSTSAAVLEALREVHPIVDKILQYRELAKLKGTYIDRLPALVHPKTGRLHTRFNQTATATGRLSSSDPNLQNIPVRTPLGQKIRRAFVAEEGWRLVALDYRQIELRVLAHLSGDENLIRVFQEGKDIHTQTASWMFGLSAEAIDPLMRRAAKTINFGVLYGMSAFRLSQELGIPYEEAQAFIQKYFQSYPKVKAWIEKTLREGRTRGYVETLFGRRRYVPDLNARVKGKREAAERMAFNMPVQGTAADLMKLAMVRLFPQLREVGARMLLQVHDELLLEAPKERAEEVAALAKEVMEGVWPLAVPLEVEVGIGEDWLAAKG

SEQ ID NO: 4379 - DNA, 2523 bp, synthetic construct
  misc_feature 1..2523: note = Variant of DNA polymerase I from Thermus sp. strain 2.9
  source 1..2523: mol_type = other DNA
atgcaccatcatcatcatcatggcggtagcggcgtgttaccggtgttcgagcctaaaggtcgcgtgcttctggttgatggccatcatctcgcgtatcgtaacttctttgccctgaaaggattaaccaccagcctgggcgagccggtacagggtgtctacggctttgcaaagtcgctcctgaaagctctgaaagaagacggtgatgtggtgattgttgtctttgatgcgaaagcgccaagttttcgccacgaagcgtacgaagcttacaaagccgggcgtgctccaacgccggaagactttcctcgccaattggcgcttatgaaggaattagtggatttgcttggcctcgaacgcttggaagttcccggtttcgaggcagacgacgtattagcgactctcgcaaagaaagccgaacgtgagggctatgaagtccagatcttgacagcagatcgcgatcttttccagcttttatctccgcgcatctcggtgttacacccggaagggcatcgtatcaccccggaatggctctgggagaaatatggtttgcgtcccgaacaatgggtggattttcgcgccttagcaggcgatccgagcgacaatattccgggagttaaaggtatcggcgagaagacggcgctcaagctccttaaagaatgggggtcgttggagaacttgcttaagaatttagatcaggtcaaaccagagtcagtgcgtgagaagattcttgctcacctcgaagacctcaaattaagccgcgaattgtcccgtgtacgcaccgatttgccgctcgaagttgatttcggtcgccgccgcgaacctgactgggagggtcttaaagcgtttttagagcgtcttgaatttggttcgctcttgcatgaattcggccttttagaaagcccgttactggcagaagaagcaccttggccaccgcccgagggcgcgtttttaggttaccgtttgagtcgcccggaaccgatgtgggccgaattactggctcttgcagcgtctgcccagggacgtgtgtatcgcgcggaagaccctcatggtgcgctccgcacgctcttcgaagtccgtggactccttgccaaagacttagctgttgttgcattgcgcgaaggtcttgatttacctccgactgatgatccaatgcttcttgcgtacctcttggacccgtcaaacacgacgcccgaaggcgtagcccgtcgttacggcggcgagtggaccgaagatgcagcgaaacgcgcgttattggccgaacgtttgcacgccaatttattaggacgtttgcaaggcgaggaacgtctcctctggctttacgaagaagtggagaaaccattgagtcgcgtgctcgcgcatatggaagctaccggtgtcaaattagacgtggcgtatttggagaatctcagccttgaagttgctgcccacatgcgccgcttggaggaagaagtattccgtttagcaggccgttcctttcgccttaactctcgcgatcagttagaacgtgtgttgttcgatgaacttggtctccctcctatcggcaagacagagaagaccggtaaacgtagcacttcagcggcggttttagaagctcttcgcgaagtccatcccattgtggacaagatcttgcagtaccgcgaactcgcgaaattgaaaggcacctatattgaccgtcttccggcattagtccacccgaaaacgggacgcctccatacccgcttcaaccaaacagccacggcgaccggtcgtttgtcctcctctgatccaaaccttcagaatattccagtacgtaccccattgggccagaagatccgccgtgcgtttgtagctgaggagggttggcgtttagtggccctcgattatcgtcaaattgaattacgtgtccttgcccatctttctggcgatgagaacctcatccgcgtgtttcaggaaggcaaagacattcacactcaaacggcaagctggatgtttggattatcagctgaagcgatcgatcctttgatgcgtcgtgcagcgaagaccatcaatttcggtgttctctacggtatgagtgcctttcgtttgtcgcaggaattaggcattccctatgaagaagctcaggcgttcattcagaaatactttcaaagctatcccaaagttaaagcatggatcgagaagactctccgtgaaggccgcacacgtggttacgtagagaccttatttggacgtcgccgctatgttcccgatttaaacgctcgcgtgaaaggcaagcgtgaagccgccgaacgcatggcgttcaacatgcctgtacagggcacggcagctgacctcatgaaacttgcaatggtgcgcctttttccacaattgcgtgaagttggtgcccgcatgctcttgcaggtccacgatgaactcttgttagaagcgccaaaagagcgtgcggaagaggtggcagccctcgcgaaagaagttatggaaggcgtgtggcccttagcggtgcctcttgaagtcgaagttggtattggcgaggattggctggctgccaaagga

SEQ ID NO: 4380 - protein, 841 aa, synthetic construct
  REGION 1..841: note = Variant of DNA polymerase I from Thermus sp. strain 2.9
MHHHHHHGGSGVLPVFEPKGRVLLVDGHHLAYRNFFALKGLTTSLGEPVQGVYGFAKSLLKALKEDGDVVIVVFDAKAPSFRHEAYEAYKAGRAPTPEDFPRQLALMKELVDLLGLERLEVPGFEADDVLATLAKKAEREGYEVQILTADRDLFQLLSPRISVLHPEGHRITPEWLWEKYGLRPEQWVDFRALAGDPSDNIPGVKGIGEKTALKLLKEWGSLENLLKNLDQVKPESVREKILAHLEDLKLSRELSRVRTDLPLEVDFGRRREPDWEGLKAFLERLEFGSLLHEFGLLESPLLAEEAPWPPPEGAFLGYRLSRPEPMWAELLALAASAQGRVYRAEDPHGALRTLFEVRGLLAKDLAVVALREGLDLPPTDDPMLLAYLLDPSNTTPEGVARRYGGEWTEDAAKRALLAERLHANLLGRLQGEERLLWLYEEVEKPLSRVLAHMEATGVKLDVAYLENLSLEVAAHMRRLEEEVFRLAGRSFRLNSRDQLERVLFDELGLPPIGKTEKTGKRSTSAAVLEALREVHPIVDKILQYRELAKLKGTYIDRLPALVHPKTGRLHTRFNQTATATGRLSSSDPNLQNIPVRTPLGQKIRRAFVAEEGWRLVALDYRQIELRVLAHLSGDENLIRVFQEGKDIHTQTASWMFGLSAEAIDPLMRRAAKTINFGVLYGMSAFRLSQELGIPYEEAQAFIQKYFQSYPKVKAWIEKTLREGRTRGYVETLFGRRRYVPDLNARVKGKREAAERMAFNMPVQGTAADLMKLAMVRLFPQLREVGARMLLQVHDELLLEAPKERAEEVAALAKEVMEGVWPLAVPLEVEVGIGEDWLAAKG

SEQ ID NO: 4381 - DNA, 2523 bp, synthetic construct
  misc_feature 1..2523: note = Variant of DNA polymerase I from Thermus sp. strain 2.9
  source 1..2523: mol_type = other DNA
atgcaccatcatcatcatcatggcggtagcggcgtgttaccggtgttcgagcctaaaggtcgcgtgcttctggttgatggccatcatctcgcgtatcgtaacttctttgccctgaaaggattaaccaccagcctgggcgagccggtacagggtgtctacggctttgcaaagtcgctcctgaaagctctgaaagaagacggtgatgtggtgattgttgtctttgatgcgaaagcgccaagttttcgccacgaagcgtacgaagcttacaaagccgggcgtgctccaacgccggaagactttcctcgccaattggcgcttatgaaggaattagtggatttgcttggcctcgaacgcttggaagttcccggtttcgaggcagacgacgtattagcgactctcgcaaagaaagccgaacgtgagggctatgaagtccagatcttgacagcagatcgcgatcttttccagcttttatctccgcgcatctcggtgttacacccggaagggcatcgtatcaccccggaatggctctgggagaaatatggtttgcgtcccgaacaatgggtggattttcgcgccttagcaggcgatccgagcgacaatattccgggagttaaaggtatcggcgagaagacggcgctcaagctccttaaagaatgggggtcgttggagaacttgcttaagaatttagatcaggtcaaaccagagtcagtgcgtgagaagattcttgctcacctcgaagacctcaaattaagccgcgaattgtcccgtgtacgcaccgatttgccgctcgaagttgatttcggtcgccgccgcgaacctgactgggagggtcttaaagcgtttttagagcgtcttgaatttggttcgctcttgcatgaattcggccttttagaaagcccgttactggccgaagaagcaccttggccaccgcccgagggcgcgtttttaggttaccgtttgagtcgcccggaaccgatgtgggccgaattactggctcttgcagcgtctgcccagggacgtgtgtatcgcgcggaagaccctgctggtgcgctccgcggcctcttcgaagtccgtggactccttgccaaagacttagctgttgttgcattgcgcgaaggtcttgatttacctccgactgatgatccaatgcttcttgcgtacctcttggacccgtcaaacacgacgcccgaaggcgtagcccgtcgttacggcggcgagtggaccgaagatgcagcgaaacgcgcgttattggccgaacgtttgcacgccaatttattaggacgtttgcaaggcgaggaacgtctcctctggctttacgaagaagtggagaaaccattgagtcgcgtgctcgcgcatatggaagctaccggtgtcaaattagacgtggcgtatttggagaatctcagccttgaagttgctgcccacatgcgccgcttggaggaagaagtattccgtttagcaggccgttcctttcgccttaactctcgcgatcagttagaacgtgtgttgttcgatgaacttggtctccctcctatcggcaagacagagaagaccggtaaacgtagcacttcagcggcggttttagaagctcttcgcgaagtccatcccattgtggacaagatcttgcagtaccgcgaactcgcgaaattgaaaggcacctatattgaccgtcttccggcattagtccacccgaaaacgggacgcctccatacccgcttcaaccaaacagccacggcgaccggtcgtttgtcctcctctgatccaaaccttcagaatattccagtacgtaccccattgggccagaagatccgccgtgcgtttgtagctgaggagggttggcgtttagtggccctcgattatcgtcaaattgaattacgtgtccttgcccatctttctggcgatgagaacctcatccgcgtgtttcaggaaggcaaagacattcacactcaaacggcaagctggatgtttggattatcagctgaagcgatcgatcctttgatgcgtcgtgcagcgaagaccatcaatttcggtgttctctacggtatgagtgcctttcgtttgtcgcaggaattaggcattccctatgaagaagctcaggcgttcattcagaaatactttcaaagctatcccaaagttaaagcatggatcgagaagactctccgtgaaggccgcacacgtggttacgtagagaccttatttggacgtcgccgctatgttcccgatttaaacgctcgcgtgaaaggcaagcgtgaagccgccgaacgcatggcgttcaacatgcctgtacagggcacggcagctgacctcatgaaacttgcaatggtgcgcctttttccacaattgcgtgaagttggtgcccgcatgctcttgcaggtccacgatgaactcttgttagaagcgccaaaagagcgtgcggaagaggtggcagccctcgcgaaagaagttatggaaggcgtgtggcccttagcggtgcctcttgaagtcgaagttggtattggcgaggattggctggctgccaaagga

SEQ ID NO: 4382 - protein, 841 aa, synthetic construct
  REGION 1..841: note = Variant of DNA polymerase I from Thermus sp. strain 2.9
MHHHHHHGGSGVLPVFEPKGRVLLVDGHHLAYRNFFALKGLTTSLGEPVQGVYGFAKSLLKALKEDGDVVIVVFDAKAPSFRHEAYEAYKAGRAPTPEDFPRQLALMKELVDLLGLERLEVPGFEADDVLATLAKKAEREGYEVQILTADRDLFQLLSPRISVLHPEGHRITPEWLWEKYGLRPEQWVDFRALAGDPSDNIPGVKGIGEKTALKLLKEWGSLENLLKNLDQVKPESVREKILAHLEDLKLSRELSRVRTDLPLEVDFGRRREPDWEGLKAFLERLEFGSLLHEFGLLESPLLAEEAPWPPPEGAFLGYRLSRPEPMWAELLALAASAQGRVYRAEDPAGALRGLFEVRGLLAKDLAVVALREGLDLPPTDDPMLLAYLLDPSNTTPEGVARRYGGEWTEDAAKRALLAERLHANLLGRLQGEERLLWLYEEVEKPLSRVLAHMEATGVKLDVAYLENLSLEVAAHMRRLEEEVFRLAGRSFRLNSRDQLERVLFDELGLPPIGKTEKTGKRSTSAAVLEALREVHPIVDKILQYRELAKLKGTYIDRLPALVHPKTGRLHTRFNQTATATGRLSSSDPNLQNIPVRTPLGQKIRRAFVAEEGWRLVALDYRQIELRVLAHLSGDENLIRVFQEGKDIHTQTASWMFGLSAEAIDPLMRRAAKTINFGVLYGMSAFRLSQELGIPYEEAQAFIQKYFQSYPKVKAWIEKTLREGRTRGYVETLFGRRRYVPDLNARVKGKREAAERMAFNMPVQGTAADLMKLAMVRLFPQLREVGARMLLQVHDELLLEAPKERAEEVAALAKEVMEGVWPLAVPLEVEVGIGEDWLAAKG

SEQ ID NO: 4383 - DNA, 2523 bp, synthetic construct
  misc_feature 1..2523: note = Variant of DNA polymerase I from Thermus sp. strain 2.9
  source 1..2523: mol_type = other DNA
atgcaccatcatcatcatcatggcggtagcggcgtgttaccggtgttcgagcctaaaggtcgcgtgcttctggttgatggccatcatctcgcgtatcgtaacttctttgccctgaaaggattaaccaccagcctgggcgagccggtacagggtgtctacggctttgcaaagtcgctcctgaaagctctgaaagaagacggtgatgtggtgattgttgtctttgatgcgaaagcgccaagttttcgccacgaagcgtacgaagcttacaaagccgggcgtgctccaacgccggaagactttcctcgccaattggcgcttatgaaggaattagtggatttgcttggcctcgaacgcttggaagttcccggtttcgaggcagacgacgtattagcgactctcgcaaagaaagccgaacgtgagggctatgaagtccagatcttgacagcagatcgcgatcttttccagcttttatctccgcgcatctcggtgttacacccggaagggcatcgtatcaccccggaatggctctgggagaaatatggtttgcgtcccgaacaatgggtggattttcgcgccttagcaggcgatccgagcgacaatattccgggagttaaaggtatcggcgagaagacggcgctcaagctccttaaagaatgggggtcgttggagaacttgcttaagaatttagatcaggtcaaaccagagtcagtgcgtgagaagattcttgctcacctcgaagacctcaaattaagccgcgaattgtcccgtgtacgcaccgatttgccgctcgaagttgatttcggtcgccgccgcgaacctgactgggagggtcttaaagcgtttttagagcgtcttgaatttggttcgctcttgcatgaattcggccttttagaaagcccgttactggccgaagaagcaccttggccaccgcccgagggcgcgtttttaggttaccgtttgagtcgcccggaaccgatgtgggccgaattactggctcttgcagcgtctgcccagggacgtgtgtatcgcgcggaagaccctcatggtgcgctccgcggcctcttcgaagtccgtggactccttgccaaagacttagctgttgttgcattgcgcgaaggtcttgatttacctccgactgatgatccaatgcttcttgcgtacctcttggacccgtcaaacacgacgcccgaaggcgtagcccgtcgttacggcggcgagtggaccgaagatgcagcgaaacgcgcgttattggccgaacgtttgcacgccaatttattaggacgtttgcaaggcgaggaacgtctcctctggctttacgaagaagtggagaaaccattgagtcgcgtgctcgcgcatatggaagctaccggtgtcaaattagacgtggcgtatttggagaatctcagccttgaagttgctgcccacatgcgccgcttggaggaagaagtattccgtttagcaggccgttcctttcgccttaactctcgcgatcagttagaacgtgtgttgttcgatgaacttggtctccctcctatcggcaagacagagaagaccggtaaacgtagcacttcagcggcggttttagaagctcttcgcgaagtccatcccattgtggacaagatcttgcagtaccgcgaactcgcgaaattgaaaggcacctatattgaccgtcttccggcattagtccacccgaaaacgggacgcctccatacccgcttcaaccaaacagccacggcgaccggtcgtttgtcctcctctgatccaaaccttcagaatattccagtacgtaccccattgggccagaagatccgccgtgcgtttgtagctgaggagggttggcgtttagtggccctcgattatcgtcaagtggaattacgtgtccttgcccatctttctggcgatgagaacctcatccgcgtgtttcaggaaggcaaagacattcacactcaaacggcaagctggatgtttggattatcagctgaagcgatcgatcctttgatgcgtcgtgcagcgaagaccatcaatttcggtgttctctacggtatgagtgcctttcgtttgtcgcaggaattaggcattccctatgaagaagctcaggcgttcattcagaaatactttcaaagctatcccaaagttaaagcatggatcgagaagactctccgtgaaggccgcacacgtggttacgtagagaccttatttggacgtcgccgctatgttcccgatttaaacgctcgcgtgaaaggcaagcgtgaagccgccgaacgcatggcgttcaacatgcctgtacagggcacggcagctgacctcatgaaacttgcaatggtgcgcctttttccacaattgcgtgaagttggtgcccgcatgctcttgcaggtccacgatgaactcttgttagaagcgccaaaagagcgtgcggaagaggtggcagccctcgcgaaagaagttatggaaggcgtgtggcccttagcggtgcctcttgaagtcgaagttggtattggcgaggattggctggctgccaaagga

SEQ ID NO: 4384 - protein, 841 aa, synthetic construct
  REGION 1..841: note = Variant of DNA polymerase I from Thermus sp. strain 2.9
MHHHHHHGGSGVLPVFEPKGRVLLVDGHHLAYRNFFALKGLTTSLGEPVQGVYGFAKSLLKALKEDGDVVIVVFDAKAPSFRHEAYEAYKAGRAPTPEDFPRQLALMKELVDLLGLERLEVPGFEADDVLATLAKKAEREGYEVQILTADRDLFQLLSPRISVLHPEGHRITPEWLWEKYGLRPEQWVDFRALAGDPSDNIPGVKGIGEKTALKLLKEWGSLENLLKNLDQVKPESVREKILAHLEDLKLSRELSRVRTDLPLEVDFGRRREPDWEGLKAFLERLEFGSLLHEFGLLESPLLAEEAPWPPPEGAFLGYRLSRPEPMWAELLALAASAQGRVYRAEDPHGALRGLFEVRGLLAKDLAVVALREGLDLPPTDDPMLLAYLLDPSNTTPEGVARRYGGEWTEDAAKRALLAERLHANLLGRLQGEERLLWLYEEVEKPLSRVLAHMEATGVKLDVAYLENLSLEVAAHMRRLEEEVFRLAGRSFRLNSRDQLERVLFDELGLPPIGKTEKTGKRSTSAAVLEALREVHPIVDKILQYRELAKLKGTYIDRLPALVHPKTGRLHTRFNQTATATGRLSSSDPNLQNIPVRTPLGQKIRRAFVAEEGWRLVALDYRQVELRVLAHLSGDENLIRVFQEGKDIHTQTASWMFGLSAEAIDPLMRRAAKTINFGVLYGMSAFRLSQELGIPYEEAQAFIQKYFQSYPKVKAWIEKTLREGRTRGYVETLFGRRRYVPDLNARVKGKREAAERMAFNMPVQGTAADLMKLAMVRLFPQLREVGARMLLQVHDELLLEAPKERAEEVAALAKEVMEGVWPLAVPLEVEVGIGEDWLAAKG

SEQ ID NO: 4385 - DNA, 2523 bp, synthetic construct
  misc_feature 1..2523: note = Variant of DNA polymerase I from Thermus sp. strain 2.9
  source 1..2523: mol_type = other DNA
atgcaccatcatcatcatcatggcggtagcggcgtgttaccggtgttcgagcctaaaggtcgcgtgcttctggttgatggccatcatctcgcgtatcgtaacttctttgccctgaaaggattaaccaccagcctgggcgagccggtacagggtgtctacggctttgcaaagtcgctcctgaaagctctgaaagaagacggtgatgtggtgattgttgtctttgatgcgaaagcgccaagttttcgccacgaagcgtacgaagcttacaaagccgggcgtgctccaacgccggaagactttcctcgccaattggcgcttatgaaggaattagtggatttgcttggcctcgaacgcttggaagttcccggtttcgaggcagacgacgtattagcgactctcgcaaagaaagccgaacgtgagggctatgaagtccagatcttgacagcagatcgcgatcttttccagcttttatctccgcgcatctcggtgttacacccggaagggcatcgtatcaccccggaatggctctgggagaaatatggtttgcgtcccgaacaatgggtggattttcgcgccttagcaggcgatccgagcgacaatattccgggagttaaaggtatcggcgagaagacggcgctcaagctccttaaagaatgggggtcgttggagaacttgcttaagaatttagatcaggtcaaaccagagtcagtgcgtgagaagattcttgctcacctcgaagacctcaaattaagccgcgaattgtcccgtgtacgcaccgatttgccgctcgaagttgatttcggtcgccgccgcgaacctgactgggagggtcttaaagcgtttttagagcgtcttgaatttggttcgctcttgcatgaattcggccttttagaaagcccgttactggccgaagaagcaccttggccaccgcccgagggcgcgtttttaggttaccgtttgagtcgcccggaaccgatgtgggccgaattactggctcttgcagcgtctgcccagggacgtgtgtatcgcgcggaagaccctcatggtgcgctccgcggcctcttcgaagtccgtggactccttgccaaagacttagctgttgttgcattgcgcgaaggtcttgatttacctccgactgatgatccaatgcttcttgcgtacctcttggacccgtcaaacacgacgcccgaaggcgtagcccgtcgttacggcggcgagtggaccgaagatgcagcgaaacgcgcgttattggccgaacgtttgcacgccaatttattaggacgtttgcaaggcgaggaacgtctcctctggctttacgaagaagtggagaaaccattgagtcgcgtgctcgcgcatatggaagctaccggtgtcaaattagacgtggcgtatttggagaatctcagccttgaagttgctgcccacatgcgccgcttggaggaagaagtattccgtttagcaggccgttcctttcgccttaactctcgcgatcagttagaacgtgtgttgttcgatgaacttggtctccctcctatcggcaagacagagaagaccggtaaacgtagcacttcagcggcggttttagaagctcttcgcgaagtccatcccattgtggacaagatcttgcagtaccgcgaactcgcgaaattgaaaggcacctatattgaccgtcttctggcattagtccacccgaaaacgggacgcctccatacccgcttcaaccaaacagccacggcgaccggtcgtttgtcctcctctgatccaaaccttcagaatattccagtacgtaccccattgggccagaagatccgccgtgcgtttgtagctgaggagggttggcgtttagtggccctcgattatcgtcaaattgaattacgtgtccttgcccatctttctggcgatgagaacctcatccgcgtgtttcaggaaggcaaagacattcacactcaaacggcaagctggatgtttggattatcagctgaagcgatcgatcctttgatgcgtcgtgcagcgaagaccatcaatttcggtgttctctacggtatgagtgcctttcgtttgtcgcaggaattaggcattccctatgaagaagctcaggcgttcattcagaaatactttcaaagctatcccaaagttaaagcatggatcgagaagactctccgtgaaggccgcacacgtggttacgtagagaccttatttggacgtcgccgctatgttcccgatttaaacgctcgcgtgaaaggcaagcgtgaagccgccgaacgcatggcgttcaacatgcctgtacagggcacggcagctgacctcatgaaacttgcaatggtgcgcctttttccacaattgcgtgaagttggtgcccgcatgctcttgcaggtccacgatgaactcttgttagaagcgccaaaagagcgtgcggaagaggtggcagccctcgcgaaagaagttatggaaggcgtgtggcccttagcggtgcctcttgaagtcgaagttggtattggcgaggattggctggctgccaaagga

SEQ ID NO: 4386 - protein, 841 aa, synthetic construct
  REGION 1..841: note = Variant of DNA polymerase I from Thermus sp. strain 2.9
MHHHHHHGGSGVLPVFEPKGRVLLVDGHHLAYRNFFALKGLTTSLGEPVQGVYGFAKSLLKALKEDGDVVIVVFDAKAPSFRHEAYEAYKAGRAPTPEDFPRQLALMKELVDLLGLERLEVPGFEADDVLATLAKKAEREGYEVQILTADRDLFQLLSPRISVLHPEGHRITPEWLWEKYGLRPEQWVDFRALAGDPSDNIPGVKGIGEKTALKLLKEWGSLENLLKNLDQVKPESVREKILAHLEDLKLSRELSRVRTDLPLEVDFGRRREPDWEGLKAFLERLEFGSLLHEFGLLESPLLAEEAPWPPPEGAFLGYRLSRPEPMWAELLALAASAQGRVYRAEDPHGALRGLFEVRGLLAKDLAVVALREGLDLPPTDDPMLLAYLLDPSNTTPEGVARRYGGEWTEDAAKRALLAERLHANLLGRLQGEERLLWLYEEVEKPLSRVLAHMEATGVKLDVAYLENLSLEVAAHMRRLEEEVFRLAGRSFRLNSRDQLERVLFDELGLPPIGKTEKTGKRSTSAAVLEALREVHPIVDKILQYRELAKLKGTYIDRLLALVHPKTGRLHTRFNQTATATGRLSSSDPNLQNIPVRTPLGQKIRRAFVAEEGWRLVALDYRQIELRVLAHLSGDENLIRVFQEGKDIHTQTASWMFGLSAEAIDPLMRRAAKTINFGVLYGMSAFRLSQELGIPYEEAQAFIQKYFQSYPKVKAWIEKTLREGRTRGYVETLFGRRRYVPDLNARVKGKREAAERMAFNMPVQGTAADLMKLAMVRLFPQLREVGARMLLQVHDELLLEAPKERAEEVAALAKEVMEGVWPLAVPLEVEVGIGEDWLAAKG

SEQ ID NO: 4387 - DNA, 2523 bp, synthetic construct
  misc_feature 1..2523: note = Variant of DNA polymerase I from Thermus sp. strain 2.9
  source 1..2523: mol_type = other DNA
atgcaccatcatcatcatcatggcggtagcggcgtgttaccggtgttcgagcctaaaggtcgcgtgcttctggttgatggccatcatctcgcgtatcgtaacttctttgccctgaaaggattaaccaccagcctgggcgagccggtacagggtgtctacggctttgcaaagtcgctcctgaaagctctgaaagaagacggtgatgtggtgattgttgtctttgatgcgaaagcgccaagttttcgccacgaagcgtacgaagcttacaaagccgggcgtgctccaacgccggaagactttcctcgccaattggcgcttatgaaggaattagtggatttgcttggcctcgaacgcttggaagttcccggtttcgaggcagacgacgtattagcgactctcgcaaagaaagccgaacgtgagggctatgaagtccagatcttgacagcagatcgcgatcttttccagcttttatctccgcgcatctcggtgttacacccggaagggcatcgtatcaccccggaatggctctgggagaaatatggtttgcgtcccgaacaatgggtggattttcgcgccttagcaggcgatccgagcgacaatattccgggagttaaaggtatcggcgagaagacggcgctcaagctccttaaagaatgggggtcgttggagaacttgcttaagaatttagatcaggtcaaaccagagtcagtgcgtgagaagattcttgctcacctcgaagacctcaaattaagccgcgaattgtcccgtgtacgcaccgatttgccgctcgaagttgatttcggtcgccgccgcgaacctgactgggagggtcttaaagcgtttttagagcgtcttgaatttggttcgctcttgcatgaattcggccttttagaaagcccgttactggccgaagaagcaccttggccaccgcccgagggcgcgtttttaggttaccgtttgagtcgcccggaaccgatgtgggccgaattactggctcttgcagcgtctgcccagggacgtgtgtatcgcgcggaagaccctcatggtgcgctccgcggcctcttcgaagtccgtggactccttgccaaagacttagctgttgttgcattgcgcgaaggtcttgatttacctccgactgatgatccaatgcttcttgcgtacctcttggacccgtcaaacacgacgcccgaaggcgtagcccgtcgttacggcggcgagtggaccgaagatgcagcgaaacgcgcgttattggccgaacgtttgcacgccaatttattaggacgtttgcaaggcgaggaacgtctcctctggctttacgaagaagtggagaaaccattgagtcgcgtgctcgcgcatatggaagctaccggtgtcaaattagacgtggcgtatttggagaatctcagccttgaagttgctgcccacatgcgccgcttggaggaagaagtattccgtttagcaggccgttcctttcgccttaactctcgcgatcagttagaacgtgtgttgttcgatgaacttggtctccctcctatcggcaagacagagaagaccggtaaacgtagcacttcagcggcggttttagaagctcttcgcgaagtccatcccattgtggacaagatcttgcagtaccgcgaactcgcgaaattgaaaggcacctatacggaccgtcttccggcattagtccacccgaaaacgggacgcctccatacccacttcaaccaaacagccacggcgaccggtcgtttgtcctcctctgatccaaaccttcagaatattccagtacgtaccccattgggccagaagatccgccgtgcgtttgtagctgaggagggttggcgtttagtggccctcgattatcgtcaaattgaattacgtgtccttgcccatctttctggcgatgagaacctcatccgcgtgtttcaggaaggcaaagacattcacactcaaacggcaagctggatgtttggattatcagctgaagcgatcgatcctttgatgcgtcgtgcagcgaagaccatcaatttcggtgttctctacggtatgagtgcctttcgtttgtcgcaggaattaggcattccctatgaagaagctcaggcgttcattcagaaatactttcaaagctatcccaaagttaaagcatggatcgagaagactctccgtgaaggccgcacacgtggttacgtagagaccttatttggacgtcgccgctatgttcccgatttaaacgctcgcgtgaaaggcaagcgtgaagccgccgaacgcatggcgttcaacatgcctgtacagggcacggcagctgacctcatgaaacttgcaatggtgcgcctttttccacaattgcgtgaagttggtgcccgcatgctcttgcaggtccacgatgaactcttgttagaagcgccaaaagagcgtgcggaagaggtggcagccctcgcgaaagaagttatggaaggcgtgtggcccttagcggtgcctcttgaagtcgaagttggtattggcgaggattggctggctgccaaagga

SEQ ID NO: 4388 - protein, 841 aa, synthetic construct
  REGION 1..841: note = Variant of DNA polymerase I from Thermus sp. strain 2.9
MHHHHHHGGSGVLPVFEPKGRVLLVDGHHLAYRNFFALKGLTTSLGEPVQGVYGFAKSLLKALKEDGDVVIVVFDAKAPSFRHEAYEAYKAGRAPTPEDFPRQLALMKELVDLLGLERLEVPGFEADDVLATLAKKAEREGYEVQILTADRDLFQLLSPRISVLHPEGHRITPEWLWEKYGLRPEQWVDFRALAGDPSDNIPGVKGIGEKTALKLLKEWGSLENLLKNLDQVKPESVREKILAHLEDLKLSRELSRVRTDLPLEVDFGRRREPDWEGLKAFLERLEFGSLLHEFGLLESPLLAEEAPWPPPEGAFLGYRLSRPEPMWAELLALAASAQGRVYRAEDPHGALRGLFEVRGLLAKDLAVVALREGLDLPPTDDPMLLAYLLDPSNTTPEGVARRYGGEWTEDAAKRALLAERLHANLLGRLQGEERLLWLYEEVEKPLSRVLAHMEATGVKLDVAYLENLSLEVAAHMRRLEEEVFRLAGRSFRLNSRDQLERVLFDELGLPPIGKTEKTGKRSTSAAVLEALREVHPIVDKILQYRELAKLKGTYTDRLPALVHPKTGRLHTHFNQTATATGRLSSSDPNLQNIPVRTPLGQKIRRAFVAEEGWRLVALDYRQIELRVLAHLSGDENLIRVFQEGKDIHTQTASWMFGLSAEAIDPLMRRAAKTINFGVLYGMSAFRLSQELGIPYEEAQAFIQKYFQSYPKVKAWIEKTLREGRTRGYVETLFGRRRYVPDLNARVKGKREAAERMAFNMPVQGTAADLMKLAMVRLFPQLREVGARMLLQVHDELLLEAPKERAEEVAALAKEVMEGVWPLAVPLEVEVGIGEDWLAAKG

SEQ ID NO: 4389 - DNA, 2523 bp, synthetic construct
  misc_feature 1..2523: note = Variant of DNA polymerase I from Thermus sp. strain 2.9
  source 1..2523: mol_type = other DNA
atgcaccatcatcatcatcatggcggtagcggcgtgttaccggtgttcgagcctaaaggtcgcgtgcttctggttgatggccatcatctcgcgctgcgtaacttctttgccctgaaaggattaaccaccagcctgggcgagccggtacagggtgtctacggctttgcaaagtcgctcctgaaagctctgaaagaagacggtgatgtggtgattgttgtctttgatgcgaaagcgccaagttttcgccacgaagcgtacgaagcttacaaagccgggcgtgctccaacgccggaagactttcctcgccaattggcgcttatgaaggaattagtggatttgcttggcctcgaacgcttggaagttcccggtttcgaggcagacgacgtattagcgactctcgcaaagaaagccgaacgtgagggctatgaagtccagatcttgacagcagatcgcgatcttttccagcttttatctccgcgcatctcggtgttacacccggaagggcatcgtatcaccccggaatggctctgggagaaatatggtttgcgtcccgaacaatgggtggattttcgcgccttagcaggcgatccgagcgacaatattccgggagttaaaggtatcggcgagaagacggcgctcaagctccttaaagaatgggggtcgttggagaacttgcttaagaatttagatcaggtcaaaccagagtcagtgcgtgagaagattcttgctcacctcgaagacctcaaattaagccgcgaattgtcccgtgtacgcaccgatttgccgctcgaagttgatttcggtcgccgccgcgaacctgactgggagggtcttaaagcgtttttagagcgtcttgaatttggttcgctcttgcatgaattcggccttttagaaagcccgttactggccgaagaagcaccttggccaccgcccgagggcgcgtttttaggttaccgtttgagtcgcccggaaccgatgtgggccgaattactggctcttgcagcgtctgcccagggacgtgtgtatcgcgcggaagaccctcatggtgcgctccgcggcctcttcgaagtccgtggactccttgccaaagacttagctgttgttgcattgcgcgaaggtcttgatttacctccgactgatgatccaatgcttcttgcgtacctcttggacccgtcaaacacgacgcccgaaggcgtagcccgtcgttacggcggcgagtggaccgaagatgcagcgaaacgcgcgttattggccgaacgtttgcacgccaatttattaggacgtttgcaaggcgaggaacgtctcctctggctttacgaagaagtggagaaaccattgagtcgcgtgctcgcgcatatggaagctaccggtgtcaaattagacgtggcgtatttggagaatctcagccttgaagttgctgcccacatgcgccgcttggaggaagaagtattccgtttagcaggccgttcctttcgccttaactctcgcgatcagttagaacgtgtgttgttcgatgaacttggtctccctcctatcggcaagacagagaagaccggtaaacgtagcacttcagcggcggttttagaagctcttcgcgaagtccatcccattgtggacaagatcttgcagtaccgcgaactcgcgaaattgaaaggcacctatattgaccgtcttccggcattagtccacccgaaaacgggacgcctccatacccgcttcaaccaaacagccacggcgaccggtcgtttgtcctcctctgatccaaaccttcagaatattccagtacgtaccccattgggccagaagatccgccgtgcgtttgtagctgaggagggttggcgtttagtggccctcgattatcgtcaaattgaattacgtgtccttgcccatctttctggcgatgagaacctcatccgcgtgtttcaggaaggcaaagacattcacactcaaacggcaagctggatgtttggattatcagctgaagcgatcgatcctttgatgcgtcgtgcagcgaagaccatcaatttcggtgttctctacggtatgagtgcctttcgtttgtcgcaggaattaggcattccctatgaagaagctcaggcgttcattcagaaatactttcaaagctatcccaaagttaaagcatggatcgagaagactctccgtgaaggccgcacacgtggttacgtagagaccttatttggacgtcgccgctatgttcccgatttaaacgctcgcgtgaaaggcaagcgtgaagccgccgaacgcatggcgttcaacatgcctgtacagggcacggcagctgacctcatgaaacttgcaatggtgcgcctttttccacaattgcgtgaagttggtgcccgcatgctcttgcaggtccacgatgaactcttgttagaagcgccaaaagagcgtgcggaagaggtggcagccctcgcgaaagaagttatggaaggcgtgtggcccttagcggtgcctcttgaagtcgaagttggtattggcgaggattggctggctgccaaagga

SEQ ID NO: 4390 - protein, 841 aa, synthetic construct
  REGION 1..841: note = Variant of DNA polymerase I from Thermus sp. strain 2.9
MHHHHHHGGSGVLPVFEPKGRVLLVDGHHLALRNFFALKGLTTSLGEPVQGVYGFAKSLLKALKEDGDVVIVVFDAKAPSFRHEAYEAYKAGRAPTPEDFPRQLALMKELVDLLGLERLEVPGFEADDVLATLAKKAEREGYEVQILTADRDLFQLLSPRISVLHPEGHRITPEWLWEKYGLRPEQWVDFRALAGDPSDNIPGVKGIGEKTALKLLKEWGSLENLLKNLDQVKPESVREKILAHLEDLKLSRELSRVRTDLPLEVDFGRRREPDWEGLKAFLERLEFGSLLHEFGLLESPLLAEEAPWPPPEGAFLGYRLSRPEPMWAELLALAASAQGRVYRAEDPHGALRGLFEVRGLLAKDLAVVALREGLDLPPTDDPMLLAYLLDPSNTTPEGVARRYGGEWTEDAAKRALLAERLHANLLGRLQGEERLLWLYEEVEKPLSRVLAHMEATGVKLDVAYLENLSLEVAAHMRRLEEEVFRLAGRSFRLNSRDQLERVLFDELGLPPIGKTEKTGKRSTSAAVLEALREVHPIVDKILQYRELAKLKGTYIDRLPALVHPKTGRLHTRFNQTATATGRLSSSDPNLQNIPVRTPLGQKIRRAFVAEEGWRLVALDYRQIELRVLAHLSGDENLIRVFQEGKDIHTQTASWMFGLSAEAIDPLMRRAAKTINFGVLYGMSAFRLSQELGIPYEEAQAFIQKYFQSYPKVKAWIEKTLREGRTRGYVETLFGRRRYVPDLNARVKGKREAAERMAFNMPVQGTAADLMKLAMVRLFPQLREVGARMLLQVHDELLLEAPKERAEEVAALAKEVMEGVWPLAVPLEVEVGIGEDWLAAKG

SEQ ID NO: 4391 - DNA, 2523 bp, synthetic construct
  misc_feature 1..2523: note = Variant of DNA polymerase I from Thermus sp. strain 2.9
  source 1..2523: mol_type = other DNA
atgcaccatcatcatcatcatggcggtagcggcgtgttaccggtgttcgagcctaaaggtcgcgtgcttctggttgatggccatcatctcgcgtatcgtaacttctttgccctgaaaggattaaccaccagcctgggcgagccggtacagggtgtctacggctttgcaaagtcgctcctgaaagctctgaaagaagacggtgatgtggtgattgttgtctttgatgcgaaagcgccaagttttcgccacgaagcgtacgaagcttacaaagccgggcgtgctccaacgccggaagactttcctcgccaattggcgcttatgaaggaattagtggatttgcttggcctcgaacgcttggaagttcccggtttcgaggcagacgacgtattagcgactctcgcaaagaaagccgaacgtgagggctatgaagtccagatcttgacagcagatcgcgatcttttccagcttttatctccgcgcatctcggtgttacacccggaagggcatcgtatcaccccggaatggctctgggagaaatatggtttgcgtcccgaacaatgggtggattttcgcgccttagcaggcgatccgagcgacaatattccgggagttaaaggtatcggcgagaagacggcgctcaagctccttaaagaatgggggtcgttggagaacttgcttaagaatttagatcaggtcaaaccagagtcagtgcgtgagaagattcttgctcacctcgaagacctcaaattaagccgcattttgtcccgtgtacgcaccgatttgccgctcgaagttgatttcggtcgccgccgcgaacctgactgggagggtcttaaagcgtttttagagcgtcttgaatttggttcgctcttgcatgaattcggccttttagaaagcccgttactggccgaagaagcaccttggccaccgcccgagggcgcgtttttaggttaccgtttgagtcgcccggaaccgatgtgggccgaattactggctcttgcagcgtctgcccagggacgtgtgtatcgcgcggaagaccctcatggtgcgctccgcggcctcttcgaagtccgtggactccttgccaaagacttagctgttgttgcattgcgcgaaggtcttgatttacctccgactgatgatccaatgcttcttgcgtacctcttggacccgtcaaacacgacgcccgaaggcgtagcccgtcgttacggcggcgagtggaccgaagatgcagcgaaacgcgcgttattggccgaacgtttgcacgccaatttattaggacgtttgcaaggcgaggaacgtctcctctggctttacgaagaagtggagaaaccattgagtcgcgtgctcgcgcatatggaagctaccggtgtcaaattagacgtggcgtatttggagaatctcagccttgaagttgctgcccacatgcgccgcttggaggaagaagtattccgtttagcaggccgttcctttcgccttaactctcgcgatcagttagaacgtgtgttgttcgatgaacttggtctccctcctatcggcaagacagagaagaccggtaaacgtagcacttcagcggcggttttagaagctcttcgcgaagtccatcccattgtggacaagatcttgcagtaccgcgaactcgcgaaattgaaaggcacctatattgaccgtcttccggcattagtccacccgaaaacgggacgcctccatacccgcttcaaccaaacagccacggcgaccggtcgtttgtcctcctctgatccaaaccttcagaatattccagtacgtaccccattgggccagaagatccgccgtgcgtttgtagctgaggagggttggcgtttagtggccctcgattatcgtcaaattgaattacgtgtccttgcccatctttctggcgatgagaacctcatccgcgtgtttcaggaaggcaaagacattcacactcaaacggcaagctggatgtttggattatcagctgaagcgatcgatcctttgatgcgtcgtgcagcgaagaccatcaatttcggtgttctctacggtatgagtgcctttcgtttgtcgcaggaattaggcattccctatgaagaagctcaggcgttcattcagaaatactttcaaagctatcccaaagttaaagcatggatcgagaagactctccgtgaaggccgcacacgtggttacgtagagaccttatttggacgtcgccgctatgttcccgatttaaacgctcgcgtgaaaggcaagcgtgaagccgccgaacgcatggcgttcaacatgcctgtacagggcacggcagctgacctcatgaaacttgcaatggtgcgcctttttccacaattgcgtgaagttggtgcccgcatgctcttgcaggtccacgatgaactcttgttagaagcgccaaaagagcgtgcggaagaggtggcagccctcgcgaaagaagttatggaaggcgtgtggcccttagcggtgcctcttgaagtcgaagttggtattggcgaggattggctggctgccaaagga

SEQ ID NO: 4392 - protein, 841 aa, synthetic construct
  REGION 1..841: note = Variant of DNA polymerase I from Thermus sp. strain 2.9
MHHHHHHGGSGVLPVFEPKGRVLLVDGHHLAYRNFFALKGLTTSLGEPVQGVYGFAKSLLKALKEDGDVVIVVFDAKAPSFRHEAYEAYKAGRAPTPEDFPRQLALMKELVDLLGLERLEVPGFEADDVLATLAKKAEREGYEVQILTADRDLFQLLSPRISVLHPEGHRITPEWLWEKYGLRPEQWVDFRALAGDPSDNIPGVKGIGEKTALKLLKEWGSLENLLKNLDQVKPESVREKILAHLEDLKLSRILSRVRTDLPLEVDFGRRREPDWEGLKAFLERLEFGSLLHEFGLLESPLLAEEAPWPPPEGAFLGYRLSRPEPMWAELLALAASAQGRVYRAEDPHGALRGLFEVRGLLAKDLAVVALREGLDLPPTDDPMLLAYLLDPSNTTPEGVARRYGGEWTEDAAKRALLAERLHANLLGRLQGEERLLWLYEEVEKPLSRVLAHMEATGVKLDVAYLENLSLEVAAHMRRLEEEVFRLAGRSFRLNSRDQLERVLFDELGLPPIGKTEKTGKRSTSAAVLEALREVHPIVDKILQYRELAKLKGTYIDRLPALVHPKTGRLHTRFNQTATATGRLSSSDPNLQNIPVRTPLGQKIRRAFVAEEGWRLVALDYRQIELRVLAHLSGDENLIRVFQEGKDIHTQTASWMFGLSAEAIDPLMRRAAKTINFGVLYGMSAFRLSQELGIPYEEAQAFIQKYFQSYPKVKAWIEKTLREGRTRGYVETLFGRRRYVPDLNARVKGKREAAERMAFNMPVQGTAADLMKLAMVRLFPQLREVGARMLLQVHDELLLEAPKERAEEVAALAKEVMEGVWPLAVPLEVEVGIGEDWLAAKG

SEQ ID NO: 4393 - DNA, 2523 bp, synthetic construct
  misc_feature 1..2523: note = Variant of DNA polymerase I from Thermus sp. strain 2.9
  source 1..2523: mol_type = other DNA
atgcaccatcatcatcatcatggcggtagcggcgtgttaccggtgttcgagcctaaaggtcgcgtgcttctggttgatggccatcatctcgcgtatcgtaacttctttgccctgaaaggattaaccaccagcctgggcgagccggtacagggtgtctacggctttgcaaagtcgctcctgaaagctctgaaagaagacggtgatgtggtgattgttgtctttgatgcgaaagcgccaagttttcgccacgaagcgtacgaagcttacaaagccgggcgtgctccaacgccggaagactttcctcgccaattggcgcttatgaaggaattagtggatttgcttggcctcgaacgcttggaagttcccggtttcgaggcagacgacgtattagcgactctcgcaaagaaagccgaacgtgagggctatgaagtccagatcttgacagcagatcgcgatcttttccagcttttatctccgcgcatctcggtgttacacccggaagggcatcgtatcaccccggaatggctctgggagaaatatggtttgcgtcccgaacaatgggtggattttcgcgccttagcaggcgatccgagcgacaatattccgggagttaaaggtatcggcgagaagacggcgctcaagctccttaaagaatgggggtcgttggagaacttgcttaagaatttagatcaggtcaaaccagagtcagtgcgtgagaagattcttgctcacctcgaagacctcaaattaagccgcgaattgtcccgtgtacgcaccgatttgccgctcgaagttgatttcggtcgccgccgcgaacctgactgggagggtcttaaagcgtttttagagcgtcttgaatttggttcgctcttgcatgaattcggccttttagaaagcccgttactggccgaagaagcaccttggccaccgcccgagggcgcgtttttaggttaccgtttgagtcgcccggaaccgatgtgggccgaattactggctcttgcagcgtctgcccagggacgtgtgtatcgcgcggaagaccctcatggtgcgctccgcggcctcttcgaagtccgtggactccttgccaaagacttagctgttgttgcattgcgcgaaggtcttgatttacctccgactgatgatccaatgcttcttgcgtacctcttggacccgtcaaacacgacgcccgaaggcgtagcccgtcgttacggcggcgagtggaccgaagatgcagcgaaacgcgcgttattggccgaacgtttgcacgccaatttattaggacgtttgcaaggcgaggaacgtctcctctggctttacgaagaagtggagaaaccattgagtcgcgtgctcgcgcatatggaagctaccggtgtcaaattagacgtggcgtatttggagaatctcagccttgaagttgctgcccacatgcgccgcttggaggaagaagtattccgtttagcaggccgttcctttcgccttaactctcgcgatcagttagaacgtgtgttgttcgatgaacttggtctccctcctatcggcaagacagagaagaccggtaaacgtagcacttcagcggcggttttagaagctcttcgcgaagtccatcccattgtggacaagatcttgcagtaccgcgaactcgcgaaattgaaaggcacctatattgaccgtcttccggcattagtccacccgaaaacgggacgcctccatacccgcttcaaccaaacagccacggcgaccggtcgtttgtcctcctctgatccaaaccttcagaatattccagtacgtaccccattgggccagaagatccgccgtgcgtttgtagctgaggagggttggcgtttagtggccctcgattatcgtcaaattgaattacgtgtccttgcccatctttctggcgatgagaacctcatccgcgtgtttcaggaaggcaaagacattcacactcaaacggcaagctggatgtttggattatcagctgaagcgatcgatcctttgatgcgtcgtgcagcgaagaccatcaatttcggtgttctctacggtatgagtgcctttcgtttgtcgcaggaattatctattccctatgaagaagctcaggcgttcattcagaaatactttcaaagctatcccaaagttaaagcatggatcgagaagactctccgtgaaggccgcacacgtggttacgtagagaccttatttggacgtcgccgctatgttcccgatttaaacgctcgcgtgaaaggcaagcgtgaagccgccgaacgcatggcgttcaacatgcctgtacagggcacgacagctgacctcatgaaacttgcaatggtgcgcctttttccacaattgcgtgaagttggtgcccgcatgctcttgcaggtccacgatgaactcttgttagaagcgccaaaagagcgtgcggaagaggtggcagccctcgcgaaagaagttatggaaggcgtgtggcccttagcggtgcctcttgaagtcgaagttggtattggcgaggattggctggctgccaaagga

SEQ ID NO: 4394 - protein, 841 aa, synthetic construct
  REGION 1..841: note = Variant of DNA polymerase I from Thermus sp. strain 2.9
MHHHHHHGGSGVLPVFEPKGRVLLVDGHHLAYRNFFALKGLTTSLGEPVQGVYGFAKSLLKALKEDGDVVIVVFDAKAPSFRHEAYEAYKAGRAPTPEDFPRQLALMKELVDLLGLERLEVPGFEADDVLATLAKKAEREGYEVQILTADRDLFQLLSPRISVLHPEGHRITPEWLWEKYGLRPEQWVDFRALAGDPSDNIPGVKGIGEKTALKLLKEWGSLENLLKNLDQVKPESVREKILAHLEDLKLSRELSRVRTDLPLEVDFGRRREPDWEGLKAFLERLEFGSLLHEFGLLESPLLAEEAPWPPPEGAFLGYRLSRPEPMWAELLALAASAQGRVYRAEDPHGALRGLFEVRGLLAKDLAVVALREGLDLPPTDDPMLLAYLLDPSNTTPEGVARRYGGEWTEDAAKRALLAERLHANLLGRLQGEERLLWLYEEVEKPLSRVLAHMEATGVKLDVAYLENLSLEVAAHMRRLEEEVFRLAGRSFRLNSRDQLERVLFDELGLPPIGKTEKTGKRSTSAAVLEALREVHPIVDKILQYRELAKLKGTYIDRLPALVHPKTGRLHTRFNQTATATGRLSSSDPNLQNIPVRTPLGQKIRRAFVAEEGWRLVALDYRQIELRVLAHLSGDENLIRVFQEGKDIHTQTASWMFGLSAEAIDPLMRRAAKTINFGVLYGMSAFRLSQELSIPYEEAQAFIQKYFQSYPKVKAWIEKTLREGRTRGYVETLFGRRRYVPDLNARVKGKREAAERMAFNMPVQGTTADLMKLAMVRLFPQLREVGARMLLQVHDELLLEAPKERAEEVAALAKEVMEGVWPLAVPLEVEVGIGEDWLAAKG

SEQ ID NO: 4395 - DNA, 2523 bp, synthetic construct
  misc_feature 1..2523: note = Variant of DNA polymerase I from Thermus sp. strain 2.9
  source 1..2523: mol_type = other DNA
atgcaccatcatcatcatcatggcggtagcggcgtgttaccggtgttcgagcctaaaggtcgcgtgcttctggttgatggccatcatctcgcgtatcgtaacttctttgccctgaaaggattaaccaccagcctgggcgagccggtacagggtgtctacggctttgcaaagtcgctcctgaaagctctgaaagaagacggtgatgtggtgattgttgtctttgatgcgaaagcgccaagttttcgccacgaagcgtacgaagcttacaaagccgggcgtgctccaacgccggaagactttcctcgccaattggcgcttatgaaggaattagtggatttgcttggcctcgaacgcttggaagttcccggtttcgaggcagacgacgtattagcgactctcgcaaagaaagccgaacgtgagggctatgaagtccagatcttgacagcagatcgcgatcttttccagcttttatctccgcgcatctcggtgttacacccggaagggcatcgtatcaccccggaatggctctgggagaaatatggtttgcgtcccgaacaatgggtggattttcgcgccttagcaggcgatccgagcgacaatattccgggagttaaaggtatcggcgagaagacggcgctcaagctccttaaagaatgggggtcgttggagaacttgcttaagaatttagatcaggtcaaaccagagtcagtgcgtgagaagattcttgctcacctcgaagacctcaaattaagccgcgaattgtcccgtgtacgcaccgatttgccgctcgaagttgatttcggtcgccgccgcgaacctgactgggagggtcttaaagcgtttttagagcgtcttgaatttggttcgctcttgcatgaattcggccttttagaaagcccgttactggccgaagaagcaccttggccaccgcccgagggcgcgtttttaggttaccgtttgagtcgcccggaaccgatgtgggccgaattactggctcttgcagcgtctgcccagggacgtgtgtatcgcgcggaagaccctcatggtgcgctccgcggcctcttcgaagtccgtggactccttgccaaagacttagctgttgttgcattgcgcgaaggtcttgatttacctccgactgatgatccaatgcttcttgcgtacctcttggacccgtcaaacacgacgcccgaaggcgtagcccgtcgttacggcggcgagtggaccgaagatgcagcgaaacgcgcgttattggccgaacgtttgcacgccaatttattaggacgtttgcaaggcgaggaacgtctcctctggctttacgaagaagtggagaaaccattgagtcgcgtgctcgcgcatatggaagctaccggtgtcaaattagacgtggcgtatttggagaatctcagccttgaagttgctgcccacatgcgccgcttggaggaagaagtattccgtttagcaggccgttcctttcgccttaactctcgcgatcagttagaacgtgtgttgttcgatgaacttggtctccctcctatcggcaagacagagaagaccggtaaacgtagcacttcagcggcggttttagaagctcttcgcgaagtccatcccattgtggacaagatcttgcagtaccgcgaactcgcgaaattgaaaggcacctatattgaccgtcttccggcattagtccacccgaaaacgggacgcctccatacccgcttcaaccaaacagccacggcgaccggtcgtttgtcctcctctgatccaaaccttcagaatattccagtacgtaccccattgggccagaagatccgccgtgcgtttgtagctgaggagggttggcgtttagtggccctcgattatcgtcaaattgaattacgtgtccttgcccatctttctggcgatgagaacctcatccgcgtgtttcaggaaggcaaagacattcacactcaaacggcaagctggatgtttggattatcagctgaagcgatcgatcctttgatgcgtcgtgcagcgaagaccatcaatttcggtgttctctacggtatgagtgcctttcgtttgtcgcaggaattaggcattccctatgaagaagctcaggcgttcattcagaaatactttcaaagctatcccaaagttaaagcatggatcgagaagactctccgtgaaggccgcacacgtggttgggtagagaccttatttggacgtcgccgctatgttcccgatttaaacgctcgcgtgaaaggcaagcgtgaagccgccgaacgcatggcgttcaacatgcctgtacagggcacggcagctgacctcatgaaacttgcaatggtgcgcctttttccacaattgcgtgaagttggtgcccgcatgctcttgcaggtccacgatgaactcttgttagaagcgccaaaagagcgtgcggaagaggtggcagccctcgcgaaagaagttatggaaggcgtgtggcccttagcggtgcctcttgaagtcgaagttggtattggcgaggattggctggctgccaaagga

SEQ ID NO: 4396 - protein, 841 aa, synthetic construct
  REGION 1..841: note = Variant of DNA polymerase I from Thermus sp. strain 2.9
MHHHHHHGGSGVLPVFEPKGRVLLVDGHHLAYRNFFALKGLTTSLGEPVQGVYGFAKSLLKALKEDGDVVIVVFDAKAPSFRHEAYEAYKAGRAPTPEDFPRQLALMKELVDLLGLERLEVPGFEADDVLATLAKKAEREGYEVQILTADRDLFQLLSPRISVLHPEGHRITPEWLWEKYGLRPEQWVDFRALAGDPSDNIPGVKGIGEKTALKLLKEWGSLENLLKNLDQVKPESVREKILAHLEDLKLSRELSRVRTDLPLEVDFGRRREPDWEGLKAFLERLEFGSLLHEFGLLESPLLAEEAPWPPPEGAFLGYRLSRPEPMWAELLALAASAQGRVYRAEDPHGALRGLFEVRGLLAKDLAVVALREGLDLPPTDDPMLLAYLLDPSNTTPEGVARRYGGEWTEDAAKRALLAERLHANLLGRLQGEERLLWLYEEVEKPLSRVLAHMEATGVKLDVAYLENLSLEVAAHMRRLEEEVFRLAGRSFRLNSRDQLERVLFDELGLPPIGKTEKTGKRSTSAAVLEALREVHPIVDKILQYRELAKLKGTYIDRLPALVHPKTGRLHTRFNQTATATGRLSSSDPNLQNIPVRTPLGQKIRRAFVAEEGWRLVALDYRQIELRVLAHLSGDENLIRVFQEGKDIHTQTASWMFGLSAEAIDPLMRRAAKTINFGVLYGMSAFRLSQELGIPYEEAQAFIQKYFQSYPKVKAWIEKTLREGRTRGWVETLFGRRRYVPDLNARVKGKREAAERMAFNMPVQGTAADLMKLAMVRLFPQLREVGARMLLQVHDELLLEAPKERAEEVAALAKEVMEGVWPLAVPLEVEVGIGEDWLAAKG

SEQ ID NO: 4397 - DNA, 2523 bp, synthetic construct
  misc_feature 1..2523: note = Variant of DNA polymerase I from Thermus sp. strain 2.9
  source 1..2523: mol_type = other DNA
atgcaccatcatcatcatcatggcggtagcggcgtgttaccggtgttcgagcctaaaggtcgcgtgcttctggttgatggccatcatctcgcgtatcgtaacttctttgccctgaaaggattaaccaccagcctgggcgagccggtacagggtgtctacggctttgcaaagtcgctcctgaaagctctgaaagaagacggtgatgtggtgattgttgtctttgatgcgaaagcgccaagttttcgccacgaagcgtacgaagcttacaaagccgggcgtgctccaacgccggaagactttcctcgccaattggcgcttatgaaggaattagtggatttgcttggcctcgaacgcttggaagttcccggtttcgaggcagacgacgtattagcgactctcgcaaagaaagccgaacgtgagggctatgaagtccagatcttgacagcagatcgcgatcttttccagcttttatctccgcgcatctcggtgttacacccggaagggcatcgtatcaccccggaatggctctgggagaaatatggtttgcgtcccgaacaatgggtggattttcgcgccttagcaggcgatccgagcgacaatattccgggagttaaaggtatcggcgagaagacggcgctcaagctccttaaagaatgggggtcgttggagaacttgcttaagaatttagatcaggtcaaaccagagtcagtgcgtgagaagattcttgctcacctcgaagacctcaaattaagccgcgaattgtcccgtgtacgcaccgatttgccgctcgaagttgatttcggtcgccgccgcgaacctgactgggagggtcttaaagcgtttttagagcgtcttgaatttggttcgctcttgcatgaattcggccttttagaaagcccgttactggccgaagaagcaccttggccaccgcccgagggcgcgtttttaggttaccgtttgagtcgcccggaaccgatgtgggccgaattactggctcttgcagcgtctgcccagggacgtgtgtatcgcgcggaagaccctcatggtgcgctccgcggcctcttcgaagtccgtggactccttgccaaagacttagctgttgttgcattgcgcgaaggtcttgatttacctccgactgatgatccaatgcttcttgcgtacctcttggacccgtcaaacacgacgcccgaaggcgtagcccgtcgttacggcggcgagtggaccgaagatgcagcgaaacgcgcgttattggccgaacgtttggcggccaatttattaggacgtttgcaaggcgaggaacgtctcctctggctttacgaagaagtggagaaaccattgagtcgcgtgctcgcgcatatggaagctaccggtgtcaaattagacgtggcgtatttggagaatctcagccttgaagttgctgcccacatgcgccgcttggaggaagaagtattccgtttagcaggccgttcctttcgccttaactctcgcgatcagttagaacgtgtgttgttcgatgaacttggtctccctcctatcggcaagacagagaagaccggtaaacgtagcacttcagcggcggttttagaagctcttcgcgaagtccatcccattgtggacaagatcttgcagtaccgcgaactcgcgaaattgaaaggcacctatattgaccgtcttccggcattagtccacccgaaaacgggacgcctccatacccgcttcaaccaaacagccacggcgaccggtcgtttgtcctcctctgatccaaaccttcagaatattccagtacgtaccccattgggccagaagatccgccgtgcgtttgtagctgaggagggttggcgtttagtggccctcgattatcgtcaaattgaattacgtgtccttgcccatctttctggcgatgagaacctcatccgcgtgtttcaggaaggcaaagacattcacactcaaacggcaagctggatgtttggattatcagctgaagcgatcgatcctttgatgcgtcgtgcagcgaagaccatcaatttcggtgttctctacggtatgagtgcctttcgtttgtcgcaggaattaggcattccctatgaagaagctcaggcgttcattcagaaatactttcaaagctatcccaaagttaaagcatggatcgagaagactctccgtgaaggccgcacacgtggttacgtagagaccttatttggacgtcgccgctatgttcccgatttaaacgctcgcgtgaaaggcaagcgtgaagccgccgaacgcatggcgttcaacatgcctgtacagggcacggcagctgacctcatgaaacttgcaatggtgcgcctttttccacaattgcgtgaagttggtgcccgcatgctcttgcaggtccacgatgaactcttgttagaagcgccaaaagagcgtgcggaagaggtggcagccctcgcgaaagaagttatggaaggcgtgtggcccttagcggtgcctcttgaagtcgaagttggtattggcgaggattggctggctgccaaagga

SEQ ID NO: 4398 - protein, 841 aa, synthetic construct
  REGION 1..841: note = Variant of DNA polymerase I from Thermus sp. strain 2.9
MHHHHHHGGSGVLPVFEPKGRVLLVDGHHLAYRNFFALKGLTTSLGEPVQGVYGFAKSLLKALKEDGDVVIVVFDAKAPSFRHEAYEAYKAGRAPTPEDFPRQLALMKELVDLLGLERLEVPGFEADDVLATLAKKAEREGYEVQILTADRDLFQLLSPRISVLHPEGHRITPEWLWEKYGLRPEQWVDFRALAGDPSDNIPGVKGIGEKTALKLLKEWGSLENLLKNLDQVKPESVREKILAHLEDLKLSRELSRVRTDLPLEVDFGRRREPDWEGLKAFLERLEFGSLLHEFGLLESPLLAEEAPWPPPEGAFLGYRLSRPEPMWAELLALAASAQGRVYRAEDPHGALRGLFEVRGLLAKDLAVVALREGLDLPPTDDPMLLAYLLDPSNTTPEGVARRYGGEWTEDAAKRALLAERLAANLLGRLQGEERLLWLYEEVEKPLSRVLAHMEATGVKLDVAYLENLSLEVAAHMRRLEEEVFRLAGRSFRLNSRDQLERVLFDELGLPPIGKTEKTGKRSTSAAVLEALREVHPIVDKILQYRELAKLKGTYIDRLPALVHPKTGRLHTRFNQTATATGRLSSSDPNLQNIPVRTPLGQKIRRAFVAEEGWRLVALDYRQIELRVLAHLSGDENLIRVFQEGKDIHTQTASWMFGLSAEAIDPLMRRAAKTINFGVLYGMSAFRLSQELGIPYEEAQAFIQKYFQSYPKVKAWIEKTLREGRTRGYVETLFGRRRYVPDLNARVKGKREAAERMAFNMPVQGTAADLMKLAMVRLFPQLREVGARMLLQVHDELLLEAPKERAEEVAALAKEVMEGVWPLAVPLEVEVGIGEDWLAAKG

SEQ ID NO: 4399 - DNA, 2523 bp, synthetic construct
  misc_feature 1..2523: note = Variant of DNA polymerase I from Thermus sp. strain 2.9
  source 1..2523: mol_type = other DNA
atgcaccatcatcatcatcatggcggtagcggcgtgttaccggtgttcgagcctaaaggtcgcgtgcttctggttgatggccatcatctcgcgtatcgtaacttctttgccctgaaaggattaaccaccagcctgggcgagccggtacagggtgtctacggctttgcaaagtcgctcctgaaagctctgaaagaagacggtgatgtggtgattgttgtctttgatgcgaaagcgccaagttttcgccacgaagcgtacgaagcttacaaagccgggcgtgctccaacgccggaagactttcctcgccaattggcgcttatgaaggaattagtggatttgcttggcctcgaacgcttggaagttcccggtttcgaggcagacgacgtattagcgactctcgcaaagaaagccgaacgtgagggctatgaagtccagatcttgacagcagatcgcgatcttttccagcttttatctccgcgcatctcggtgttacacccggaagggcatcgtatcaccccggaatggctctgggagaaatatggtttgcgtcccgaacaatgggtggattttcgcgccttagcaggcgatccgagcgacaatattccgggagttaaaggtatcggcgagaagacggcgctcaagctccttaaagaatgggggtcgttggagaacttgcttaagaatttagatcaggtcaaaccagagtcagtgcgtgagaagattcttgctcacctcgaagacctcaaattaagccgcgaattgtcccgtgtacgcaccgatttgccgctcgaagttgatttcggtcgccgccgcgaacctgactgggagggtcttaaagcgtttttagagcgtcttgaatttggttcgctcttgcatgaattcggccttttagaaagcccgttactggccgaagaagcaccttggccaccgcccgagggcgcgtttttaggttaccgtttgagtcgcccggaaccgatgtgggccgaattactggctcttgcagcgtctgcccagggacgtgtgtatcgcgcggaagaccctcatggtgcgctccgcggcctcttcgaagtccgtggactctgggccaaagacttagctgttgttgcattgcgcgaaggtcttgatttacctccgactgatgatccaatgcttcttgcgtacctcttggacccgtcaaacacgacgcccgaaggcgtagcccgtcgttacggcggcgagtggaccgaagatgcagcgaaacgcgcgttattggccgaacgtttgcacgccaatttattaggacgtttgcaaggcgaggaacgtctcctctggctttacgaagaagtggagaaaccattgagtcgcgtgctcgcgcatatggaagctaccggtgtcaaattagacgtggcgtatttggagaatctcagccttgaagttgctgcccacatgcgccgcttggaggaagaagtattccgtttagcaggccgttcctttcgccttaactctcgcgatcagttagaacgtgtgttgttcgatgaacttggtctccctcctatcggcaagacagagaagaccggtaaacgtagcacttcagcggcggttttagaagctcttcgcgaagtccatcccattgtggacaagatcttgcagtaccgcgaactcgcgaaattgaaaggcacctatattgaccgtcttccggcattagtccacccgaaaacgggacgcctccatacccgcttcaaccaaacagccacggcgaccggtcgtttgtcctcctctgatccaaaccttcagaatattccagtacgtaccccattgggccagaagatccgccgtgcgtttgtagctgaggagggttggcgtttagtggccctcgattatcgtcaaattgaattacgtgtccttgcccatctttctggcgatgagaacctcatccgcgtgtttcaggaaggcaaagacattcacactcaaacggcaagctggatgtttggattatcagctgaagcgatcgatcctttgatgcgtcgtgcagcgaagaccatcaatttcggtgttctctacggtatgagtgcctttcgtttgtcgcaggaattaggcattccctatgaagaagctcaggcgttcattcagaaatactttcaaagctatcccaaagttaaagcatggatcgagaagactctccgtgaaggccgcacacgtggttacgtagagaccttatttggacgtcgccgctatgttcccgatttaaacgctcgcgtgaaaggcaagcgtgaagccgccgaacgcatggcgttcaacatgcctgtacagggcacggcagctgacctcatgaaacttgcaatggtgcgcctttttccacaattgcgtgaagttggtgcccgcatgctcttgcaggtccacgatgaactcttgttagaagcgccaaaagagcgtgcggaagaggtggcagccctcgcgaaagaagttatggaaggcgtgtggcccttagcggtgcctcttgaagtcgaagttggtattggcgaggattggctggctgccaaagga

SEQ ID NO: 4400 - protein, 841 aa, synthetic construct
  REGION 1..841: note = Variant of DNA polymerase I from Thermus sp. strain 2.9
MHHHHHHGGSGVLPVFEPKGRVLLVDGHHLAYRNFFALKGLTTSLGEPVQGVYGFAKSLLKALKEDGDVVIVVFDAKAPSFRHEAYEAYKAGRAPTPEDFPRQLALMKELVDLLGLERLEVPGFEADDVLATLAKKAEREGYEVQILTADRDLFQLLSPRISVLHPEGHRITPEWLWEKYGLRPEQWVDFRALAGDPSDNIPGVKGIGEKTALKLLKEWGSLENLLKNLDQVKPESVREKILAHLEDLKLSRELSRVRTDLPLEVDFGRRREPDWEGLKAFLERLEFGSLLHEFGLLESPLLAEEAPWPPPEGAFLGYRLSRPEPMWAELLALAASAQGRVYRAEDPHGALRGLFEVRGLWAKDLAVVALREGLDLPPTDDPMLLAYLLDPSNTTPEGVARRYGGEWTEDAAKRALLAERLHANLLGRLQGEERLLWLYEEVEKPLSRVLAHMEATGVKLDVAYLENLSLEVAAHMRRLEEEVFRLAGRSFRLNSRDQLERVLFDELGLPPIGKTEKTGKRSTSAAVLEALREVHPIVDKILQYRELAKLKGTYIDRLPALVHPKTGRLHTRFNQTATATGRLSSSDPNLQNIPVRTPLGQKIRRAFVAEEGWRLVALDYRQIELRVLAHLSGDENLIRVFQEGKDIHTQTASWMFGLSAEAIDPLMRRAAKTINFGVLYGMSAFRLSQELGIPYEEAQAFIQKYFQSYPKVKAWIEKTLREGRTRGYVETLFGRRRYVPDLNARVKGKREAAERMAFNMPVQGTAADLMKLAMVRLFPQLREVGARMLLQVHDELLLEAPKERAEEVAALAKEVMEGVWPLAVPLEVEVGIGEDWLAAKG

SEQ ID NO: 4401 - DNA, 2523 bp, synthetic construct
  misc_feature 1..2523: note = Variant of DNA polymerase I from Thermus sp. strain 2.9
  source 1..2523: mol_type = other DNA
atgcaccatcatcatcatcatggcggtagcggcgtgttaccggtgttcgagcataaaggtcgcgtgcttctggttgatggccatcatctcgcgtatcgtaacttctttgccctgaaaggattaaccaccagcctgggcgagccggtacagggtgtctacggctttgcaaagtcgctcctgaaagctctgaaagaagacggtgatgtggtgattgttgtctttgatgcgaaagcgccaagttttcgccacgaagcgtacgaagcttacaaagccgggcgtgctccaacgccggaagactttcctcgccaattggcgcttatgaaggaattagtggatttgcttggcctcgaacgcttggaagttcccggtttcgaggcagacgacgtattagcgactctcgcaaagaaagccgaacgtgagggctatgaagtccagatcttgacagcagatcgcgatcttttccagcttttatctccgcgcatctcggtgttacacccggaagggcatcgtatcaccccggaatggctctgggagaaatatggtttgcgtcccgaacaatgggtggattttcgcgccttagcaggcgatccgagcgacaatattccgggagttaaaggtatcggcgagaagacggcgctcaagctccttaaagaatgggggtcgttggagaacttgcttaagaatttagatcaggtcaaaccagagtcagtgcgtgagaagattcttgctcacctcgaagacctcaaattaagccgcgaattgtcccgtgtacgcaccgatttgccgctcgaagttgatttcggtcgccgccgcgaacctgactgggagggtcttaaagcgtttttagagcgtcttgaatttggttcgctccagcatgaattcggccttttagaaagcccgttactggccgaagaagcaccttggccaccgcccgagggcgcgtttttaggttaccgtttgagtcgcccggaaccgatgtgggccgaattactggctcttgcagcgtctgcccagggacgtgtgtatcgcgcggaagaccctcatggtgcgctccgcggcctcttcgaagtccgtggactccttgccaaagacttagctgttgttgcattgcgcgaaggtcttgatttacctccgactgatgatccaatgcttcttgcgtacctcttggacccgtcaaacacgacgcccgaaggcgtagcccgtcgttacggcggcgagtggaccgaagatgcagcgaaacgcgcgttattggccgaacgtttgcacgcaaatttattaggacgtttgcaaggcgaggaacgtctcctctggctttacgaagaagtggagaaaccattgagtcgcgtgctcgcgcatatggaagctaccggtgtcaaattagacgtggcgtatttggagaatctcagccttgaagttgctgcccacatgcgccgcttggaggaagaagtattccgtttagcaggccgttcctttcgccttaactctcgcgatcagttagaacgtgtgttgttcgatgaacttggtctccctcctatcggcaagacagagaagaccggtaaacgtagcacttcagcagcggttttagaggctcttcgcgaagtccatcccattgtggacaagatcttgcagtaccgcgaactcgcgaaattgaaaggcacctatattgaccgtcttccggcattagtccacccgaaaacgggacgcctccatacccgcttcaaccaaacagccacggcgaccggtcgtttgtcctcctctgatccaaaccttcagaatattccagtacgtaccccattgggccagaagatccgccgtgcgtttgtagctgaggagggttggcgtttagtggccctcgattatcgtcaaattgaattacgtgtccttgcccatctttctggcgatgagaacctcatccgcgtgtttcaggaaggcaaagacattcacactcaaacggcaagctggatgtttggattaagtgctgaagcgatcgatcctttgatgcgtcgtgcagcgaagaccatcaatttcggtgttctctacggtatgagtgcctttcgtttgtcgcaggaattaggcattcccaaggaagaagctcaggcgttcattcagaaatactttcaaagctatcccaaagttaaagcatggatcgagaagactctccgtgaaggccgcacacgtggttacgtagagaccttatttggacgtcgccgctatgttcccgatttaaacgctcgcgtgaaaggcaagcgtgaagccgccgaacgcatggcgttcaacatgcctgtacagggcacggcagctgacctcatgaaacttgcaatggtgcgcctttttccacaattgcgtgaagttggtgcccgcatgctcttgcaggtccacgatgaactcttgttagaagcgccaaaagagcgtgcggaagaggtggcagccctcgcgaaagaagttatggaaggcgtgtggcccttagcggtgcctcttgaagtcgaagttggtattggcgaggattggctggctgccaaagga

SEQ ID NO: 4402 - protein, 841 aa, synthetic construct
  REGION 1..841: note = Variant of DNA polymerase I from Thermus sp. strain 2.9
MHHHHHHGGSGVLPVFEHKGRVLLVDGHHLAYRNFFALKGLTTSLGEPVQGVYGFAKSLLKALKEDGDVVIVVFDAKAPSFRHEAYEAYKAGRAPTPEDFPRQLALMKELVDLLGLERLEVPGFEADDVLATLAKKAEREGYEVQILTADRDLFQLLSPRISVLHPEGHRITPEWLWEKYGLRPEQWVDFRALAGDPSDNIPGVKGIGEKTALKLLKEWGSLENLLKNLDQVKPESVREKILAHLEDLKLSRELSRVRTDLPLEVDFGRRREPDWEGLKAFLERLEFGSLQHEFGLLESPLLAEEAPWPPPEGAFLGYRLSRPEPMWAELLALAASAQGRVYRAEDPHGALRGLFEVRGLLAKDLAVVALREGLDLPPTDDPMLLAYLLDPSNTTPEGVARRYGGEWTEDAAKRALLAERLHANLLGRLQGEERLLWLYEEVEKPLSRVLAHMEATGVKLDVAYLENLSLEVAAHMRRLEEEVFRLAGRSFRLNSRDQLERVLFDELGLPPIGKTEKTGKRSTSAAVLEALREVHPIVDKILQYRELAKLKGTYIDRLPALVHPKTGRLHTRFNQTATATGRLSSSDPNLQNIPVRTPLGQKIRRAFVAEEGWRLVALDYRQIELRVLAHLSGDENLIRVFQEGKDIHTQTASWMFGLSAEAIDPLMRRAAKTINFGVLYGMSAFRLSQELGIPKEEAQAFIQKYFQSYPKVKAWIEKTLREGRTRGYVETLFGRRRYVPDLNARVKGKREAAERMAFNMPVQGTAADLMKLAMVRLFPQLREVGARMLLQVHDELLLEAPKERAEEVAALAKEVMEGVWPLAVPLEVEVGIGEDWLAAKG

SEQ ID NO: 4403 - DNA, 2523 bp, synthetic construct
  misc_feature 1..2523: note = Variant of DNA polymerase I from Thermus sp. strain 2.9
  source 1..2523: mol_type = other DNA
atgcaccatcatcatcatcatggcggtagcggcgtgttaccggtgttcgagcctaaaggtcgcgtgcttctggttgatggccatcatctcgcgtatcgtaacttctttgccctgaaaggattaaccaccagcctgggcgagccggtacagggtgtctacggctttgcaaagtcgctcctgaaagctctgaaagaagacggtgatgtggtgattgttgtctttgatgcgaaagcgccaagttttcgccacgaagcgtacgaagcttacaaagccgggcgtgctccaacgccggaagactttcctcgccaattggcgcttatgaaggaattagtggatttgcttggcctcgaacgcttggaagttcccggtttcgaggcagacgacgtattagcgactctcgcaaagaaagccgaacgtgagggctatgaagtccagatcttgacagcagatcgcgatcttttccagcttttatctccgcgcatctcggtgttacacccggaagggcatcgtatcaccccggaatggctctgggagaaatatggtttgcgtcccgaacaatgggtggattttcgcgccttagcaggcgatccgagcgacaatattccgggagttaaaggtatcggcgagaagacggcgctcaagctccttaaagaatgggggtcgttggagaacttgcttaagaatttagatcaggtcaaaccagagtcagtgcgtgagaagattcttgctcacctcgaagacctcaaattaagccgcgaattgtcccgtgtacgcaccgatttgccgctcgaagttgatttcggtcgccgccgcgaacctgactgggagggtcttaaagcgtttttagagcgtcttgaatttggttcgctcttgcatgaattcggccttttagaaagcccgttactggccgaagaagcaccttggccaccgcccgagggcgcgtttttaggttaccgtttgagtcgcccggaaccgatgtgggccgaattactggctcttgcagcgtctgcccagggacgtgtgtatcgcgcggaagaccctcatggtgcgctccgcggcctcttcgaagtccgtggactccttgccaaagacttagctgttgttgcattgcgcgaaggtcttgatttacctccgactgatgatccaatgcttcttgcgtacctcttggacccgtcaaacacgacgcccgaaggcgtagcccgtcgttacggcggcgagtggaccgaagatgcagcgaaacgcgcgttattggccgaacgtttgcacgccaatttattaggacgtttgcaaggcgaggaacgtctcctctggctttacgaagaagtggagaaaccattgagtcgcgtgctcgcgcatatggaagctaccggtgtcaaattagaccaggcgtatttggagaatctcagccttgaagttgctgcccacatgcgccgcttggaggaagaagtattccgtttagcaggccgttcctttcgccttaactctcgcgatcagttagaacgtgtgttgttcgatgaacttggtctccctcctatcggcaagacagagaagaccggtaaacgtagcacttcagcggcggttttagaagctcttcgcgaagtccatcccattgtggacaagatcttgcagtaccgcgaactcgcgaaattgaaaggcacctatattgaccgtcttccggcattagtccacccgaaaacgggacgcctccatacccgcttcaaccaaacagccacggcgaccggtcgtttgtcctcctctgatccaaaccttcagaatattccagtacgtaccccattgggccagaagatccgccgtgcgtttgtagctgaggagggttggcgtttagtggccctcgattatcgtcaaattgaattacgtgtccttgcccatctttctggcgatgagaacctcatccgcgtgtttcaggaaggcaaagacattcacactcaaacggcaagctggatgtttggattatcagctgaagcgatcgatcctttgatgcgtcgtgcagcgaagaccatcaatttcggtgttctctacggtatgagtgcctttcgtttgtcgcaggaattaggcattccctatgaagaagctcaggcgttcattcagaaatactttcaaagctatcccaaagttaaagcatggatcgagaagactctccgtgaaggccgcacacgtggttacgtagagaccttatttggacgtcgccgctatgttcccgatttaaacgctcgcgtgaaaggcaagcgtgaagccgccgaacgcatggcgttcaacatgcctgtacagggcacggcagctgacctcatgaaacttgcaatggtgcgcctttttccacaattgcgtgaagttggtgcccgcatgctcttgcaggtccacgatgaactcttgttagaagcgccaaaagagcgtgcggaagaggtggcagccctcgcgaaagaagttatggaaggcgtgtggcccttagcggtgcctcttgaagtcgaagttggtattggcgaggattggctggctgccaaagga

SEQ ID NO: 4404 - protein, 841 aa, synthetic construct
  REGION 1..841: note = Variant of DNA polymerase I from Thermus sp. strain 2.9
MHHHHHHGGSGVLPVFEPKGRVLLVDGHHLAYRNFFALKGLTTSLGEPVQGVYGFAKSLLKALKEDGDVVIVVFDAKAPSFRHEAYEAYKAGRAPTPEDFPRQLALMKELVDLLGLERLEVPGFEADDVLATLAKKAEREGYEVQILTADRDLFQLLSPRISVLHPEGHRITPEWLWEKYGLRPEQWVDFRALAGDPSDNIPGVKGIGEKTALKLLKEWGSLENLLKNLDQVKPESVREKILAHLEDLKLSRELSRVRTDLPLEVDFGRRREPDWEGLKAFLERLEFGSLLHEFGLLESPLLAEEAPWPPPEGAFLGYRLSRPEPMWAELLALAASAQGRVYRAEDPHGALRGLFEVRGLLAKDLAVVALREGLDLPPTDDPMLLAYLLDPSNTTPEGVARRYGGEWTEDAAKRALLAERLHANLLGRLQGEERLLWLYEEVEKPLSRVLAHMEATGVKLDQAYLENLSLEVAAHMRRLEEEVFRLAGRSFRLNSRDQLERVLFDELGLPPIGKTEKTGKRSTSAAVLEALREVHPIVDKILQYRELAKLKGTYIDRLPALVHPKTGRLHTRFNQTATATGRLSSSDPNLQNIPVRTPLGQKIRRAFVAEEGWRLVALDYRQIELRVLAHLSGDENLIRVFQEGKDIHTQTASWMFGLSAEAIDPLMRRAAKTINFGVLYGMSAFRLSQELGIPYEEAQAFIQKYFQSYPKVKAWIEKTLREGRTRGYVETLFGRRRYVPDLNARVKGKREAAERMAFNMPVQGTAADLMKLAMVRLFPQLREVGARMLLQVHDELLLEAPKERAEEVAALAKEVMEGVWPLAVPLEVEVGIGEDWLAAKG

SEQ ID NO: 4405 - DNA, 2523 bp, synthetic construct
  misc_feature 1..2523: note = Variant of DNA polymerase I from Thermus sp. strain 2.9
  source 1..2523: mol_type = other DNA
atgcaccatcatcatcatcatggcggtagcggcgtgttaccggtgttcgagcctaaaggtcgcgtgcttctggttgatggccatcatctcgcgtatcgtaacttctttgccctgaaaggattaaccaccagcctgggcgagccggtacagggtgtctacggctttgcaaagtcgctcctgaaagctctgaaagaagacggtgatgtggtgattgttgtctttgatgcgaaagcgccaagttttcgccacgaagcgtacgaagcttacaaagccgggcgtgctccaacgccggaagactttcctcgccaattggcgcttatgaaggaattagtggatttgcttggcctcgaacgcttggaagttcccggtttcgaggcagacgacgtattagcgactctcgcaaagaaagccgaacgtgagggctatgaagtccagatcttgacagcagatcgcgatcttttccagcttttatctccgcgcatctcggtgttacacccggaagggcatcgtatcaccccggaatggctctgggagaaatatggtttgcgtcccgaacaatgggtggattttcgcgccttagcaggcgatccgagcgacaatattccgggagttaaaggtatcggcgagaagacggcgctcaagctccttaaagaatgggggtcgttggagaacttgcttaagaatttagatcaggtcaaaccagagtcagtgcgtgagaagattcttgctcacctcgaagacctcaaattaagccgcgaattgtcccgtgtacgcaccgatttgccgctcgaagttgatttcggtcgccgccgcgaacctgactgggagggtcttaaagcgtttttagagcgtcttgaatttggttcgctcttgcatgaattcggccttttagaaagcccgttactggccgaagaagcaccttggccaccgcccgagggcgcgtttttaggttaccgtttgagtcgcccggaaccgatgtgggccgaattactggctcttgcagcgtctgcccagggacgtgtgtatcgcgcggaagaccctcatggtgcgctccgcggcctcttcgaagtccgtggactccttgccaaagacttagctgttgttgcattgcgcgaaggtcttgatttacctccgactgatgatccaatgcttcttgcgtacctcttggacccgtcaaacacgacgcccgaaggcgtagcccgtcgttacggcggcgagtggaccgaagatgcagcgaaacgcgcgttattggccgaacgtttgcacgccaatttattaggacgtttgcaaggcgaggaacgtctcctctggctttacgaagaagtggagaaaccattgagtcgcgtgctcgcgcatatggaagctaccggtgtcaaattagacgtggcgtatttggagaatgcgagccttgaagttgctgcccacatgcgccgcttggaggaagaagtattccgtttagcaggccgttcctttcgccttaactctcgcgatcagttagaacgtgtgttgttcgatgaacttggtctccctcctatcggcaagacagagaagaccggtaaacgtagcacttcagcggcggttttagaagctcttcgcgaagtccatcccattgtggacaagatcttgcagtaccgcgaactcgcgaaattgaaaggcacctatattgaccgtcttccggcattagtccacccgaaaacgggacgcctccatacccgcttcaaccaaacagccacggcgaccggtcgtttgtcctcctctgatccaaaccttcagaatattccagtacgtaccccattgggccagaagatccgccgtgcgtttgtagctgaggagggttggcgtttagtggccctcgattatcgtcaaattgaattacgtgtccttgcccatctttctggcgatgagaacctcatccgcgtgtttcaggaaggcaaagacattcacactcaaacggcaagctggatgtttggattatcagctgaagcgatcgatcctttgatgcgtcgtgcagcgaagaccatcaatttcggtgttctctacggtatgagtgcctttcgtttgtcgcaggaattaggcattccctatgaagaagctcaggcgttcattcagaaatactttcaaagctatcccaaagttaaagcatggatcgagaagactctccgtgaaggccgcacacgtggttacgtagagaccttatttggacgtcgccgctatgttcccgatttaaacgctcgcgtgaaaggcaagcgtgaagccgccgaacgcatggcgttcaacatgcctgtacagggcacggcagctgacctcatgaaacttgcaatggtgcgcctttttccacaattgcgtgaagttggtgcccgcatgctcttgcaggtccacgatgaactcttgttagaagcgccaaaagagcgtgcggaagaggtggcagccctcgcgaaagaagttatggaaggcgtgtggcccttagcggtgcctcttgaagtcgaagttggtattggcgaggattggctggctgccaaagga

SEQ ID NO: 4406 - protein, 841 aa, synthetic construct
  REGION 1..841: note = Variant of DNA polymerase I from Thermus sp. strain 2.9
MHHHHHHGGSGVLPVFEPKGRVLLVDGHHLAYRNFFALKGLTTSLGEPVQGVYGFAKSLLKALKEDGDVVIVVFDAKAPSFRHEAYEAYKAGRAPTPEDFPRQLALMKELVDLLGLERLEVPGFEADDVLATLAKKAEREGYEVQILTADRDLFQLLSPRISVLHPEGHRITPEWLWEKYGLRPEQWVDFRALAGDPSDNIPGVKGIGEKTALKLLKEWGSLENLLKNLDQVKPESVREKILAHLEDLKLSRELSRVRTDLPLEVDFGRRREPDWEGLKAFLERLEFGSLLHEFGLLESPLLAEEAPWPPPEGAFLGYRLSRPEPMWAELLALAASAQGRVYRAEDPHGALRGLFEVRGLLAKDLAVVALREGLDLPPTDDPMLLAYLLDPSNTTPEGVARRYGGEWTEDAAKRALLAERLHANLLGRLQGEERLLWLYEEVEKPLSRVLAHMEATGVKLDVAYLENASLEVAAHMRRLEEEVFRLAGRSFRLNSRDQLERVLFDELGLPPIGKTEKTGKRSTSAAVLEALREVHPIVDKILQYRELAKLKGTYIDRLPALVHPKTGRLHTRFNQTATATGRLSSSDPNLQNIPVRTPLGQKIRRAFVAEEGWRLVALDYRQIELRVLAHLSGDENLIRVFQEGKDIHTQTASWMFGLSAEAIDPLMRRAAKTINFGVLYGMSAFRLSQELGIPYEEAQAFIQKYFQSYPKVKAWIEKTLREGRTRGYVETLFGRRRYVPDLNARVKGKREAAERMAFNMPVQGTAADLMKLAMVRLFPQLREVGARMLLQVHDELLLEAPKERAEEVAALAKEVMEGVWPLAVPLEVEVGIGEDWLAAKG

SEQ ID NO: 4407 - DNA, 2523 bp, synthetic construct
  misc_feature 1..2523: note = Variant of DNA polymerase I from Thermus sp. strain 2.9
  source 1..2523: mol_type = other DNA
atgcaccatcatcatcatcatggcggtagcggcgtgttaccggtgttcgagcctaaaggtcgcgtgcttctggttgatggccatcatctcgcgtatcgtaacttctttgccctgaaaggattaaccaccagcctgggcgagccggtacagggtgtctacggctttgcaaagtcgctcctgaaagctctgaaagaagacggtgatgtggtgattgttgtctttgatgcgaaagcgccaagttttcgccacgaagcgtacgaagcttacaaagccgggcgtgctccaacgccggaagactttcctcgccaattggcgcttatgaaggaattagtggatttgcttggcctcgaacgcttggaagttcccggtttcgaggcagacgacgtattagcgactctcgcaaagaaagccgaacgtgagggctatgaagtccagatcttgacagcagatcgcgatcttttccagcttttatctccgcgcatctcggtgttacacccggaagggcatcgtatcaccccggaatggctctgggagaaatatggtttgcgtcccgaacaatgggtggattttcgcgccttagcaggcgatccgagcgacaatattccgggagttaaaggtatcggcgagaagacggcgctcaagctccttaaagaatgggggtcgttggagaacttgcttaagaatttagatcaggtcaaaccagagtcagtgcgtgagaagattcttgctcacctcgaagacctcaaattaagccgcgaattgtcccgtgtacgcaccgatttgccgctcgaagttgatttcggtcgccgccgcgaacctgactgggagggtcttaaagcgtttttagagcgtcttgaatttggttcgctcttgcatgaattcggccttttagaaagcccgttactggccgaagaagcaccttggccaccgcccgagggcgcgtttttaggttaccgtttgagtcgcccggaaccgatgtgggccgaagttctggctcttgcagcgtctgcccagggacgtgtgtatcgcgcggaagaccctcatggtgcgctccgcggcctcttcgaagtccgtggactccttgccaaagacttagctgttgttgcattgcgcgaaggtcttgatttacctccgactgatgatccaatgcttcttgcgtacctcttggacccgtcaaacacgacgcccgaaggcgtagcccgtcgttacggcggcgagtggaccgaagatgcagcgaaacgcgcgttattggccgaacgtttgcacgccaatttattaggacgtttgcaaggcgaggaacgtctcctctggctttacgaagaagtggagaaaccattgagtcgcgtgctcgcgcatatggaagctaccggtgtcaaattagacgtggcgtatttggagaatctcagccttgaagttgctgcccacatgcgccgcttggaggaagaagtattccgtttagcaggccgttcctttcgccttaactctcgcgatcagttagaacgtgtgttgttcgatgaacttggtctccctcctatcggcaagacagagaagaccggtaaacgtagcacttcagcggcggttttagaagctcttcgcgaagtccatcccattgtggacaagatcttgcagtaccgcgaactcgcgaaattgaaaggcacctatattgaccgtcttccggcattagtccacccgaaaacgggacgcctccatacccgcttcaaccaaacagccacggcgaccggtcgtttgtcctcctctgatccaaaccttcagaatattccagtacgtaccccattgggccagaagatccgccgtgcgtttgtagctgaggagggttggcgtttagtggccctcgattatcgtcaaattgaattacgtgtccttgcccatctttctggcgatgagaacctcatccgcgtgtttcaggaaggcaaagacattcacactcaaacggcaagctggatgtttggattatcagctgaagcgatcgatcctttgatgcgtcgtgcagcgaagaccatcaatttcggtgttctctacggtatgagtgcctttcgtttgtcgcaggaattaggcattccctatgaagaagctcaggcgttcattcagaaatactttcaaagctatcccaaagttaaagcatggatcgagaagactctccgtgaaggccgcacacgtggttacgtagagaccttatttggacgtcgccgctatgttcccgatttaaacgctcgcgtgaaaggcaagcgtgaagccgccgaacgcatggcgttcaacatgcctgtacagggcacggcagctgacctcatgaaacttgcaatggtgcgcctttttccacaattgcgtgaagttggtgcccgcatgctcttgcaggtccacgatgaactcttgttagaagcgccaaaagagcgtgcggaagaggtggcagccctcgcgaaagaagttatggaaggcgtgtggcccttagcggtgcctcttgaagtcgaagttggtattggcgaggattggctggctgccaaagga

SEQ ID NO: 4408 - protein, 841 aa, synthetic construct
  REGION 1..841: note = Variant of DNA polymerase I from Thermus sp. strain 2.9
MHHHHHHGGSGVLPVFEPKGRVLLVDGHHLAYRNFFALKGLTTSLGEPVQGVYGFAKSLLKALKEDGDVVIVVFDAKAPSFRHEAYEAYKAGRAPTPEDFPRQLALMKELVDLLGLERLEVPGFEADDVLATLAKKAEREGYEVQILTADRDLFQLLSPRISVLHPEGHRITPEWLWEKYGLRPEQWVDFRALAGDPSDNIPGVKGIGEKTALKLLKEWGSLENLLKNLDQVKPESVREKILAHLEDLKLSRELSRVRTDLPLEVDFGRRREPDWEGLKAFLERLEFGSLLHEFGLLESPLLAEEAPWPPPEGAFLGYRLSRPEPMWAEVLALAASAQGRVYRAEDPHGALRGLFEVRGLLAKDLAVVALREGLDLPPTDDPMLLAYLLDPSNTTPEGVARRYGGEWTEDAAKRALLAERLHANLLGRLQGEERLLWLYEEVEKPLSRVLAHMEATGVKLDVAYLENLSLEVAAHMRRLEEEVFRLAGRSFRLNSRDQLERVLFDELGLPPIGKTEKTGKRSTSAAVLEALREVHPIVDKILQYRELAKLKGTYIDRLPALVHPKTGRLHTRFNQTATATGRLSSSDPNLQNIPVRTPLGQKIRRAFVAEEGWRLVALDYRQIELRVLAHLSGDENLIRVFQEGKDIHTQTASWMFGLSAEAIDPLMRRAAKTINFGVLYGMSAFRLSQELGIPYEEAQAFIQKYFQSYPKVKAWIEKTLREGRTRGYVETLFGRRRYVPDLNARVKGKREAAERMAFNMPVQGTAADLMKLAMVRLFPQLREVGARMLLQVHDELLLEAPKERAEEVAALAKEVMEGVWPLAVPLEVEVGIGEDWLAAKG

SEQ ID NO: 4409 - DNA, 2523 bp, synthetic construct
  misc_feature 1..2523: note = Variant of DNA polymerase I from Thermus sp. strain 2.9
  source 1..2523: mol_type = other DNA
atgcaccatcatcatcatcatggcggtagcggcgtgttaccggtgttcgagcctaaaggtcgcgtgcttctggttgatggccatcatctcgcgtatcgtaacttctttgccctgaaaggattaaccaccagcctgggcgagccggtacagggtgtctacggctttgcaaagtcgctcctgaaagctctgaaagaagacggtgatgtggtgattgttgtctttgatgcgaaagcgccaagttttcgccacgaagcgtacgaagcttacaaagccgggcgtgctccaacgccggaagactttcctcgccaattggcgcttatgaaggaattagtggatttgcttggcctcgaacgcttggaagttcccggtttcgaggcagacgacgtattagcgactctcgcaaagaaagccgaacgtgagggctatgaagtccagatcttgacagcagatcgcgatcttttccagcttttatctccgcgcatctcggtgttacacccggaagggcatcgtatcaccccggaatggctctgggagaaatatggtttgcgtcccgaacaatgggtggattttcgcgccttagcaggcgatccgagcgacaatattccgggagttaaaggtatcggcgagaagacggcgctcaagctccttaaagaatgggggtcgttggagaacttgcttaagaatttagatcaggtcaaaccagagtcagtgcgtgagaagattcttgctcacctcgaagacctcaaattaagccgcgaattgtcccgtgtacgcaccgatttgccgctcgaagttgatttcggtcgccgccgcgaacctgactgggagggtcttaaagcgtttttagagcgtcttgaatttggttcgctcttgcatgaattcggccttttagaaagcccgttactggccgaagaagcaccttggccaccgcccgagggcgcgtttttaggttaccgtttgagtcgcccggaaccgatgtgggccgaattactggctcttgcagcgtctgcccagggacgtgtgtatcgcgcggaagaccctcatggtgcgctccgcggcctcttcgaagtccgtggactccttgccaaagacttagctgttgttgcattgcgcgaaggtcttgatttacctccgactgatgatccaatgcttcttgcgtacctcttggacccgtcaaacacgacgcccgaaggcgtagcccgtcgttacggcggcgagtggaccgaagatgcagcgaaacgcgcgttattggccgaacgtttgcacgccaatttattaggacgtttgcaaggcgaggaacgtctcctctggctttacgaagaagtggagaaaccattgagtcgcgtgctcgcgcatatggaagctaccggtgtcaaattagacgtggcgtatttggagaatctcagccttgaagttgctgcccacatgcgccgcttggaggaagaagtattccgtttagcaggccgttcctttcgccttaactctcgcgatcagttagaacgtgtgttgttcgatgaacttggtctccctcctatcggcaagacagagaagaccggtaaacgtagcacttcagcggcggttttagaagctcttcgcgaagtccatcccattgtggacaagatcttgcagtaccgcgaactcgcgaaattgaaaggcacctatattgaccgtcttccggcattagtccacccgaaaacgggacgcctccatacccgcttcaaccaaacagccacggcgaccggtcgtttgtcctcctctgatccaaaccttcagaatattccagtacgtaccccattgggccagaagatccgccgtgcgtttgtagctgaggagggttggcgtttagtggccctcgattatcgtcaaattgaattacgtgtccttgcccatctttctggcgatgagaacctcatccgcgtgtttcaggaaggcaaagacattcacactcaaacggcaagctggatgtttggattatcagctgaagcgatcgatcctttgatgcgtcgtgcagcgaagaccatcaatttcggtgttctctacggtatgagtgcctttcgtttgtcgcaggaattaggcattccctatgaagaagctcaggcgttcattcagaaatactttcaaagctatcccaaagttaaagcatggatcgagaagactctccgtgaaggccgcacacgtggttacgtagagaccttatttggacgtcgccgctatgttcccgatttaaacgctcgcgtgaaaggcaagcgtgaagccgccgaacgcatggcgttcaacatgcctgtacagggcacggcagctgacctcatgaaacttgcaatggtgcgcctttttccacaattgcgtgaagttggtgcccgcatgctcttgcaggtccacgatgaactcttgttagaagcgccaagggagcgtgcggaagaggtggcagccctcgcgaaagaagttatggaaggcgtgtggcccttagcggtgcctcttgaagtcgaagttggtattggcgaggattggctggctgccaaagga

SEQ ID NO: 4410 - protein, 841 aa, synthetic construct
  REGION 1..841: note = Variant of DNA polymerase I from Thermus sp. strain 2.9
MHHHHHHGGSGVLPVFEPKGRVLLVDGHHLAYRNFFALKGLTTSLGEPVQGVYGFAKSLLKALKEDGDVVIVVFDAKAPSFRHEAYEAYKAGRAPTPEDFPRQLALMKELVDLLGLERLEVPGFEADDVLATLAKKAEREGYEVQILTADRDLFQLLSPRISVLHPEGHRITPEWLWEKYGLRPEQWVDFRALAGDPSDNIPGVKGIGEKTALKLLKEWGSLENLLKNLDQVKPESVREKILAHLEDLKLSRELSRVRTDLPLEVDFGRRREPDWEGLKAFLERLEFGSLLHEFGLLESPLLAEEAPWPPPEGAFLGYRLSRPEPMWAELLALAASAQGRVYRAEDPHGALRGLFEVRGLLAKDLAVVALREGLDLPPTDDPMLLAYLLDPSNTTPEGVARRYGGEWTEDAAKRALLAERLHANLLGRLQGEERLLWLYEEVEKPLSRVLAHMEATGVKLDVAYLENLSLEVAAHMRRLEEEVFRLAGRSFRLNSRDQLERVLFDELGLPPIGKTEKTGKRSTSAAVLEALREVHPIVDKILQYRELAKLKGTYIDRLPALVHPKTGRLHTRFNQTATATGRLSSSDPNLQNIPVRTPLGQKIRRAFVAEEGWRLVALDYRQIELRVLAHLSGDENLIRVFQEGKDIHTQTASWMFGLSAEAIDPLMRRAAKTINFGVLYGMSAFRLSQELGIPYEEAQAFIQKYFQSYPKVKAWIEKTLREGRTRGYVETLFGRRRYVPDLNARVKGKREAAERMAFNMPVQGTAADLMKLAMVRLFPQLREVGARMLLQVHDELLLEAPRERAEEVAALAKEVMEGVWPLAVPLEVEVGIGEDWLAAKG

SEQ ID NO: 4411 - DNA, 2523 bp, synthetic construct
  misc_feature 1..2523: note = Variant of DNA polymerase I from Thermus sp. strain 2.9
  source 1..2523: mol_type = other DNA
atgcaccatcatcatcatcatggcggtagcggcgtgttaccggtgttcgagcctaaaggtcgcgtgcttctggttgatggccatcatctcgcgtatcgtaacttctttgccctgaaaggattaaccaccagcctgggcgagccggtacagggtgtctacggctttgcaaagtcgctcctgaaagctctgaaagaagacggtgatgtggtgattgttgtctttgatgcgaaagcgccaagttttcgccacgaagcgtacgaagcttacaaagccgggcgtgctccaacgccggaagactttcctcgccaattggcgcttatgaaggaattagtggatttgcttggcctcgaacgcttggaagttcccggtttcgaggcagacgacgtattagcgactctcgcaaagaaagccgaacgtgagggctatgaagtccagatcttgacagcagatcgcgatcttttccagcttttatctccgcgcatctcggtgttacacccggaagggcatcgtatcaccccggaatggctctgggagaaatatggtttgcgtcccgaacaatgggtggattttcgcgccttagcaggcgatccgagcgacaatattccgggagttaaaggtatcggcgagaagacggcgctcaagctccttaaagaatgggggtcgttggagaacttgcttaagaatttagatcaggtcaaaccagagtcagtgcgtgagaagattcttgctcacctcgaagacctcaaattaagccgcgaattgtcccgtgtacgcaccgatttgccgctcgaagttgatttcggtcgccgccgcgaacctgactgggagggtcttaaagcgtttttagagcgtcttgaatttggttcgctcttgcatgaattcggccttttagaaagcccgttactggccgaagaagcaccttggccaccgcccgagggcgcgtttttaggttaccgtttgagtcgcccggaaccgatgtgggccgaattactggctcttgcagcgtctgcccagggacgtgtgtatcgcgcggaagaccctcatggtgcgctccgcggcctcttcgaagtccgtggactccttgccaaagacttagctgttgttgcattgcgcgaaggtcttgatttacctccgactgatgatccaatgcttcttgcgtacctcttggacccgtcaaacacgacgcccgaaggcgtagcccgtcgttacggcggcgagtggaccgaagatgcagcgaaacgcgcgttattggccgaacgtttgcacgccaatttattaggacgtttgcaaggcgaggaacgtctcctctggctttacgaagaagtggagaaaccattgagtcgcgtgctcgcgcatatggaagctaccggtgtcaaattagacgtggcgtatttggagaatctcagccttgaagttgctgcccacatgcgccgcttggaggaagaagtattccgtttagcaggccgttcctttcgccttaactctcgcgatcagttagaacgtgtgttgttcgatgaacttggtctccctcctatcggcaagacagagaagaccggtaaacgtagcacttcagcggcggttttagaagctcttcgcgaagtccatcccattgtggacaagatcttgcagtaccgcgaactcgcgaaattgaaaggcacctatgttgaccgtcttccggcattagtccacccgaaaacgggacgcctccatacccgcttcaaccaaacagccacggcgaccggtcgtttgtcctcctctgatccaaaccttcagaatattccagtacgtaccccattgggccagaagatccgccgtgcgtttgtagctgaggagggttggcgtttagtggccctcgattatcgtcaaattgaattacgtgtccttgcccatctttctggcgatgagaacctcatccgcgtgtttcaggaaggcaaagacattcacactcaaacggcaagctggatgtttggattatcagctgaagcgatcgatcctttgatgcgtcgtgcagcgaagaccatcaatttcggtgttctctacggtatgagtgcctttcgtttgtcgcaggaattaggcattccctatgaagaagctcaggcgttcattcagaaatactttcaaagctatcccaaagttaaagcatggatcgagaagactctccgtgaaggccgcacacgtggttacgtagagaccttatttggacgtcgccgctatgttcccgatttaaacgctcgcgtgaaaggcaagcgtgaagccgccgaacgcatggcgttcaacatgcctgtacagggcacggcagctgacctcatgaaacttgcaatggtgcgcctttttccacaattgcgtgaagttggtgcccgcatgctcttgcaggtccacgatgaactcttgttagaagcgccaaaagagcgtgcggaagaggtggcagccctcgcgaaagaagttatggaaggcgtgtggcccttagcggtgcctcttgaagtcgaagttggtattggcgaggattggctggctgccaaagga

SEQ ID NO: 4412 - protein, 841 aa, synthetic construct
  REGION 1..841: note = Variant of DNA polymerase I from Thermus sp. strain 2.9
MHHHHHHGGSGVLPVFEPKGRVLLVDGHHLAYRNFFALKGLTTSLGEPVQGVYGFAKSLLKALKEDGDVVIVVFDAKAPSFRHEAYEAYKAGRAPTPEDFPRQLALMKELVDLLGLERLEVPGFEADDVLATLAKKAEREGYEVQILTADRDLFQLLSPRISVLHPEGHRITPEWLWEKYGLRPEQWVDFRALAGDPSDNIPGVKGIGEKTALKLLKEWGSLENLLKNLDQVKPESVREKILAHLEDLKLSRELSRVRTDLPLEVDFGRRREPDWEGLKAFLERLEFGSLLHEFGLLESPLLAEEAPWPPPEGAFLGYRLSRPEPMWAELLALAASAQGRVYRAEDPHGALRGLFEVRGLLAKDLAVVALREGLDLPPTDDPMLLAYLLDPSNTTPEGVARRYGGEWTEDAAKRALLAERLHANLLGRLQGEERLLWLYEEVEKPLSRVLAHMEATGVKLDVAYLENLSLEVAAHMRRLEEEVFRLAGRSFRLNSRDQLERVLFDELGLPPIGKTEKTGKRSTSAAVLEALREVHPIVDKILQYRELAKLKGTYVDRLPALVHPKTGRLHTRFNQTATATGRLSSSDPNLQNIPVRTPLGQKIRRAFVAEEGWRLVALDYRQIELRVLAHLSGDENLIRVFQEGKDIHTQTASWMFGLSAEAIDPLMRRAAKTINFGVLYGMSAFRLSQELGIPYEEAQAFIQKYFQSYPKVKAWIEKTLREGRTRGYVETLFGRRRYVPDLNARVKGKREAAERMAFNMPVQGTAADLMKLAMVRLFPQLREVGARMLLQVHDELLLEAPKERAEEVAALAKEVMEGVWPLAVPLEVEVGIGEDWLAAKG

SEQ ID NO: 4413 - DNA, 2523 bp, synthetic construct
  misc_feature 1..2523: note = Variant of DNA polymerase I from Thermus sp. strain 2.9
  source 1..2523: mol_type = other DNA
atgcaccatcatcatcatcatggcggtagcggcgtgttaccggtgttcgagcctaaaggtcgcgtgcttctggttgatggccatcatctcgcgtatcgtaacttctttgccctgaaaggattaaccaccagcctgggcgagccggtacagggtgtctacggctttgcaaagtcgctcctgaaagctctgaaagaagacggtgatgtggtgattgttgtctttgatgcgaaagcgccaagttttcgccacgaagcgtacgaagcttacaaagccgggcgtgctccaacgccggaagactttcctcgccaattggcgcttatgaaggaattagtggatttgcttggcctcgaacgcttggaagttcccggtttcgaggcagacgacgtattagcgactctcgcaaagaaagccgaacgtgagggctatgaagtccagatcttgacagcagatcgcgatcttttccagcttttatctccgcgcatctcggtgttacacccggaagggcatcgtatcaccccggaatggctctgggagaaatatggtttgcgtcccgaacaatgggtggattttcgcgccttagcaggcgatccgagcgacaatattccgggagttaaaggtatcggcgagaagacggcgctcaagctccttaaagaatgggggtcgttggagaacttgcttaagaatttagatcaggtcaaaccagagtcagtgcgtgagaagattcttgctcacctcgaagacctcaaattaagccgcgaattgtcccgtgtacgcaccgatttgccgctcgaagttgatttcggtcgccgccgcgaacctgactgggagggtcttaaagcgtttttagagcgtcttgaatttggttcgctcttgcatgaattcggccttttagaaagcccgttactggccgaagaagcaccttggccaccgcccgagggcgcgtttttaggttaccgtttgagtcgcccggaaccgatgtgggccgaattactggctcttacagcgtctgcccagggacgtgtgtatcgcgcggaagaccctcatggtgcgctccgcggcctcttcgaagtccgtggactccttgccaaagacttagctgttgttgcattgcgcgaaggtcttgatttacctccgactgatgatccaatgcttcttgcgtacctcttggacccgtcaaacacgacgcccgaaggcgtagcccgtcgttacggcggcgagtggaccgaagatgcagcgaaacgcgcgttattggccgaacgtttgcacgccaatttattaggacgtttgcaatgtgaggaacgtctcctctggctttacgaagaagtggagaaaccattgagtcgcgtgctcgcgcatatggaagctaccggtgtcaaattagacgtggcgtatttggagaatctcagccttgaagttgctgcccacatgcgccgcttggaggaagaagtattccgtttagcaggccgttcctttcgccttaactctcgcgatcagttagaacgtgtgttgttcgatgaacttggtctccctcctatcggcaagacagagaagaccggtaaacgtagcacttcagcggcggttttagaagctcttcgcgaagtccatcccattgtggacaagatcttgcagtaccgcgaactcgcgaaattgaaaggcacctatattgaccgtcttccggcattagtccacccgaaaacgggacgcctccatacccgcttcaaccaaacagccacggcgaccggtcgtttgtcctcctctgatccaaaccttcagaatattccagtacgtaccccattgggccagaagatccgccgtgcgtttgtagctgaggagggttggcgtttagtggccctcgattatcgtcaaattgaattacgtgtccttgcccatctttctggcgatgagaacctcatccgcgtgtttcaggaaggcaaagacattcacactcaaacggcaagctggatgtttggattatcagctgaagcgatcgatcctttgatgcgtcgtgcagcgaagaccatcaatttcggtgttctctacggtatgagtgcctttcgtttgtcgcaggaattaggcattccctatgaagaagctcaggcgttcattcagaaatactttcaaagctatcccaaagttaaagcatggatcgagaagactctccgtgaaggccgcacacgtggttacgtagagaccttatttggacgtcgccgctatgttcccgatttaaacgctcgcgtgaaaggcaagcgtgaagccgccgaacgcatggcgttcaacatgcctgtacagggcacggcagctgacctcatgaaacttgcaatggtgcgcctttttccacaattgcgtgaagttggtgcccgcatgctcttgcaggtccacgatgaactcttgttagaagcgccaaaagagcgtgcggaagaggtggcagccctcgcgaaagaagttatggaaggcgtgtggcccttagcggtgcctcttgaagtcgaagttggtattggcgaggattggctggctgccaaagga

SEQ ID NO: 4414 - protein, 841 aa, synthetic construct
  REGION 1..841: note = Variant of DNA polymerase I from Thermus sp. strain 2.9
MHHHHHHGGSGVLPVFEPKGRVLLVDGHHLAYRNFFALKGLTTSLGEPVQGVYGFAKSLLKALKEDGDVVIVVFDAKAPSFRHEAYEAYKAGRAPTPEDFPRQLALMKELVDLLGLERLEVPGFEADDVLATLAKKAEREGYEVQILTADRDLFQLLSPRISVLHPEGHRITPEWLWEKYGLRPEQWVDFRALAGDPSDNIPGVKGIGEKTALKLLKEWGSLENLLKNLDQVKPESVREKILAHLEDLKLSRELSRVRTDLPLEVDFGRRREPDWEGLKAFLERLEFGSLLHEFGLLESPLLAEEAPWPPPEGAFLGYRLSRPEPMWAELLALTASAQGRVYRAEDPHGALRGLFEVRGLLAKDLAVVALREGLDLPPTDDPMLLAYLLDPSNTTPEGVARRYGGEWTEDAAKRALLAERLHANLLGRLQCEERLLWLYEEVEKPLSRVLAHMEATGVKLDVAYLENLSLEVAAHMRRLEEEVFRLAGRSFRLNSRDQLERVLFDELGLPPIGKTEKTGKRSTSAAVLEALREVHPIVDKILQYRELAKLKGTYIDRLPALVHPKTGRLHTRFNQTATATGRLSSSDPNLQNIPVRTPLGQKIRRAFVAEEGWRLVALDYRQIELRVLAHLSGDENLIRVFQEGKDIHTQTASWMFGLSAEAIDPLMRRAAKTINFGVLYGMSAFRLSQELGIPYEEAQAFIQKYFQSYPKVKAWIEKTLREGRTRGYVETLFGRRRYVPDLNARVKGKREAAERMAFNMPVQGTAADLMKLAMVRLFPQLREVGARMLLQVHDELLLEAPKERAEEVAALAKEVMEGVWPLAVPLEVEVGIGEDWLAAKG

SEQ ID NO: 4415 - DNA, 2523 bp, synthetic construct
  misc_feature 1..2523: note = Variant of DNA polymerase I from Thermus sp. strain 2.9
  source 1..2523: mol_type = other DNA
atgcaccatcatcatcatcatggcggtagcggcgtgttaccggtgttcgagcctaaaggtcgcgtgcttctggttgatggccatcatctcgcgtatcgtaacttctttgccctgaaaggattaaccaccagcctgggcgagccggtacagggtgtctacggctttgcaaagtcgctcctgaaagctctgaaagaagacggtgatgtggtgattgttgtctttgatgcgaaagcgccaagttttcgccacgaagcgtacgaagcttacaaagccgggcgtgctccaacgccggaagactttcctcgccaattggcgcttatgaaggaattagtggatttgcttggcctcgaacgcttggaagttcccggtttcgaggcagacgacgtattagcgactctcgcaaagaaagccgaacgtgagggctatgaagtccagatcttgacagcagatcgcgatcttttccagcttttatctccgcgcatctcggtgttacacccggaagggcatcgtatcaccccggaatggctctgggagaaatatggtttgcgtcccgaacaatgggtggattttcgcgccttagcaggcgatccgagcgacaatattccgggagttaaaggtatcggcgagaagacggcgctcaagctccttaaagaatgggggtcgttggagaacttgcttaagaatttagatcaggtcaaaccagagtcagtgcgtgagaagattcttgctcacctcgaagacctcaaattaagccgcgaattgtcccgtgtacgcaccgatttgccgctcgaagttgatttcggtcgccgccgcgaacctgactgggagggtcttaaagcgtttttagagcgtcttgaatttggttcgctcttgcatgaattcggccttttagaaagcccgttactggccgaagaagcaccttggccaccgcccgagggcatgtttttaggttaccgtttgagtcgcccggaaccgatgtgggccgaattactggctcttgcagcgtctgcccagggacgtgtgtatcgcgcggaagaccctcatggtgcgctccgcggcctcttcgaagtccgtggactccttgccaaagacttagctgttgttgcattgcgcgaaggtcttgatttacctccgactgatgatccaatgcttcttgcgtacctcttggacccgtcaaacacgacgcccgaaggcgtagcccgtcgttacggcggcgagtggaccgaagatgcagcgaaacgcgcgttattggccgaacgtttgcacgccaatttattaggacgtttgcaaggcgaggaacgtctcctctggctttacgaagaagtggagaaaccattgagtcgcgtgctcgcgcatatggaagctaccggtgtcaaattagacgtggcgtatttggagaatctcagccttgaagttgctgcccacatgcgccgcttggaggaagaagtattccgtttagcaggccgttcctttcgccttaactctcgcgatcagttagaacgtgtgttgttcgatgaacttggtctccctcctatcggcaagacagagaagaccggtaaacgtagcacttcagcggcggttttagaagctcttcgcgaagtccatcccattgtggacaagatcttgcagtaccgcgaactcgcgaaattgaaaggcacctatattgaccgtcttccggcattagtccacccgaaaacgggacgcctccatacccgcttcaaccaaacagccacggcgaccggtcgtttgtcctcctctgatccaaaccttcagaatattccagtacgtaccccattgggccagaagatccgccgtgcgtttgtagctgaggagggttggcgtttagtggccctcgattatcgtcaaattgaattacgtgtccttgcccatctttctggcgatgagaacctcatccgcgtgtttcaggaaggcaaagacattcacactcaaacggcaagctggatgtttggattatcagctgaagcgatcgatcctttgatgcgtcgtgcagcgaagaccatcaatttcggtgttctctacggtatgagtgcctttcgtttgtcgcaggaattaggcattccctatgaagaagctcaggcgttcattcagaaatactttcaaagctatcccaaagttaaagcatggatcgagaagactctccgtgaaggccgcacacgtggttacgtagagaccttatttggacgtcgccgctatgttcccgatttaaacgctcgcgtgaaaggcaagcgtgaagccgccgaacgcatggcgttcaacatgcctgtacagggcacggcagctgacctcatgaaacttgcaatggtgcgcctttttccacaattgcgtgaagttggtgcccgcatgctcttgcaggtccacgatgaactcttgttagaagcgccaaaagagcgtgcggaagaggtggcagccctcgcgaaagaagttatggaaggcgtgtggcccttagcggtgcctcttgaagtcgaagttggtattggcgaggattggctggctgccaaagga

SEQ ID NO: 4416 - protein, 841 aa, synthetic construct
  REGION 1..841: note = Variant of DNA polymerase I from Thermus sp. strain 2.9
MHHHHHHGGSGVLPVFEPKGRVLLVDGHHLAYRNFFALKGLTTSLGEPVQGVYGFAKSLLKALKEDGDVVIVVFDAKAPSFRHEAYEAYKAGRAPTPEDFPRQLALMKELVDLLGLERLEVPGFEADDVLATLAKKAEREGYEVQILTADRDLFQLLSPRISVLHPEGHRITPEWLWEKYGLRPEQWVDFRALAGDPSDNIPGVKGIGEKTALKLLKEWGSLENLLKNLDQVKPESVREKILAHLEDLKLSRELSRVRTDLPLEVDFGRRREPDWEGLKAFLERLEFGSLLHEFGLLESPLLAEEAPWPPPEGMFLGYRLSRPEPMWAELLALAASAQGRVYRAEDPHGALRGLFEVRGLLAKDLAVVALREGLDLPPTDDPMLLAYLLDPSNTTPEGVARRYGGEWTEDAAKRALLAERLHANLLGRLQGEERLLWLYEEVEKPLSRVLAHMEATGVKLDVAYLENLSLEVAAHMRRLEEEVFRLAGRSFRLNSRDQLERVLFDELGLPPIGKTEKTGKRSTSAAVLEALREVHPIVDKILQYRELAKLKGTYIDRLPALVHPKTGRLHTRFNQTATATGRLSSSDPNLQNIPVRTPLGQKIRRAFVAEEGWRLVALDYRQIELRVLAHLSGDENLIRVFQEGKDIHTQTASWMFGLSAEAIDPLMRRAAKTINFGVLYGMSAFRLSQELGIPYEEAQAFIQKYFQSYPKVKAWIEKTLREGRTRGYVETLFGRRRYVPDLNARVKGKREAAERMAFNMPVQGTAADLMKLAMVRLFPQLREVGARMLLQVHDELLLEAPKERAEEVAALAKEVMEGVWPLAVPLEVEVGIGEDWLAAKG

SEQ ID NO: 4417 - DNA, 2523 bp, synthetic construct
  misc_feature 1..2523: note = Variant of DNA polymerase I from Thermus sp. strain 2.9
  source 1..2523: mol_type = other DNA
atgcaccatcatcatcatcatggcggtagcggcgtgttaccggtgttcgagcctaaaggtcgcgtgcttctggttgatggccatcatctcgcgtatcgtaacttctttgccctgaaaggattaaccaccagcctgggcgagccggtacagggtgtctacggctttgcaaagtcgctcctgaaagctctgaaagaagacggtgatgtggtgattgttgtctttgatgcgaaagcgccaagttttcgccacgaagcgtacgaagcttacaaagccgggcgtgctccaacgccggaagactttcctcgccaattggcgcttatgaaggaattagtggatttgcttggcctcgaacgcttggaagttcccggtttcgaggcagacgacgtattagcgactctcgcaaagaaagccgaacgtgagggctatgaagtccagatcttgacagcagatcgcgatcttttccagcttttatctccgcgcatctcggtgttacacccggaagggcatcgtatcaccccggaatggctctgggagaaatatggtttgcgtcccgaacaatgggtggattttcgcgccttagcaggcgatccgagcgacaatattccgggagttaaaggtatcggcgagaagacggcgctcaagctccttaaagaatgggggtcgttggagaacttgcttaagaatttagatcaggtcaaaccagagtcagtgcgtgagaagattcttgctcacctcgaagacctcaaattaagccgcgaattgtcccgtgtacgcaccgatttgccgctcgaagttgatttcggtcgccgccgcgaacctgactgggagggtcttaaagcgtttttagagcgtcttgaatttggttcgctcttgcatgaattcggccttttagaaagcccgttactggccgaagaagcaccttggccaccgcccgagggcgcgtttttaggttaccgtttgagtcgcccggaaccgatgtgggccgaattactggctcttgcagcgtctgcccagggacgtgtgtatcgcgcggaagaccctcatggtgcgctccgcggcctcttcgaagtccgtggactccttgccaaagacttagctgttgttgcattgcgcgaaggtcttgatttacctccgactgatgatccaatgcttcttgcgtacctcttggacccgtcaaacacgacgcccgaaggcgtagcccgtcgttacggcggcgagtggaccgaagatgcagcgaaacgcgcgttattggccgaacgtttgcacgccaatttattaggacgtttgcaaggcgaggaacgtctcctctggctttacgaagaagtggagaaaccattgagtcgcgtgctcgcgcatatggaagctaccggtgtcaaattagacgtggcgtatttggagaatctcagccttgaaggggctgcccacatgcgccgcttggaggaagaagtattccgtttagcaggccgttcctttcgccttaactctcgcgatcagttagaacgtgtgttgttcgatgaacttggtctccctcctatcggcaagacagagaagaccggtaaacgtagcacttcagcggcggttttagaagctcttcgcgaagtccatcccattgtggacaagatcttgcagtaccgcgaactcgcgaaattgaaaggcacctatattgaccgtcttccggcattagtccacccgaaaacgggacgcctccatacccgcttcaaccaaacagccacggcgaccggtcgtttgtcctcctctgatccaaaccttcagaatattccagtacgtaccccattgggccagaagatccgccgtgcgtttgtagctgaggagggttggcgtttagtggccctcgattatcgtcaaattgaattacgtgtccttgcccatctttctggcgatgagaacctcatccgcgtgtttcaggaaggcaaagacattcacactcaaacggcaagctggatgtttggattatcagctgaagcgatcgatcctttgatgcgtcgtgcagcgaagaccatcaatttcggtgttctctacggtatgagtgcctttcgtttgtcgcaggaattaggcattccctatgaagaagctcaggcgttcattcagaaatactttcaaagctatcccaaagttaaagcatggatcgagaagactctccgtgaaggccgcacacgtggttacgtagagaccttatttggacgtcgccgctatgttcccgatttaaacgctcgcgtgaaaggcaagcgtgaagccgccgaacgcatggcgttcaacatgcctgtacagggcacggcagctgacctcatgaaacttgcaatggtgcgcctttttccacaattgcgtgaagttggtgcccgcatgctcttgcaggtccacgatgaactcttgttagaagcgccaaaagagcgtgcggaagaggtggcagccctcgcgaaagaagttatggaaggcgtgtggcccttagcggtgcctcttgaagtcgaagttggtattggcgaggattggctggctgccaaagga

SEQ ID NO: 4418 - protein, 841 aa, synthetic construct
  REGION 1..841: note = Variant of DNA polymerase I from Thermus sp. strain 2.9
MHHHHHHGGSGVLPVFEPKGRVLLVDGHHLAYRNFFALKGLTTSLGEPVQGVYGFAKSLLKALKEDGDVVIVVFDAKAPSFRHEAYEAYKAGRAPTPEDFPRQLALMKELVDLLGLERLEVPGFEADDVLATLAKKAEREGYEVQILTADRDLFQLLSPRISVLHPEGHRITPEWLWEKYGLRPEQWVDFRALAGDPSDNIPGVKGIGEKTALKLLKEWGSLENLLKNLDQVKPESVREKILAHLEDLKLSRELSRVRTDLPLEVDFGRRREPDWEGLKAFLERLEFGSLLHEFGLLESPLLAEEAPWPPPEGAFLGYRLSRPEPMWAELLALAASAQGRVYRAEDPHGALRGLFEVRGLLAKDLAVVALREGLDLPPTDDPMLLAYLLDPSNTTPEGVARRYGGEWTEDAAKRALLAERLHANLLGRLQGEERLLWLYEEVEKPLSRVLAHMEATGVKLDVAYLENLSLEGAAHMRRLEEEVFRLAGRSFRLNSRDQLERVLFDELGLPPIGKTEKTGKRSTSAAVLEALREVHPIVDKILQYRELAKLKGTYIDRLPALVHPKTGRLHTRFNQTATATGRLSSSDPNLQNIPVRTPLGQKIRRAFVAEEGWRLVALDYRQIELRVLAHLSGDENLIRVFQEGKDIHTQTASWMFGLSAEAIDPLMRRAAKTINFGVLYGMSAFRLSQELGIPYEEAQAFIQKYFQSYPKVKAWIEKTLREGRTRGYVETLFGRRRYVPDLNARVKGKREAAERMAFNMPVQGTAADLMKLAMVRLFPQLREVGARMLLQVHDELLLEAPKERAEEVAALAKEVMEGVWPLAVPLEVEVGIGEDWLAAKG

SEQ ID NO: 4419 - DNA, 2523 bp, synthetic construct
  misc_feature 1..2523: note = Variant of DNA polymerase I from Thermus sp. strain 2.9
  source 1..2523: mol_type = other DNA
atgcaccatcatcatcatcatggcggtagcggcgtgttaccggtgttcgagcataaaggtcgcgtgcttctggttgatggccatcatctcgcgtatcgtaacttctttgccctgaaaggattaaccaccagcctgggcgagccggtacagggtgtctacggctttgcaaagtcgctcctgaaagctctgaaagaagacggtgatgtggtgattgttgtctttgatgcgaaagcgccaagttttcgccacgaagcgtacgaagcttacaaagccgggcgtgctccaacgccggaagactttcctcgccaattggcgcttatgaaggaattagtggatttgcttggcctcgaacgcttggaagttcccggtttcgaggcagacgacgtattagcgactctcgcaaagaaagccgaacgtgagggctatgaagtccagatcttgacagcagatcgcgatcttttccagcttttatctccgcgcatctcggtgttacacccggaagggcatcgtatcaccccggaatggctctgggagaaatatggtttgcgtcccgaacaatgggtggattttcgcgccttagcaggcgatccgagcgacaatattccgggagttaaaggtatcggcgagaagacggcgctcaagctccttaaagaatgggggtcgttggagaacttgcttaagaatttagatcaggtcaaaccagagtcagtgcgtgagaagattcttgctcacctcgaagacctcaaattaagccgcgaattgtcccgtgtacgcaccgatttgccgctcgaagttgatttcggtcgccgccgcgaacctgactgggagggtcttaaagcgtttttagagcgtcttgaatttggttcgctccagcatgaattcggccttttagaaagcccgttagtggccgaagaagcaccttggccaccgcccgagggcgcgtttttaggttaccgtttgagtcgcccggaaccgatgtgggccgaattactggctcttgcagcgtctgcccagggacgtgtgtatcgcgcggaagaccctcatggtgcgctccgcggcctcttcgaagtccgtggactccttgccaaagacttagctgttgttgcattgcgcgaaggtcttgatttacctccgactgatgatccaatgcttcttgcgtacctcttggacccgtcaaacacgacgcccgaaggcgtagcccgtcgttacggcggcgagtggaccgaagatgcagcgaaacgcgcgttattggccgaacgtttgcacgccaatttattaggacgtttgcaaggcgaggaacgtctcctctggctttacgaagaagtggagaaaccattgagtcgcgtgctcgcgcatatggaagctaccggtgtcaaattagacgtggcgtatttggagaatctcagccttgaagttgctgcccacatgcgccgcttggaggaagaagtattccgtttagcaggccgttcctttcgccttaactctcgcgatcagttagaacgtgtgttgttcgatgaacttggtctccctcctatcggcaagacagagaagaccggtaaacgtagcacttcagcggcggttttagaagctcttcgcgaagtccatcccattgtggacaagatcttgcagtaccgcgaactcgcgaaattgaaaggcacctatattgaccgtcttccggcattagtccacccgaaaacgggacgcctccatacccgcttcaaccaaacagccacggcgaccggtcgtttgtcctcctctgatccaaaccttcagaatattccagtacgtaccccattgggccagaagatccgccgtgcgtttgtagctgaggagggttggcgtttagtggccctcgattatcgtcaaattgaattacgtgtccttgcccatctttctggcgatgagaacctcatccgcgtgtttcaggaaggcaaagacattcacactcaaacggcaagctggatgtttggattaagtgctgaagcgatcgatcctttgatgcgtcgtgcagcgaagaccatcaatttcggtgttctctacggtatgagtccatttcgtttgtcgcaggaattaggcattccctatgaagaagctcaggcgttcattcagaaatactttcaaagctatcccaaagttaaagcatggatcgagaagactctccgtgaaggccgcacacgtggttacgtagagaccttatttggacgtcgccgctatgttcccgatttaaacgctcgcgtgaaaggcaagcgtgaagccgccgaacgcatggcgttcaacatgcctgtacagggcacggcagctgacctcatgaaacttgcaatggtgcgcctttttccacaattgcgtgaagttggtgcccgcatgctcttgcaggtccacgatgaactcttgttagaagcgccaaaagagcgtgcggaagaggtggcagccctcgcgaaagaagttatggaaggcgtgtggcccttagcggtgcctcttgaagtcgaagttggtattggcgaggattggctggctgccaaagga

SEQ ID NO: 4420 - protein, 841 aa, synthetic construct
  REGION 1..841: note = Variant of DNA polymerase I from Thermus sp. strain 2.9
MHHHHHHGGSGVLPVFEHKGRVLLVDGHHLAYRNFFALKGLTTSLGEPVQGVYGFAKSLLKALKEDGDVVIVVFDAKAPSFRHEAYEAYKAGRAPTPEDFPRQLALMKELVDLLGLERLEVPGFEADDVLATLAKKAEREGYEVQILTADRDLFQLLSPRISVLHPEGHRITPEWLWEKYGLRPEQWVDFRALAGDPSDNIPGVKGIGEKTALKLLKEWGSLENLLKNLDQVKPESVREKILAHLEDLKLSRELSRVRTDLPLEVDFGRRREPDWEGLKAFLERLEFGSLQHEFGLLESPLVAEEAPWPPPEGAFLGYRLSRPEPMWAELLALAASAQGRVYRAEDPHGALRGLFEVRGLLAKDLAVVALREGLDLPPTDDPMLLAYLLDPSNTTPEGVARRYGGEWTEDAAKRALLAERLHANLLGRLQGEERLLWLYEEVEKPLSRVLAHMEATGVKLDVAYLENLSLEVAAHMRRLEEEVFRLAGRSFRLNSRDQLERVLFDELGLPPIGKTEKTGKRSTSAAVLEALREVHPIVDKILQYRELAKLKGTYIDRLPALVHPKTGRLHTRFNQTATATGRLSSSDPNLQNIPVRTPLGQKIRRAFVAEEGWRLVALDYRQIELRVLAHLSGDENLIRVFQEGKDIHTQTASWMFGLSAEAIDPLMRRAAKTINFGVLYGMSPFRLSQELGIPYEEAQAFIQKYFQSYPKVKAWIEKTLREGRTRGYVETLFGRRRYVPDLNARVKGKREAAERMAFNMPVQGTAADLMKLAMVRLFPQLREVGARMLLQVHDELLLEAPKERAEEVAALAKEVMEGVWPLAVPLEVEVGIGEDWLAAKG

SEQ ID NO: 4421 - DNA, 2523 bp, synthetic construct
  misc_feature 1..2523: note = Variant of DNA polymerase I from Thermus sp. strain 2.9
  source 1..2523: mol_type = other DNA
atgcaccatcatcatcatcatggcggtagcggcgtgttaccggtgttcgagcctaaaggtcgcgtgcttctggttgatggccatcatctcgcgtatcgtaacttctttgccctgaaaggattaaccaccagcctgggcgagccggtacagggtgtctacggctttgcaaagtcgctcctgaaagctctgaaagaagacggtgatgtggtgattgttgtctttgatgcgaaagcgccaagttttcgccacgaagcgtacgaagcttacaaagccgggcgtgctccaacgccggaagactttcctcgccaattggcgcttatgaaggaattagtggatttgcttggcctcgaacgcttggaagttcccggtttcgaggcagacgacgtattagcgactctcgcaaagaaagccgaacgtgagggctatgaagtccagatcttgacagcagatcgcgatcttttccagcttttatctccgcgcatctcggtgttacacccggaagggcatcgtatcaccccggaatggctctgggagaaatatggtttgcgtcccgaacaatgggtggattttcgcgccttagcaggcgatccgagcgacaatattccgggagttaaaggtatcggcgagaagacggcgctcaagctccttaaagaatgggggtcgttggagaacttgcttaagaatttagatcaggtcaaaccagagtcagtgcgtgagaagattcttgctcacctcgaagacctcaaattaagccgcgaattgtcccgtgtacgcaccgatttgccgctcgaagttgatttcggtcgccgccgcgaacctgactgggagggtcttaaagcgtttttagagcgtcttgaatttggttcgctcttgcatgaattcggccttttagaaagcccgttactggccgaagaagcaccttggccaccgcccgagggcgcgtttttaggttaccgtttgagtcgcccggaaccgatgtgggccgaattactggctcttgcagcgtctgcccagggacgtgtgtatcgcgcggaagaccctcatggtgcgctccgcattctcttcgaagtccgtggactccttgccaaagacttagctgttgttgcattgcgcgaaggtcttgatttacctccgactgatgatccaatgcttcttgcgtacctcttggacccgtcaaacacgacgcccgaaggcgtagcccgtcgttacggcggcgagtggaccgaagatgcagcgaaacgcgcgttattggccgaacgtttgcacgccaatttattaggacgtttgcaaggcgaggaacgtctcctctggctttacgaagaagtggagaaaccattgagtcgcgtgctcgcgcatatggaagctaccggtgtcaaattagacgtggcgtatttggagaatctcagccttgaagttgctgcccacatgcgccgcttggaggaagaagtattccgtttagcaggccgttcctttcgccttaactctcgcgatcagttagaacgtgtgttgttcgatgaacttggtctccctcctatcggcaagacagagaagaccggtaaacgtagcacttcagcggcggttttagaagctcttcgcgaagtccatcccattgtggacaagatcttgcagtaccgcgaactcgcgaaattgaaaggcacctatattgaccgtcttccggcattagtccacccgaaaacgggacgcctccatacccgcttcaaccaaacagccacggcgaccggtcgtttgtcctcctctgatccaaaccttcagaatattccagtacgtaccccattgggccagaagatccgccgtgcgtttgtagctgaggagggttggcgtttagtggccctcgattatcgtcaaattgaattacgtgtccttgcccatctttctggcgatgagaacctcatccgcgtgtttcaggaaggcaaagacattcacactcaaacggcaagctggatgtttggattatcagctgaagcgatcgatcctttgatgcgtcgtgcagcgaagaccatcaatttcggtgttctctacggtatgagtgcctttcgtttgtcgcaggaattaggcattccctatgaagaagctcaggcgttcattcagaaatactttcaaagctatcccaaagttaaagcatggatcgagaagactctccgtgaaggccgcacacgtggttacgtagagaccttatttggacgtcgccgctatgttcccgatttaaacgctcgcgtgaaaggcaagcgtgaagccgccgaacgcatggcgttcaacatgcctgtacagggcacggcagctgacctcatgaaacttgcaatggtgcgcctttttccacaattgcgtgaagttggtgcccgcatgctcttgcaggtccacgatgaactcttgttagaagcgccaaaagagcgtgcggaagaggtggcagccctcgcgaaagaagttatggaaggcgtgtggcccttagcggtgcctcttgaagtcgaagttggtattggcgaggattggctggctgccaaagga

SEQ ID NO: 4422 - protein, 841 aa, synthetic construct
  REGION 1..841: note = Variant of DNA polymerase I from Thermus sp. strain 2.9
MHHHHHHGGSGVLPVFEPKGRVLLVDGHHLAYRNFFALKGLTTSLGEPVQGVYGFAKSLLKALKEDGDVVIVVFDAKAPSFRHEAYEAYKAGRAPTPEDFPRQLALMKELVDLLGLERLEVPGFEADDVLATLAKKAEREGYEVQILTADRDLFQLLSPRISVLHPEGHRITPEWLWEKYGLRPEQWVDFRALAGDPSDNIPGVKGIGEKTALKLLKEWGSLENLLKNLDQVKPESVREKILAHLEDLKLSRELSRVRTDLPLEVDFGRRREPDWEGLKAFLERLEFGSLLHEFGLLESPLLAEEAPWPPPEGAFLGYRLSRPEPMWAELLALAASAQGRVYRAEDPHGALRILFEVRGLLAKDLAVVALREGLDLPPTDDPMLLAYLLDPSNTTPEGVARRYGGEWTEDAAKRALLAERLHANLLGRLQGEERLLWLYEEVEKPLSRVLAHMEATGVKLDVAYLENLSLEVAAHMRRLEEEVFRLAGRSFRLNSRDQLERVLFDELGLPPIGKTEKTGKRSTSAAVLEALREVHPIVDKILQYRELAKLKGTYIDRLPALVHPKTGRLHTRFNQTATATGRLSSSDPNLQNIPVRTPLGQKIRRAFVAEEGWRLVALDYRQIELRVLAHLSGDENLIRVFQEGKDIHTQTASWMFGLSAEAIDPLMRRAAKTINFGVLYGMSAFRLSQELGIPYEEAQAFIQKYFQSYPKVKAWIEKTLREGRTRGYVETLFGRRRYVPDLNARVKGKREAAERMAFNMPVQGTAADLMKLAMVRLFPQLREVGARMLLQVHDELLLEAPKERAEEVAALAKEVMEGVWPLAVPLEVEVGIGEDWLAAKG

SEQ ID NO: 4423 - DNA, 2523 bp, synthetic construct
  misc_feature 1..2523: note = Variant of DNA polymerase I from Thermus sp. strain 2.9
  source 1..2523: mol_type = other DNA
atgcaccatcatcatcatcatggcggtagcggcgtgttaccggtgttcgagcctaaaggtcgcgtgcttctggttgatggccatcatctcgcgtatcgtaacttctttgccctgaaaggattaaccaccagcctgggcgagccggtacagggtgtctacggctttgcaaagtcgctcctgaaagctctgaaagaagacggtgatgtggtgattgttgtctttgatgcgaaagcgccaagttttcgccacgaagcgtacgaagcttacaaagccgggcgtgctccaacgccggaagactttcctcgccaattggcgcttatgaaggaattagtggatttgcttggcctcgaacgcttggaagttcccggtttcgaggcagacgacgtattagcgactctcgcaaagaaagccgaacgtgagggctatgaagtccagatcttgacagcagatcgcgatcttttccagcttttatctccgcgcatctcggtgttacacccggaagggcatcgtatcaccccggaatggctctgggagaaatatggtttgcgtcccgaacaatgggtggattttcgcgccttagcaggcgatccgagcgacaatattccgggagttaaaggtatcggcgagaagacggcgctcaagctccttaaagaatgggggtcgttggagaacttgcttaagaatttagatcaggtcaaaccagagtcagtgcgtgagaagattcttgctcacctcgaagacctcaaattaagccgcgaattgtcccgtgtacgcaccgatttgccgctcgaagttgatttcggtcgccgccgcgaacctgactgggagggtcttaaagcgtttttagagcgtcttgaatttggttcgctcttgcatgaattcggccttttagaaagcccgttactggccgaagaagcaccttggccaccgcccgagggcgcgtttttaggttaccgtttgagtcgcccggaaccgatgtgggccgaattactggctcttgcagcgtctgcccagggacgtgtgtatcgcgcggaagaccctcatggtgcgctccgcggcctcttcgaagtccgtggactccttgccaaagacttagctgttgttgcattgcgcgaaggtcttgatttacctccgactgatgatccaatgcttcttgcgtacctcttggacccgtcaaacacgacgcccgaaggcgtagcccgtcgttacggcggcgagtggaccgaagatgcagcgaaacgcgcgttattggccgaacgtttgcacgccaatttattaggacgtttgcaaggcgaggaacgtctcctctggctttacgaagaagtggagaaaccattgagtcgcgtgctcgcgcatatggaagctaccggtgtcaaattagacgtggcgtatttggagaatctcagccttgaagttgctgcccacatgcgccgcttggaggaagaagtattccgtttagcaggccgttcctttcgccttaactctcgcgatcagttagaacgtgtgttgttcgatgaacttggtctccctcctatcggcaagacagagaagaccggtaaacgtagcacttcagcggcggttttagaagctcttcgcgaagtccatcccattgtggacaagatcttgcagtaccgcgaactcgcgaaattgaaaggcacctatattgaccgtcttccggcattagtccacccgaaaacgggacgcctccatacccgcttcaaccaaacagccacggcgaccggtcgtttgtcctcctctgatccaaaccttcagaatattccagtacgtaccccattgggccagaagatccgccgtgcgtttgtagctgaggagggttggcgtttagtggccctcgattatcgtcaaattgaattacgtgtccttgcccatctttctggcgatgagaacctcatccgcgtgtttcaggaaggcaaagacattcacactcaaacggcaagctggatgtttggattatcagctgaagcgatcgatcctttgatgcgtcgtgcagcgaagaccatcaatttcggtgttctctacggtatgagtgcctttcgtttgtcgcaggaattaggcattccctatgaagaagctcaggcgttcattcagaaatactttcaaagctatcccaaagttaaagcatggatcgagaagactctccgtgaaggccgcacacgtggttacgtagagaccttatttggacgtcgccgctatgttcccgatttaaacgctcgcgtgaaaggcaagcgtgaagccgccgaacgcatggcgttcaacatgcctgtacagggcacggcagctgacctcatgaaacttgcaatggtgcgcctttttccacaattgcgtgaagttggtgcccgcatgctcttgcaggtccacgatgaactcttgttagaagcgccaaaagagcgtgcggaagaggtggcagccctcgcgaaagaagttatggaaggcgcgtggcccttagcggtgcctcttgaagtcgaagttggtattggcgaggattggctggctgccaaagga

SEQ ID NO: 4424 - protein, 841 aa, synthetic construct
  REGION 1..841: note = Variant of DNA polymerase I from Thermus sp. strain 2.9
MHHHHHHGGSGVLPVFEPKGRVLLVDGHHLAYRNFFALKGLTTSLGEPVQGVYGFAKSLLKALKEDGDVVIVVFDAKAPSFRHEAYEAYKAGRAPTPEDFPRQLALMKELVDLLGLERLEVPGFEADDVLATLAKKAEREGYEVQILTADRDLFQLLSPRISVLHPEGHRITPEWLWEKYGLRPEQWVDFRALAGDPSDNIPGVKGIGEKTALKLLKEWGSLENLLKNLDQVKPESVREKILAHLEDLKLSRELSRVRTDLPLEVDFGRRREPDWEGLKAFLERLEFGSLLHEFGLLESPLLAEEAPWPPPEGAFLGYRLSRPEPMWAELLALAASAQGRVYRAEDPHGALRGLFEVRGLLAKDLAVVALREGLDLPPTDDPMLLAYLLDPSNTTPEGVARRYGGEWTEDAAKRALLAERLHANLLGRLQGEERLLWLYEEVEKPLSRVLAHMEATGVKLDVAYLENLSLEVAAHMRRLEEEVFRLAGRSFRLNSRDQLERVLFDELGLPPIGKTEKTGKRSTSAAVLEALREVHPIVDKILQYRELAKLKGTYIDRLPALVHPKTGRLHTRFNQTATATGRLSSSDPNLQNIPVRTPLGQKIRRAFVAEEGWRLVALDYRQIELRVLAHLSGDENLIRVFQEGKDIHTQTASWMFGLSAEAIDPLMRRAAKTINFGVLYGMSAFRLSQELGIPYEEAQAFIQKYFQSYPKVKAWIEKTLREGRTRGYVETLFGRRRYVPDLNARVKGKREAAERMAFNMPVQGTAADLMKLAMVRLFPQLREVGARMLLQVHDELLLEAPKERAEEVAALAKEVMEGAWPLAVPLEVEVGIGEDWLAAKG

SEQ ID NO: 4425 - DNA, 2523 bp, synthetic construct
  misc_feature 1..2523: note = Variant of DNA polymerase I from Thermus sp. strain 2.9
  source 1..2523: mol_type = other DNA
atgcaccatcatcatcatcatggcggtagcggcgtgttaccggtgttcgagcctaaaggtcgcgtgcttctggttgatggccatcatctcgcgtatcgtaacttctttgccctgaaaggattaaccaccagcctgggcgagccggtacagggtgtctacggctttgcaaagtcgctcctgaaagctctgaaagaagacggtgatgtggtgattgttgtctttgatgcgaaagcgccaagttttcgccacgaagcgtacgaagcttacaaagccgggcgtgctccaacgccggaagactttcctcgccaattggcgcttatgaaggaattagtggatttgcttggcctcgaacgcttggaagttcccggtttcgaggcagacgacgtattagcgactctcgcaaagaaagccgaacgtgagggctatgaagtccagatcttgacagcagatcgcgatcttttccagcttttatctccgcgcatctcggtgttacacccggaagggcatcgtatcaccccggaatggctctgggagaaatatggtttgcgtcccgaacaatgggtggattttcgcgccttagcaggcgatccgagcgacaatattccgggagttaaaggtatcggcgagaagacggcgctcaagctccttaaagaatgggggtcgttggagaacttgcttaagaatttagatcaggtcaaaccagagtcagtgcgtgagaagattcttgctcacctcgaagacctcaaattaagccgcgaattgtcccgtgtacgcaccgatttgccgctcgaagttgatttcggtcgccgccgcgaacctgactgggagggtcttaaagcgtttttagagcgtcttgaatttggttcgctcttgcatgaattcggccttttagaaagcccgttactggccgaagaagcaccttggccaccgcccgagggcgcgtttttaggttaccgtttgagtcgcccggaaccgatgtgggccgaattactggctcttgcagcgtctgcccagggacgtgtgtatcgcgcggaagaccctcatggtgcgctccgcggcctcttcgaagtccgtggactccttgccaaagacttagctgttgttgcattgcgcttgggtcttgatttacctccgactgatgatccaatgcttcttgcgtacctcttggacccgtcaaacacgacgcccgaaggcgtagcccgtcgttacggcggcgagtggaccgaagatgcagcgaaacgcgcgttattggccgaacgtttgcacgccaatttattaggacgtttgcaaggcgaggaacgtctcctctggctttacgaagaagtggagaaaccattgagtcgcgtgctcgcgcatatggaagctaccggtgtcaaattagacgtggcgtatttggagaatctcagccttgaagttgctgcccacatgcgccgcttggaggaagaagtattccgtttagcaggccgttcctttcgccttaactctcgcgatcagttagaacgtgtgttgttcgatgaacttggtctccctcctatcggcaagacagagaagaccggtaaacgtagcacttcagcggcggttttagaagctcttcgcgaagtccatcccattgtggacaagatcttgcagtaccgcgaactcgcgaaattgaaaggcacctatattgaccgtcttccggcattagtccacccgaaaacgggacgcctccatacccgcttcaaccaaacagccacggcgaccggtcgtttgtcctcctctgatccaaaccttcagaatattccagtacgtaccccattgggccagaagatccgccgtgcgtttgtagctgaggagggttggcgtttagtggccctcgattatcgtcaaattgaattacgtgtccttgcccatctttctggcgatgagaacctcatccgcgtgtttcaggaaggcaaagacattcacactcaaacggcaagctggatgtttggattatcagctgaagcgatcgatcctttgatgcgtcgtgcagcgaagaccatcaatttcggtgttctctacggtatgagtgcctttcgtttgtcgcaggaattaggcattccctatgaagaagctcaggcgttcattcagaaatactttcaaagctatcccaaagttaaagcatggatcgagaagactctccgtgaaggccgcacacgtggttacgtagagaccttatttggacgtcgccgctatgttcccgatttaaacgctcgcgtgaaaggcaagcgtgaagccgccgaacgcatggcgttcaacatgcctgtacagggcacggcagctgacctcatgaaacttgcaatggtgcgcctttttccacaattgcgtgaagttggtgcccgcatgctcttgcaggtccacgatgaactcttgttagaagcgccaaaagagcgtgcggaagaggtggcagccctcgcgaaagaagttatggaaggcgtgtggcccttagcggtgcctcttgaagtcgaagttggtattggcgaggattggctggctgccaaagga

SEQ ID NO: 4426 - protein, 841 aa, synthetic construct
  REGION 1..841: note = Variant of DNA polymerase I from Thermus sp. strain 2.9
MHHHHHHGGSGVLPVFEPKGRVLLVDGHHLAYRNFFALKGLTTSLGEPVQGVYGFAKSLLKALKEDGDVVIVVFDAKAPSFRHEAYEAYKAGRAPTPEDFPRQLALMKELVDLLGLERLEVPGFEADDVLATLAKKAEREGYEVQILTADRDLFQLLSPRISVLHPEGHRITPEWLWEKYGLRPEQWVDFRALAGDPSDNIPGVKGIGEKTALKLLKEWGSLENLLKNLDQVKPESVREKILAHLEDLKLSRELSRVRTDLPLEVDFGRRREPDWEGLKAFLERLEFGSLLHEFGLLESPLLAEEAPWPPPEGAFLGYRLSRPEPMWAELLALAASAQGRVYRAEDPHGALRGLFEVRGLLAKDLAVVALRLGLDLPPTDDPMLLAYLLDPSNTTPEGVARRYGGEWTEDAAKRALLAERLHANLLGRLQGEERLLWLYEEVEKPLSRVLAHMEATGVKLDVAYLENLSLEVAAHMRRLEEEVFRLAGRSFRLNSRDQLERVLFDELGLPPIGKTEKTGKRSTSAAVLEALREVHPIVDKILQYRELAKLKGTYIDRLPALVHPKTGRLHTRFNQTATATGRLSSSDPNLQNIPVRTPLGQKIRRAFVAEEGWRLVALDYRQIELRVLAHLSGDENLIRVFQEGKDIHTQTASWMFGLSAEAIDPLMRRAAKTINFGVLYGMSAFRLSQELGIPYEEAQAFIQKYFQSYPKVKAWIEKTLREGRTRGYVETLFGRRRYVPDLNARVKGKREAAERMAFNMPVQGTAADLMKLAMVRLFPQLREVGARMLLQVHDELLLEAPKERAEEVAALAKEVMEGVWPLAVPLEVEVGIGEDWLAAKG

SEQ ID NO: 4427 - DNA, 2523 bp, synthetic construct
  misc_feature 1..2523: note = Variant of DNA polymerase I from Thermus sp. strain 2.9
  source 1..2523: mol_type = other DNA
atgcaccatcatcatcatcatggcggtagcggcgtgttaccggtgttcgagcctaaaggtcgcgtgcttctggttgatggccatcatctcgcgtatcgtaacttctttgccctgaaaggattaaccaccagcctgggcgagccggtacagggtgtctacggctttgcaaagtcgctcctgaaagctctgaaagaagacggtgatgtggtgattgttgtctttgatgcgaaagcgccaagttttcgccacgaagcgtacgaagcttacaaagccgggcgtgctccaacgccggaagactttcctcgccaattggcgcttatgaaggaattagtggatttgcttggcctcgaacgcttggaagttcccggtttcgaggcagacgacgtattagcgactctcgcaaagaaagccgaacgtgagggctatgaagtccagatcttgacagcagatcgcgatcttttccagcttttatctccgcgcatctcggtgttacacccggaagggcatcgtatcaccccggaatggctctgggagaaatatggtttgcgtcccgaacaatgggtggattttcgcgccttagcaggcgatccgagcgacaatattccgggagttaaaggtatcggcgagaagacggcgctcaagctccttaaagaatgggggtcgttggagaacttgcttaagaatttagatcaggtcaaaccagagtcagtgcgtgagaagattcttgctcacctcgaagacctcaaattaagccgcgaattgtcccgtgtacgcaccgatttgccgctcgaagttgatttcggtcgccgccgcgaacctgactgggagggtcttaaagcgtttttagagcgtcttgaatttggttcgctcttgcatgaattcggccttttagaaagcccgttactggccgaagaagcaccttggccaccgcccgagggcgcgtttttaggttaccgtttgagtcgcccggaaccgatgtgggccgaattactggctcttgcagcgtctgcccagggacgtgtgtatcgcgcggaagaccctcatggtgcgctccgcggcctcttcgaagtccgtggactccttgccaaagacttagctgttgttgcattgcgcgaaggtcttgatttacctccgactgatgatccaatgcttcttgcgtacctcttggacccgtcaaacacgacgcccgaaggcgtagcccgtcgttacggcggcgagtggaccgaagatgcagcgaaacgcgcgttattggccgaacgtttgcacgccaatttattaggacgtttgcaaggcgaggaacgtctcctctggctttacgaagaagtggagaaaccattgagtcgcgtgctcgcgcatatggaagctaccggtgtcaaattagacgtggcgtatttggagaatctcagccttgaagttgctgcccacatgcgccgcttggaggaagaagtattccgtttagcaggccgttcctttcgccttaactctcgcgatcagttagaacgtgtgttgttcgatgaacttggtctccctcctatcggcaagacagagaagaccggtaaacgtagcacttcagcggcggttttagaagctcttcgcgaagtccatcccattgtggacaagatcttgcagtaccgcgaactcgcgaaattgaaaggcacctatattgaccgtcttccggcattagtccacccgaaaacgggacgcctccatacccgcttcaaccaaacagccacggcgaccggtcgtttgtcctcctctgatccaaacattcagaatattccagtacgtaccccattgggccagaagatccgccgtgcgtttgtagctgaggagggttggcgtttagtggccctcgattatcgtcaaattgaattacgtgtccttgcccatctttctggcgatgagaacctcatccgcgtgtttcaggaaggcaaagacattcacactcaaacgacaagctggatgtttggattatcagctgaagcgatcgatcctttgatgcgtcgtgcagcgaagaccatcaatttcggtgttctctacggtatgagtgcctttcgtttgtcgcaggaattaggcattccctatgaagaagctcaggcgttcattcagaaatactttcaaagctatcccaaagttaaagcatggatcgagaagactctccgtgaaggccgcacacgtggttacgtagagaccttatttggacgtcgccgctatgttcccgatttaaacgctcgcgtgaaaggcaagcgtgaagccgccgaacgcatggcgttcaacatgcctgtacagggcacggcagctgacctcatgaaacttgcaatggtgcgcctttttccacaattgcgtgaagttggtgcccgcatgctcttgcaggtccacgatgaactcttgttagaagcgccaaaagagcgtgcggaagaggtggcagccctcgcgaaagaagttatggaaggcgtgtggcccttagcggtgcctcttgaagtcgaagttggtattggcgaggattggctggctgccaaagga

SEQ ID NO: 4428 - protein, 841 aa, synthetic construct
  REGION 1..841: note = Variant of DNA polymerase I from Thermus sp. strain 2.9
MHHHHHHGGSGVLPVFEPKGRVLLVDGHHLAYRNFFALKGLTTSLGEPVQGVYGFAKSLLKALKEDGDVVIVVFDAKAPSFRHEAYEAYKAGRAPTPEDFPRQLALMKELVDLLGLERLEVPGFEADDVLATLAKKAEREGYEVQILTADRDLFQLLSPRISVLHPEGHRITPEWLWEKYGLRPEQWVDFRALAGDPSDNIPGVKGIGEKTALKLLKEWGSLENLLKNLDQVKPESVREKILAHLEDLKLSRELSRVRTDLPLEVDFGRRREPDWEGLKAFLERLEFGSLLHEFGLLESPLLAEEAPWPPPEGAFLGYRLSRPEPMWAELLALAASAQGRVYRAEDPHGALRGLFEVRGLLAKDLAVVALREGLDLPPTDDPMLLAYLLDPSNTTPEGVARRYGGEWTEDAAKRALLAERLHANLLGRLQGEERLLWLYEEVEKPLSRVLAHMEATGVKLDVAYLENLSLEVAAHMRRLEEEVFRLAGRSFRLNSRDQLERVLFDELGLPPIGKTEKTGKRSTSAAVLEALREVHPIVDKILQYRELAKLKGTYIDRLPALVHPKTGRLHTRFNQTATATGRLSSSDPNIQNIPVRTPLGQKIRRAFVAEEGWRLVALDYRQIELRVLAHLSGDENLIRVFQEGKDIHTQTTSWMFGLSAEAIDPLMRRAAKTINFGVLYGMSAFRLSQELGIPYEEAQAFIQKYFQSYPKVKAWIEKTLREGRTRGYVETLFGRRRYVPDLNARVKGKREAAERMAFNMPVQGTAADLMKLAMVRLFPQLREVGARMLLQVHDELLLEAPKERAEEVAALAKEVMEGVWPLAVPLEVEVGIGEDWLAAKG

SEQ ID NO: 4429 - DNA, 2523 bp, synthetic construct
  misc_feature 1..2523: note = Variant of DNA polymerase I from Thermus sp. strain 2.9
  source 1..2523: mol_type = other DNA
atgcaccatcatcatcatcatggcggtagcggcgtgttaccggtgttcgagcctaaaggtcgcgtgcttctggttgatggccatcatctcgcgtatcgtaacttctttgccctgaaaggattaaccaccagcctgggcgagccggtacagggtgtctacggctttgcaaagtcgctcctgaaagctctgaaagaagacggtgatgtggtgattgttgtctttgatgcgaaagcgccaagttttcgccacgaagcgtacgaagcttacaaagccgggcgtgctccaacgccggaagactttcctcgccaattggcgcttatgaaggaattagtggatttgcttggcctcgaacgcttggaagttcccggtttcgaggcagacgacgtattagcgactctcgcaaagaaagccgaacgtgagggctatgaagtccagatcttgacagcagatcgcgatcttttccagcttttatctccgcgcatctcggtgttacacccggaagggcatcgtatcaccccggaatggctctgggagaaatatggtttgcgtcccgaacaatgggtggattttcgcgccttagcaggcgatccgagcgacaatattccgggagttaaaggtatcggcgagaagacggcgctcaagctccttaaagaatgggggtcgttggagaacttgcttaagaatttagatcaggtcaaaccagagtcagtgcgtgagaagattcttgctcacctcgaagacctcaaattaagccgcgaattgtcccgtgtacgcaccgatttgccgctcgaagttgatttcggtcgccgccgcgaacctgactgggagggtcttaaagcgtttttagagcgtcttgaatttggttcgctcttgcatgaattcggccttttagaaagcccgttactggccgaagaagcaccttggccaccgcccgagggcgcgtttttaggttaccgtttgagtcgcccggaaccgatgtgggccgaattactggctcttgcagcgtctgcccagggacgtgtgtatcgcgcggaagaccctcatggtgcgctccgcggcctcttcgaagtccgtggactccttgccaaagacttagctgttgttgcattgcgcgaaggtcttgatttacctccgactgatgatccaatgcttcttgcgtacctcttggacccgtcaaacacgacgcccgaaggcgtagcccgtcgttacggcggcgagtggaccgaagatgcagcgaaacgcgcgttattggccgaacgtttgcacgccaatttattaggacgtttgcaaggcgaggaacgtctcctctggctttacgaagaagtggagaaaccattgagtcgcgtgctcgcgcatatggaagctaccggtgtcaaattagacgtggcgtatttggagaatctcagccttgaagttgctgcccacatgcgccgcttggaggaagaagtattccgtttagcaggccgttcctttcgccttaactctcgcgatcagttagaacgtgtgttgttcgatgaacttggtctccctcctatcggcaagacagagaagaccggtaaatggagcacttcagcggcggttttagaagctcttcgcgaagtccatcccattgtggacaagatcttgcagtaccgcgaactcgcgaaattgaaaggcacctatattgaccgtcttccggcattagtccacccgaaaacgggacgcctccatacccgcttcaaccaaacagccacggcgaccggtcgtttgtcctcctctgatccaaaccttcagaatattccagtacgtaccccattgggccagaagatccgccgtgcgtttgtagctgaggagggttggcgtttagtggccctcgattatcgtcaaattgaattacgtgtccttgcccatctttctggcgatgagaacctcatccgcgtgtttcaggaaggcaaagacattcacactcaaacggcaagctggatgtttggattatcagctgaagcgatcgatcctttgatgcgtcgtgcagcgaagaccatcaatttcggtgttctctacggtatgagtgcctttcgtttgtcgcaggaattaggcattccctatgaagaagctcaggcgttcattcagaaatactttcaaagctatcccaaagttaaagcatggatcgagaagactctccgtgaaggccgcacacgtggttacgtagagaccttatttggacgtcgccgctatgttcccgatttaaacgctcgcgtgaaaggcaagcgtgaagccgccgaacgcatggcgttcaacatgcctgtacagggcacggcagctgacctcatgaaacttgcaatggtgcgcctttttccacaattgcgtgaagttggtgcccgcatgctcttgcaggtccacgatgaactcttgttagaagcgccaaaagagcgtgcggaagaggtggcagccctcgcgaaagaagttatggaaggcgtgtggcccttagcggtgcctcttgaagtcgaagttggtattggcgaggattggctggctgccaaagga

SEQ ID NO: 4430 - protein, 841 aa, synthetic construct
  REGION 1..841: note = Variant of DNA polymerase I from Thermus sp. strain 2.9
MHHHHHHGGSGVLPVFEPKGRVLLVDGHHLAYRNFFALKGLTTSLGEPVQGVYGFAKSLLKALKEDGDVVIVVFDAKAPSFRHEAYEAYKAGRAPTPEDFPRQLALMKELVDLLGLERLEVPGFEADDVLATLAKKAEREGYEVQILTADRDLFQLLSPRISVLHPEGHRITPEWLWEKYGLRPEQWVDFRALAGDPSDNIPGVKGIGEKTALKLLKEWGSLENLLKNLDQVKPESVREKILAHLEDLKLSRELSRVRTDLPLEVDFGRRREPDWEGLKAFLERLEFGSLLHEFGLLESPLLAEEAPWPPPEGAFLGYRLSRPEPMWAELLALAASAQGRVYRAEDPHGALRGLFEVRGLLAKDLAVVALREGLDLPPTDDPMLLAYLLDPSNTTPEGVARRYGGEWTEDAAKRALLAERLHANLLGRLQGEERLLWLYEEVEKPLSRVLAHMEATGVKLDVAYLENLSLEVAAHMRRLEEEVFRLAGRSFRLNSRDQLERVLFDELGLPPIGKTEKTGKWSTSAAVLEALREVHPIVDKILQYRELAKLKGTYIDRLPALVHPKTGRLHTRFNQTATATGRLSSSDPNLQNIPVRTPLGQKIRRAFVAEEGWRLVALDYRQIELRVLAHLSGDENLIRVFQEGKDIHTQTASWMFGLSAEAIDPLMRRAAKTINFGVLYGMSAFRLSQELGIPYEEAQAFIQKYFQSYPKVKAWIEKTLREGRTRGYVETLFGRRRYVPDLNARVKGKREAAERMAFNMPVQGTAADLMKLAMVRLFPQLREVGARMLLQVHDELLLEAPKERAEEVAALAKEVMEGVWPLAVPLEVEVGIGEDWLAAKG

SEQ ID NO: 4431 - DNA, 2523 bp, synthetic construct
  misc_feature 1..2523: note = Variant of DNA polymerase I from Thermus sp. strain 2.9
  source 1..2523: mol_type = other DNA
atgcaccatcatcatcatcatggcggtagcggcgtgttaccggtgttcgagcctaaaggtcgcgtgcttctggttgatggccatcatctcgcgtatcgtaacttctttgccctgaaaggattaaccaccagcctgggcgagccggtacagggtgtctacggctttgcaaagtcgctcctgaaagctctgaaagaagacggtgatgtggtgattgttgtctttgatgcgaaagcgccaagttttcgccacgaagcgtacgaagcttacaaagccgggcgtgctccaacgccggaagactttcctcgccaattggcgcttatgaaggaattagtggatttgcttggcctcgaacgcttggaagttcccggtttcgaggcagacgacgtattagcgactctcgcaaagaaagccgaacgtgagggctatgaagtccagatcttgacagcagatcgcgatcttttccagcttttatctccgcgcatctcggtgttacacccggaagggcatcgtatcaccccggaatggctctgggagaaatatggtttgcgtcccgaacaatgggtggattttcgcgccttagcaggcgatccgagcgacaatattccgggagttaaaggtatcggcgagaagacggcgctcaagctccttaaagaatgggggtcgttggagaacttgcttaagaatttagatcaggtcaaaccagagtcagtgcgtgagaagattcttgctcacctcgaagacctcaaattaagccgcgaattgtcccgtgtacgcaccgatttgccgctcgaagttgatttcggtcgccgccgcgaacctgactgggagggtcttaaagcgtttttagagcgtcttgaatttggttcgctcttgcatgaattcggccttttagaaagcccgttactggccgaagaagcaccttggccaccgcccgagggcgcgtttttaggttaccgtttgagtcgcccggaaccgatgtgggccgaattactggctcttgcagcgtctgcccagggacgtgtgtatcgcgcggaagaccctcatggtgcgctccgcggcctcttcgaagtccgtggactccttgccaaagacttagctgttgttgcattgcgcgaaggtcttgatttacctccgactgatgatccaatgcttcttgcgtacctcttggacccgtcaaacacgacgcccgaaggcgtagcccgtcgttacggcggcgagtggaccgaagatgcagcgaaacgcgcgttattggccgaacgtttgcacgccaatttattaggacgtttgcaaggcgaggaacgtctcctctggctttacgaagaagtggagaaaccattgagtcgcgtgctcgcgcatatggaagctaccggtgtcaaattagacgtggcgtatttggagaatctcagccttgaagttgctgcccacatgcgccgcttggaggaagaagtattccgtttagcaggccgttcctttcgccttaactctcgcgatcagttagaacgtgtgttgttcgatgaacttggtctccctcctatcggcaagacagagaagaccggtaaacgtagcacttcagcggcggttttagaagctcttcgcgaagtccatcccattgtggacaagatcttgcagtaccgcgaactcgcgaaattgaaaggcacctatttggaccgtcttccggcattagtccacccgaaaacgggacgcctccatacccgcttcaaccaaacagccacggcgaccggtcgtttgtcctcctctgatccaaaccttcagaatattccagtacgtaccccattgggccagaagatccgccgtgcgtttgtagctgaggagggttggcgtttagtggccctcgattatcgtcaaattgaattacgtgtccttgcccatctttctggcgatgagaacctcatccgcgtgtttcaggaaggcaaagacattcacactcaaacggcaagctggatgtttggattatcagctgaagcgatcgatcctttgatgcgtcgtgcagcgaagaccatcaatttcggtgttctctacggtatgagtgcctttcgtttgtcgcaggaattaggcattccctatgaagaagctcaggcgttcattcagaaatactttcaaagctatcccaaagttaaagcatggatcgagaagactctccgtgaaggccgcacacgtggttacgtagagaccttatttggacgtcgccgctatgttcccgatttaaacgctcgcgtgaaaggcaagcgtgaagccgccgaacgcatggcgttcaacatgcctgtacagggcacggcagctgacctcatgaaacttgcaatggtgcgcctttttccacaattgcgtgaagttggtgcccgcatgctcttgcaggtccacgatgaactcttgttagaagcgccaaaagagcgtgcggaagaggtggcagccctcgcgaaagaagttatggaaggcgtgtggcccttagcggtgcctcttgaagtcgaagttggtattggcgaggattggctggctgccaaagga

SEQ ID NO: 4432 - protein, 841 aa, synthetic construct
  REGION 1..841: note = Variant of DNA polymerase I from Thermus sp. strain 2.9
MHHHHHHGGSGVLPVFEPKGRVLLVDGHHLAYRNFFALKGLTTSLGEPVQGVYGFAKSLLKALKEDGDVVIVVFDAKAPSFRHEAYEAYKAGRAPTPEDFPRQLALMKELVDLLGLERLEVPGFEADDVLATLAKKAEREGYEVQILTADRDLFQLLSPRISVLHPEGHRITPEWLWEKYGLRPEQWVDFRALAGDPSDNIPGVKGIGEKTALKLLKEWGSLENLLKNLDQVKPESVREKILAHLEDLKLSRELSRVRTDLPLEVDFGRRREPDWEGLKAFLERLEFGSLLHEFGLLESPLLAEEAPWPPPEGAFLGYRLSRPEPMWAELLALAASAQGRVYRAEDPHGALRGLFEVRGLLAKDLAVVALREGLDLPPTDDPMLLAYLLDPSNTTPEGVARRYGGEWTEDAAKRALLAERLHANLLGRLQGEERLLWLYEEVEKPLSRVLAHMEATGVKLDVAYLENLSLEVAAHMRRLEEEVFRLAGRSFRLNSRDQLERVLFDELGLPPIGKTEKTGKRSTSAAVLEALREVHPIVDKILQYRELAKLKGTYLDRLPALVHPKTGRLHTRFNQTATATGRLSSSDPNLQNIPVRTPLGQKIRRAFVAEEGWRLVALDYRQIELRVLAHLSGDENLIRVFQEGKDIHTQTASWMFGLSAEAIDPLMRRAAKTINFGVLYGMSAFRLSQELGIPYEEAQAFIQKYFQSYPKVKAWIEKTLREGRTRGYVETLFGRRRYVPDLNARVKGKREAAERMAFNMPVQGTAADLMKLAMVRLFPQLREVGARMLLQVHDELLLEAPKERAEEVAALAKEVMEGVWPLAVPLEVEVGIGEDWLAAKG

SEQ ID NO: 4433 - DNA, 2523 bp, synthetic construct
  misc_feature 1..2523: note = Variant of DNA polymerase I from Thermus sp. strain 2.9
  source 1..2523: mol_type = other DNA
atgcaccatcatcatcatcatggcggtagcggcgtgttaccggtgttcgagcctaaaggtcgcgtgcttctggttgatggccatcatctcgcgtatcgtaacttctttgccctgaaaggattaaccaccagcctgggcgagccggtacagggtgtctacggctttgcaaagtcgctcctgaaagctctgaaagaagacggtgatgtggtgattgttgtctttgatgcgaaagcgccaagttttcgccacgaagcgtacgaagcttacaaagccgggcgtgctccaacgccggaagactttcctcgccaattggcgcttatgaaggaattagtggatttgcttggcctcgaacgcttggaagttcccggtttcgaggcagacgacgtattagcgactctcgcaaagaaagccgaacgtgagggctatgaagtccagatcttgacagcagatcgcgatcttttccagcttttatctccgcgcatctcggtgttacacccggaagggcatcgtatcaccccggaatggctctgggagaaatatggtttgcgtcccgaacaatgggtggattttcgcgccttagcaggcgatccgagcgacaatattccgggagttaaaggtatcggcgagaagacggcgctcaagctccttaaagaatgggggtcgttggagaacttgcttaagaatttagatcaggtcaaaccagagtcagtgcgtgagaagattcttgctcacctcgaagacctcaaattaagccgcgaattgtcccgtgtacgcaccgatttgccgctcgaagttgatttcggtcgccgccgcgaacctgactgggagggtcttaaagcgtttttagagcgtcttgaatttggttcgctcttgcatgaattcggccttttagaaagcccgttactggccgaagaagcaccttggccaccgcccgagggcgcgtttttaggttaccgtttgagtcgcccggaaccgatgtgggccgaattactggctcttgcagcgtctgcccagggacgtgtgtatcgcgcggaagaccctcatggtgcgctccgcggcctcttcgaagtccgtggactccttgccaaagacttagctgttgttgcattgcgcgaaggtcttgatttacctccgactgatgatccaatgcttcttgcgtacctcttggacccgtcaaacacgacgcccgaaggcgtagcccgtcgttacggcggcgagtggaccgaagatgcagcgaaacgcgcgttattggccgaacgtttgcacgccaatttattaggacgtttgcaaggcgaggaacgtctcctctggctttacgaagaagtggagaaaccattgagtcgcgtgctcgcgcatatggaagctaccggtgtcaaattagacgtggcgtatttggagaattggagccttgaagttgctgcccacatgcgccgcttggaggaagaagtattccgtttagcaggccgttcctttcgccttaactctcgcgatcagttagaacgtgtgttgttcgatgaacttggtctccctcctatcggcaagacagagaagaccggtaaacgtagcacttcagcggcggttttagaagctcttcgcgaagtccatcccattgtggacaagatcttgcagtaccgcgaactcgcgaaattgaaaggcacctatattgaccgtcttccggcattagtccacccgaaaacgggacgcctccatacccgcttcaaccaaacagccacggcgaccggtcgtttgtcctcctctgatccaaaccttcagaatattccagtacgtaccccattgggccagaagatccgccgtgcgtttgtagctgaggagggttggcgtttagtggccctcgattatcgtcaaattgaattacgtgtccttgcccatctttctggcgatgagaacctcatccgcgtgtttcaggaaggcaaagacattcacactcaaacggcaagctggatgtttggattatcagctgaagcgatcgatcctttgatgcgtcgtgcagcgaagaccatcaatttcggtgttctctacggtatgagtgcctttcgtttgtcgcaggaattaggcattccctatgaagaagctcaggcgttcattcagaaatactttcaaagctatcccaaagttaaagcatggatcgagaagactctccgtgaaggccgcacacgtggttacgtagagaccttatttggacgtcgccgctatgttcccgatttaaacgctcgcgtgaaaggcaagcgtgaagccgccgaacgcatggcgttcaacatgcctgtacagggcacggcagctgacctcatgaaacttgcaatggtgcgcctttttccacaattgcgtgaagttggtgcccgcatgctcttgcaggtccacgatgaactcttgttagaagcgccaaaagagcgtgcggaagaggtggcagccctcgcgaaagaagttatggaaggcgtgtggcccttagcggtgcctcttgaagtcgaagttggtattggcgaggattggctggctgccaaagga

SEQ ID NO: 4434 - protein, 841 aa, synthetic construct
  REGION 1..841: note = Variant of DNA polymerase I from Thermus sp. strain 2.9
MHHHHHHGGSGVLPVFEPKGRVLLVDGHHLAYRNFFALKGLTTSLGEPVQGVYGFAKSLLKALKEDGDVVIVVFDAKAPSFRHEAYEAYKAGRAPTPEDFPRQLALMKELVDLLGLERLEVPGFEADDVLATLAKKAEREGYEVQILTADRDLFQLLSPRISVLHPEGHRITPEWLWEKYGLRPEQWVDFRALAGDPSDNIPGVKGIGEKTALKLLKEWGSLENLLKNLDQVKPESVREKILAHLEDLKLSRELSRVRTDLPLEVDFGRRREPDWEGLKAFLERLEFGSLLHEFGLLESPLLAEEAPWPPPEGAFLGYRLSRPEPMWAELLALAASAQGRVYRAEDPHGALRGLFEVRGLLAKDLAVVALREGLDLPPTDDPMLLAYLLDPSNTTPEGVARRYGGEWTEDAAKRALLAERLHANLLGRLQGEERLLWLYEEVEKPLSRVLAHMEATGVKLDVAYLENWSLEVAAHMRRLEEEVFRLAGRSFRLNSRDQLERVLFDELGLPPIGKTEKTGKRSTSAAVLEALREVHPIVDKILQYRELAKLKGTYIDRLPALVHPKTGRLHTRFNQTATATGRLSSSDPNLQNIPVRTPLGQKIRRAFVAEEGWRLVALDYRQIELRVLAHLSGDENLIRVFQEGKDIHTQTASWMFGLSAEAIDPLMRRAAKTINFGVLYGMSAFRLSQELGIPYEEAQAFIQKYFQSYPKVKAWIEKTLREGRTRGYVETLFGRRRYVPDLNARVKGKREAAERMAFNMPVQGTAADLMKLAMVRLFPQLREVGARMLLQVHDELLLEAPKERAEEVAALAKEVMEGVWPLAVPLEVEVGIGEDWLAAKG

SEQ ID NO: 4435 - DNA, 2523 bp, synthetic construct
  misc_feature 1..2523: note = Variant of DNA polymerase I from Thermus sp. strain 2.9
  source 1..2523: mol_type = other DNA
atgcaccatcatcatcatcatggcggtagcggcgtgttaccggtgttcgagcctaaaggtcgcgtgcttctggttgatggccatcatctcgcgtatcgtaacttctttgccctgaaaggattaaccaccagcctgggcgagccggtacagggtgtctacggctttgcaaagtcgctcctgaaagctctgaaagaagacggtgatgtggtgattgttgtctttgatgcgaaagcgccaagttttcgccacgaagcgtacgaagcttacaaagccgggcgtgctccaacgccggaagactttcctcgccaattggcgcttatgaaggaattagtggatttgcttggcctcgaacgcttggaagttcccggtttcgaggcagacgacgtattagcgactctcgcaaagaaagccgaacgtgagggctatgaagtccagatcttgacagcagatcgcgatcttttccagcttttatctccgcgcatctcggtgttacacccggaagggcatcgtatcaccccggaatggctctgggagaaatatggtttgcgtcccgaacaatgggtggattttcgcgccttagcaggcgatccgagcgacaatattccgggagttaaaggtatcggcgagaagacggcgctcaagctccttaaagaatgggggtcgttggagaacttgcttaagaatttagatcaggtcaaaccagagtcagtgcgtgagaagattcttgctcacctcgaagacctcaaattaagccgcgaattgtcccgtgtacgcaccgatttgccgctcgaagttgatttcggtcgccgccgcgaacctgactgggagggtcttaaagcgtttttagagcgtcttgaatttggttcgctcttgcatgaattcggccttttagaaagcccgttactggccgaagaagcaccttggccaccgcccgagggcgcgtttttaggttaccgtttgagtcgcccggaaccgatgtgggccgaattactggctcttgcagcgtctgcccagggacgtgtgtatcgcgcggaagaccctcatggtgcgctccgcggcctcttcgaagtccgtggactccttgccaaagacttagctgttgttgcattgcgcgaaggtcttgatttacctccgactgatgatccaatgcttcttgcgtacctcttggacccgtcaaacacgacgcccgaaggcgtagcccgtcgttacggcggcgagtggaccgaagatgcagcgaaacgcgcgttattggccgaacgtttgcacgccaatttattaggacgtttgcaaggcgaggaacgtctcctctggctttacgaagaagtggagaaaccattgagtcgcgtgctcgcgcatatggaagctaccggtgtcaaattagacgtggcgtatttggagaatctcagccttgaagttgctgcccacatgcgccgcttggaggaagaagtattccgtttagcaggccgttcctttcgccttaactctcgcgatcagttagaacgtgtgttgttcgatgaacttggtctccctcctatcggcaagacagagaagaccggtaaacgtagcacttcagcggcggttttagaagctcttcgcgaagtccatcccattgtggacaagatcttgcagtaccgcgaactcgcgaaattgaaaggcacctatattgaccgtcttagggcattagtccacccgaaaacgggacgcctccatacccgcttcaaccaaacagccacggcgaccggtcgtttgtcctcctctgatccaaaccttcagaatattccagtacgtaccccattgggccagaagatccgccgtgcgtttgtagctgaggagggttggcgtttagtggccctcgattatcgtcaaattgaattacgtgtccttgcccatctttctggcgatgagaacctcatccgcgtgtttcaggaaggcaaagacattcacactcaaacggcaagctggatgtttggattatcagctgaagcgatcgatcctttgatgcgtcgtgcagcgaagaccatcaatttcggtgttctctacggtatgagtgcctttcgtttgtcgcaggaattaggcattccctatgaagaagctcaggcgttcattcagaaatactttcaaagctatcccaaagttaaagcatggatcgagaagactctccgtgaaggccgcacacgtggttacgtagagaccttatttggacgtcgccgctatgttcccgatttaaacgctcgcgtgaaaggcaagcgtgaagccgccgaacgcatggcgttcaacatgcctgtacagggcacggcagctgacctcatgaaacttgcaatggtgcgcctttttccacaattgcgtgaagttggtgcccgcatgctcttgcaggtccacgatgaactcttgttagaagcgccaaaagagcgtgcggaagaggtggcagccctcgcgaaagaagttatggaaggcgtgtggcccttagcggtgcctcttgaagtcgaagttggtattggcgaggattggctggctgccaaagga

SEQ ID NO: 4436 - protein, 841 aa, synthetic construct
  REGION 1..841: note = Variant of DNA polymerase I from Thermus sp. strain 2.9
MHHHHHHGGSGVLPVFEPKGRVLLVDGHHLAYRNFFALKGLTTSLGEPVQGVYGFAKSLLKALKEDGDVVIVVFDAKAPSFRHEAYEAYKAGRAPTPEDFPRQLALMKELVDLLGLERLEVPGFEADDVLATLAKKAEREGYEVQILTADRDLFQLLSPRISVLHPEGHRITPEWLWEKYGLRPEQWVDFRALAGDPSDNIPGVKGIGEKTALKLLKEWGSLENLLKNLDQVKPESVREKILAHLEDLKLSRELSRVRTDLPLEVDFGRRREPDWEGLKAFLERLEFGSLLHEFGLLESPLLAEEAPWPPPEGAFLGYRLSRPEPMWAELLALAASAQGRVYRAEDPHGALRGLFEVRGLLAKDLAVVALREGLDLPPTDDPMLLAYLLDPSNTTPEGVARRYGGEWTEDAAKRALLAERLHANLLGRLQGEERLLWLYEEVEKPLSRVLAHMEATGVKLDVAYLENLSLEVAAHMRRLEEEVFRLAGRSFRLNSRDQLERVLFDELGLPPIGKTEKTGKRSTSAAVLEALREVHPIVDKILQYRELAKLKGTYIDRLRALVHPKTGRLHTRFNQTATATGRLSSSDPNLQNIPVRTPLGQKIRRAFVAEEGWRLVALDYRQIELRVLAHLSGDENLIRVFQEGKDIHTQTASWMFGLSAEAIDPLMRRAAKTINFGVLYGMSAFRLSQELGIPYEEAQAFIQKYFQSYPKVKAWIEKTLREGRTRGYVETLFGRRRYVPDLNARVKGKREAAERMAFNMPVQGTAADLMKLAMVRLFPQLREVGARMLLQVHDELLLEAPKERAEEVAALAKEVMEGVWPLAVPLEVEVGIGEDWLAAKG

SEQ ID NO: 4437 - DNA, 2523 bp, synthetic construct
  misc_feature 1..2523: note = Variant of DNA polymerase I from Thermus sp. strain 2.9
  source 1..2523: mol_type = other DNA
atgcaccatcatcatcatcatggcggtagcggcgtgttaccggtgttcgagcctaaaggtcgcgtgcttctggttgatggccatcatctcgcgtatcgtaacttctttgccctgaaaggattaaccaccagcctgggcgagccggtacagggtgtctacggctttgcaaagtcgctcctgaaagctctgaaagaagacggtgatgtggtgattgttgtctttgatgcgaaagcgccaagttttcgccacgaagcgtacgaagcttacaaagccgggcgtgctccaacgccggaagactttcctcgccaattggcgcttatgaaggaattagtggatttgcttggcctcgaacgcttggaagttcccggtttcgaggcagacgacgtattagcgactctcgcaaagaaagccgaacgtgagggctatgaagtccagatcttgacagcagatcgcgatcttttccagcttttatctccgcgcatctcggtgttacacccggaagggcatcgtatcaccccggaatggctctgggagaaatatggtttgcgtcccgaacaatgggtggattttcgcgccttagcaggcgatccgagcgacaatattccgggagttaaaggtatcggcgagaagacggcgctcaagctccttaaagaatgggggtcgttggagaacttgcttaagaatttagatcaggtcaaaccagagtcagtgcgtgagaagattcttgctcacctcgaagacctcaaattaagccgcgaattgtcccgtgtacgcaccgatttgccgctcgaagttgatttcggtcgccgccgcgaacctgactgggagggtcttaaagcgtttttagagcgtcttgaatttggttcgctcttgcatgaattcggccttttagaaagcccgttactggccgaagaagcaccttggccaccgcccgagggcgcgtttttaggttaccgtttgagtcgcccggaaccgatgtgggccgaattactggctcttgcagcgtctgcccagggacgtgtgtatcgcgcggaagaccctcatggtgcgctccgcggcctcttcgaagtccgtggactccttgccaaagacttagctgttgttgcattgcgcgaaggtcttgatttacctccgactgatgatccaatgcttcttgcgtacctcttggacccgtcaaacacgacgcccgaaggcgtagcccgtcgttacggcggcgagtggaccgaagatgcagcgaaacgcgcgttattggccgaacgtttgcacgccaatttattaggacgtttgcaacaggaggaacgtctcctctggctttacgaagaagtggagaaaccattgagtcgcgtgctcgcgcatatggaagctaccggtgtcaaattagacgtggcgtatttggagaatctcagccttgaagttgctgcccacatgcgccgcttggaggaagaagtattccgtttagcaggccgttcctttcgccttaactctcgcgatcagttagaacgtgtgttgttcgatgaacttggtctccctcctatcggcaagacagagaagaccggtaaacgtagcacttcagcggcggttttagaagctcttcgcgaagtccatcccattgtggacaagatcttgcagtaccgcgaactcgcgaaattgaaaggcacctatattgaccgtcttccggcattagtccacccgaaaacgggacgcctccatacccgcttcaaccaaacagccacggcgaccggtcgtttgtcctcctctgatccaaaccttcagaatattccagtacgtaccccattgggccagaagatccgccgtgcgtttgtagctgaggagggttggcgtttagtggccctcgattatcgtcaaattgaattacgtgtccttgcccatctttctggcgatgagaacctcatccgcgtgtttcaggaaggcaaagacattcacactcaaacggcaagctggatgtttggattatcagctgaagcgatcgatcctttgatgcgtcgtgcagcgaagaccatcaatttcggtgttctctacggtatgagtgcctttcgtttgtcgcaggaattaggcattccctatgaagaagctcaggcgttcattcagaaatactttcaaagctatcccaaagttaaagcatggatcgagaagactctccgtgaaggccgcacacgtggttacgtagagaccttatttggacgtcgccgctatgttcccgatttaaacgctcgcgtgaaaggcaagcgtgaagccgccgaacgcatggcgttcaacatgcctgtacagggcacggcagctgacctcatgaaacttgcaatggtgcgcctttttccacaattgcgtgaagttggtgcccgcatgctcttgcaggtccacgatgaactcttgttagaagcgccaaaagagcgtgcggaagaggtggcagccctcgcgaaagaagttatggaaggcgtgtggcccttagcggtgcctcttgaagtcgaagttggtattggcgaggattggctggctgccaaagga

SEQ ID NO: 4438 - protein, 841 aa, synthetic construct
  REGION 1..841: note = Variant of DNA polymerase I from Thermus sp. strain 2.9
MHHHHHHGGSGVLPVFEPKGRVLLVDGHHLAYRNFFALKGLTTSLGEPVQGVYGFAKSLLKALKEDGDVVIVVFDAKAPSFRHEAYEAYKAGRAPTPEDFPRQLALMKELVDLLGLERLEVPGFEADDVLATLAKKAEREGYEVQILTADRDLFQLLSPRISVLHPEGHRITPEWLWEKYGLRPEQWVDFRALAGDPSDNIPGVKGIGEKTALKLLKEWGSLENLLKNLDQVKPESVREKILAHLEDLKLSRELSRVRTDLPLEVDFGRRREPDWEGLKAFLERLEFGSLLHEFGLLESPLLAEEAPWPPPEGAFLGYRLSRPEPMWAELLALAASAQGRVYRAEDPHGALRGLFEVRGLLAKDLAVVALREGLDLPPTDDPMLLAYLLDPSNTTPEGVARRYGGEWTEDAAKRALLAERLHANLLGRLQQEERLLWLYEEVEKPLSRVLAHMEATGVKLDVAYLENLSLEVAAHMRRLEEEVFRLAGRSFRLNSRDQLERVLFDELGLPPIGKTEKTGKRSTSAAVLEALREVHPIVDKILQYRELAKLKGTYIDRLPALVHPKTGRLHTRFNQTATATGRLSSSDPNLQNIPVRTPLGQKIRRAFVAEEGWRLVALDYRQIELRVLAHLSGDENLIRVFQEGKDIHTQTASWMFGLSAEAIDPLMRRAAKTINFGVLYGMSAFRLSQELGIPYEEAQAFIQKYFQSYPKVKAWIEKTLREGRTRGYVETLFGRRRYVPDLNARVKGKREAAERMAFNMPVQGTAADLMKLAMVRLFPQLREVGARMLLQVHDELLLEAPKERAEEVAALAKEVMEGVWPLAVPLEVEVGIGEDWLAAKG

SEQ ID NO: 4439 - DNA, 2523 bp, synthetic construct
  misc_feature 1..2523: note = Variant of DNA polymerase I from Thermus sp. strain 2.9
  source 1..2523: mol_type = other DNA
atgcaccatcatcatcatcatggcggtagcggcgtgttaccggtgttcgagcctaaaggtcgcgtgcttctggttgatggccatcatctcgcgtatcgtaacttctttgccctgaaaggattaaccaccagcctgggcgagccggtacagggtgtctacggctttgcaaagtcgctcctgaaagctctgaaagaagacggtgatgtggtgattgttgtctttgatgcgaaagcgccaagttttcgccacgaagcgtacgaagcttacaaagccgggcgtgctccaacgccggaagactttcctcgccaattggcgcttatgaaggaattagtggatttgcttggcctcgaacgcttggaagttcccggtttcgaggcagacgacgtattagcgactctcgcaaagaaagccgaacgtgagggctatgaagtccagatcttgacagcagatcgcgatcttttccagcttttatctccgcgcatctcggtgttacacccggaagggcatcgtatcaccccggaatggctctgggagaaatatggtttgcgtcccgaacaatgggtggattttcgcgccttagcaggcgatccgagcgacaatattccgggagttaaaggtatcggcgagaagacggcgctcaagctccttaaagaatgggggtcgttggagaacttgcttaagaatttagatcaggtcaaaccagagtcagtgcgtgagaagattcttgctcacctcgaagacctcaaattaagccgcgaattgtcccgtgtacgcaccgatttgccgctcgaagttgatttcggtcgccgccgcgaacctgactgggagggtcttaaagcgtttttagagcgtcttgaatttggttcgctcttgcatgaattcggccttttagaaagcccgttactggccgaagaagcaccttggccaccgcccgagggcgcgtttttaggttaccgtttgagtcgcccggaaccgatgtgggccgaattactggctcttgcagcgtctgcccagggacgtgtgtatcgcgcggaagaccctcatggtgcgctccgcggcctcttcgaagtccgtggactccttgccaaagacttagctgttgttgcattgcgcgaaggtcttgatttacctccgactgatgatccaatgcttcttgcgtacctcttggacccgtcaaacacgacgcccgaaggcgtagcccgtcgttacggcggcgagtggaccgaagatgcagcgaaacgcgcgttattggccgaacgtttgcacgccaatttattaggacgtttgcaaggcgaggaacgtctcctctggctttacgaagaagtggagaaaccattgagtcgcgtgctcgcgcatatggaagctaccggtgtcaaattagacgtggcgtatttggagaatctcagccttgaagttgctgcccacatgcgccgcttggaggaagaagtattccgtttagcaggccgttcctttcgccttaactctcgcgatcagttagaacgtgtgttgttcgatgaacttggtctccctcctatcggcaagacagagaagaccggtaaacgtagcacttcagcggcggttttagaagctcttcgcgaagtccatcccattgtggacaagatcttgcagtaccgcgaactcgcgaaattgaaaggcacctatattgaccgtcttccggcattagtccacccgaaaacgggacgcctccatacccgcttcaaccaaacagccacggcgaccggtcgtttgtcctcctctgatccaaaccttcagaatattccagtacgtaccccattgggccagaagatccgccgtgcgtttgtagctgaggagggttggcgtttagtggccctcgattatcgtcaaattgaattacgtgtccttgcccatctttctggcgatgagaacctcatccgcgtgtttcaggaaggcaaagacattcacactcaaacggcaagctggatgtttggattatcagctgaagcgatcgatcctttgatgcgtcgtgcagcgaagaccatcaatttcggtgttctctacggtatgagtgcctttcgtttgtcgcaggaattaggcattccctatgaagaagctcaggcgttcattaagaaatactttcaaagctatcccaaagttaaagcatggatcgagaagactctccgtgaaggccgcacacgtggttacgtagagaccttatttggacgtcgccgctatgttcccgatttaaacgctcgcgtgaaaggcaagcgtgaagccgccgaacgcatggcgttcaacatgcctgtacagggcacggcagctgacctcatgaaacttgcaatggtgcgcctttttccacaattgcgtgaagttggtgcccgcatgctcttgcaggtccacgatgaactcttgttagaagcgccaaaagagcgtgcggaagaggtggcagccctcgcgaaagaagttatggaaggcgtgtggcccttagcggtgcctcttgaagtcgaagttggtattggcgaggattggctggctgccaaagga

SEQ ID NO: 4440 - protein, 841 aa, synthetic construct
  REGION 1..841: note = Variant of DNA polymerase I from Thermus sp. strain 2.9
MHHHHHHGGSGVLPVFEPKGRVLLVDGHHLAYRNFFALKGLTTSLGEPVQGVYGFAKSLLKALKEDGDVVIVVFDAKAPSFRHEAYEAYKAGRAPTPEDFPRQLALMKELVDLLGLERLEVPGFEADDVLATLAKKAEREGYEVQILTADRDLFQLLSPRISVLHPEGHRITPEWLWEKYGLRPEQWVDFRALAGDPSDNIPGVKGIGEKTALKLLKEWGSLENLLKNLDQVKPESVREKILAHLEDLKLSRELSRVRTDLPLEVDFGRRREPDWEGLKAFLERLEFGSLLHEFGLLESPLLAEEAPWPPPEGAFLGYRLSRPEPMWAELLALAASAQGRVYRAEDPHGALRGLFEVRGLLAKDLAVVALREGLDLPPTDDPMLLAYLLDPSNTTPEGVARRYGGEWTEDAAKRALLAERLHANLLGRLQGEERLLWLYEEVEKPLSRVLAHMEATGVKLDVAYLENLSLEVAAHMRRLEEEVFRLAGRSFRLNSRDQLERVLFDELGLPPIGKTEKTGKRSTSAAVLEALREVHPIVDKILQYRELAKLKGTYIDRLPALVHPKTGRLHTRFNQTATATGRLSSSDPNLQNIPVRTPLGQKIRRAFVAEEGWRLVALDYRQIELRVLAHLSGDENLIRVFQEGKDIHTQTASWMFGLSAEAIDPLMRRAAKTINFGVLYGMSAFRLSQELGIPYEEAQAFIKKYFQSYPKVKAWIEKTLREGRTRGYVETLFGRRRYVPDLNARVKGKREAAERMAFNMPVQGTAADLMKLAMVRLFPQLREVGARMLLQVHDELLLEAPKERAEEVAALAKEVMEGVWPLAVPLEVEVGIGEDWLAAKG

SEQ ID NO: 4441 - DNA, 2523 bp, synthetic construct
  misc_feature 1..2523: note = Variant of DNA polymerase I from Thermus sp. strain 2.9
  source 1..2523: mol_type = other DNA
atgcaccatcatcatcatcatggcggtagcggcgtgttaccggtgttcgagcctaaaggtcgcgtgcttctggttgatggccatcatctcgcgtatcgtaacttctttgccctgaaaggattaaccaccagcctgggcgagccggtacagggtgtctacggctttgcaaagtcgctcctgaaagctctgaaagaagacggtgatgtggtgattgttgtctttgatgcgaaagcgccaagttttcgccacgaagcgtacgaagcttacaaagccgggcgtgctccaacgccggaagactttcctcgccaattggcgcttatgaaggaattagtggatttgcttggcctcgaacgcttggaagttcccggtttcgaggcagacgacgtattagcgactctcgcaaagaaagccgaacgtgagggctatgaagtccagatcttgacagcagatcgcgatcttttccagcttttatctccgcgcatctcggtgttacacccggaagggcatcgtatcaccccggaatggctctgggagaaatatggtttgcgtcccgaacaatgggtggattttcgcgccttagcaggcgatccgagcgacaatattccgggagttaaaggtatcggcgagaagacggcgctcaagctccttaaagaatgggggtcgttggagaacttgcttaagaatttagatcaggtcaaaccagagtcagtgcgtgagaagattcttgctcacctcgaagacctcaaattaagccgcgaattgtcccgtgtacgcaccgatttgccgctcgaagttgatttcggtcgccgccgcgaacctgactgggagggtcttaaagcgtttttagagcgtcttgaatttggttcgctcttgcatgaattcggccttttagaaagcccgttactggccgaagaagcaccttggccaccgcccgagggcgcgtttttaggttaccgtttgagtcgcccggaaccgatgtgggccgaattactggctcttgcagcgtctgcccagggacgtgtgtatcgcgcggaagacctgcatggtgcgctccgcggcctcttcgaagtccgtggactccttgccaaagacttagctgttgttgcattgcgcgaaggtcttgatttacctccgactgatgatccaatgcttcttgcgtacctcttggacccgtcaaacacgacgcccgaaggcgtagcccgtcgttacggcggcgagtggaccgaagatgcagcgaaacgcgcgttattggccgaacgtttgcacgccaatttattaggacgtttgcaaggcgaggaacgtctcctctggctttacgaagaagtggagaaaccattgagtcgcgtgctcgcgcatatggaagctaccggtgtcaaattagacgtggcgtatttggagaatctcagccttgaagttgctgcccacatgcgccgcttggaggaagaagtattccgtttagcaggccgttcctttcgccttaactctcgcgatcagttagaacgtgtgttgttcgatgaacttggtctccctcctatcggcaagacagagaagaccggtaaacgtagcacttcagcggcggttttagaagctcttcgcgaagtccatcccattgtggacaagatcttgcagtaccgcgaactcgcgaaattgaaaggcacctatattgaccgtcttccggcattagtccacccgaaaacgggacgcctccatacccgcttcaaccaaacagccacggcgaccggtcgtttgtcctcctctgatccaaaccttcagaatattccagtacgtaccccattgggccagaagatccgccgtgcgtttgtagctgaggagggttggcgtttagtggccctcgattatcgtcaaattgaattacgtgtccttgcccatctttctggcgatgagaacctcatccgcgtgtttcaggaaggcaaagacattcacactcaaacggcaagctggatgtttggattatcagctgaagcgatcgatcctttgatgcgtcgtgcagcgaagaccatcaatttcggtgttctctacggtatgagtgcctttcgtttgtcgcaggaattaggcattccctatgaagaagctcaggcgttcattcagaaatactttcaaagctatcccaaagttaaagcatggatcgagaagactctccgtgaaggccgcacacgtggttacgtagagaccttatttggacgtcgccgctatgttcccgatttaaacgctcgcgtgaaaggcaagcgtgaagccgccgaacgcatggcgttcaacatgcctgtacagggcacggcagctgacctcatgaaacttgcaatggtgcgcctttttccacaattgcgtgaagttggtgcccgcatgctcttgcaggtccacgatgaactcttgttagaagcgccaaaagagcgtgcggaagaggtggcagccctcgcgaaagaagttatggaaggcgtgtggcccttagcggtgcctcttgaagtcgaagttggtattggcgaggattggctggctgccaaagga

SEQ ID NO: 4442 - protein, 841 aa, synthetic construct
  REGION 1..841: note = Variant of DNA polymerase I from Thermus sp. strain 2.9
MHHHHHHGGSGVLPVFEPKGRVLLVDGHHLAYRNFFALKGLTTSLGEPVQGVYGFAKSLLKALKEDGDVVIVVFDAKAPSFRHEAYEAYKAGRAPTPEDFPRQLALMKELVDLLGLERLEVPGFEADDVLATLAKKAEREGYEVQILTADRDLFQLLSPRISVLHPEGHRITPEWLWEKYGLRPEQWVDFRALAGDPSDNIPGVKGIGEKTALKLLKEWGSLENLLKNLDQVKPESVREKILAHLEDLKLSRELSRVRTDLPLEVDFGRRREPDWEGLKAFLERLEFGSLLHEFGLLESPLLAEEAPWPPPEGAFLGYRLSRPEPMWAELLALAASAQGRVYRAEDLHGALRGLFEVRGLLAKDLAVVALREGLDLPPTDDPMLLAYLLDPSNTTPEGVARRYGGEWTEDAAKRALLAERLHANLLGRLQGEERLLWLYEEVEKPLSRVLAHMEATGVKLDVAYLENLSLEVAAHMRRLEEEVFRLAGRSFRLNSRDQLERVLFDELGLPPIGKTEKTGKRSTSAAVLEALREVHPIVDKILQYRELAKLKGTYIDRLPALVHPKTGRLHTRFNQTATATGRLSSSDPNLQNIPVRTPLGQKIRRAFVAEEGWRLVALDYRQIELRVLAHLSGDENLIRVFQEGKDIHTQTASWMFGLSAEAIDPLMRRAAKTINFGVLYGMSAFRLSQELGIPYEEAQAFIQKYFQSYPKVKAWIEKTLREGRTRGYVETLFGRRRYVPDLNARVKGKREAAERMAFNMPVQGTAADLMKLAMVRLFPQLREVGARMLLQVHDELLLEAPKERAEEVAALAKEVMEGVWPLAVPLEVEVGIGEDWLAAKG

SEQ ID NO: 4443 - DNA, 2523 bp, synthetic construct
  misc_feature 1..2523: note = Variant of DNA polymerase I from Thermus sp. strain 2.9
  source 1..2523: mol_type = other DNA
atgcaccatcatcatcatcatggcggtagcggcgtgttaccggtgttcgagcctaaaggtcgcgtgcttctggttgatggccatcatctcgcgtatcgtaacttctttgccctgaaaggattaaccaccagcctgggcgagccggtacagggtgtctacggctttgcaaagtcgctcctgaaagctctgaaagaagacggtgatgtggtgattgttgtctttgatgcgaaagcgccaagttttcgccacgaagcgtacgaagcttacaaagccgggcgtgctccaacgccggaagactttcctcgccaattggcgcttatgaaggaattagtggatttgcttggcctcgaacgcttggaagttcccggtttcgaggcagacgacgtattagcgactctcgcaaagaaagccgaacgtgagggctatgaagtccagatcttgacagcagatcgcgatcttttccagcttttatctccgcgcatctcggtgttacacccggaagggcatcgtatcaccccggaatggctctgggagaaatatggtttgcgtcccgaacaatgggtggattttcgcgccttagcaggcgatccgagcgacaatattccgggagttaaaggtatcggcgagaagacggcgctcaagctccttaaagaatgggggtcgttggagaacttgcttaagaatttagatcaggtcaaaccagagtcagtgcgtgagaagattcttgctcacctcgaagacctcaaattaagccgcgaattgtcccgtgtacgcaccgatttgccgctcgaagttgatttcggtcgccgccgcgaacctgactgggagggtcttaaagcgtttttagagcgtcttgaatttggttcgctcttgcatgaattcggccttttagaaagcccgttactggccgaagaagcaccttggccaccgcccgagggcgcgtttttaggttaccgtttgagtcgcccggaaccgatgtgggccgaattactggctcttgcagcgtctgcccagggacgtgtgtatcgcgcggaagaccctcatggtgcgctccgcggcctcttcgaagtccgtggactccttgccaaagacttagctgttgttgcattgcgcgaaggtcttgatttacctccgactgatgatccaatgcttcttgcgtacctcttggacccgtcaaacacgacgcccgaaggcgtagcccgtcgttacggcggcgagtggaccgaagatgcagcgaaacgcgcgttattggccgaacgtttgcacgccaatttattaggacgtttgcaaggcgaggaacgtctcctctggctttacgaagaagtggagaaaccattgagtcgcgtgctcgcgcatatggaagctaccggtgtcaaattagacgtggcgtatttggagaatctcagccttgaagttgctgcccacatgcgccgcttggaggaagaagtagagcgtttagcaggccgttcctttcgccttaactctcgcgatcagttagaacgtgtgttgttcgatgaacttggtctccctcctatcggcaagacagagaagaccggtaaacgtagcacttcagcggcggttttagaagctcttcgcgaagtccatcccattgtggacaagatcttgcagtaccgcgaactcgcgaaattgaaaggcacctatattgaccgtcttccggcattagtccacccgaaaacgggacgcctccatacccgcttcaaccaaacagccacggcgaccggtcgtttgtcctcctctgatccaaaccttcagaatattccagtacgtaccccattgggccagaagatccgccgtgcgtttgtagctgaggagggttggcgtttagtggccctcgattatcgtcaaattgaattacgtgtccttgcccatctttctggcgatgagaacctcatccgcgtgtttcaggaaggcaaagacattcacactcaaacggcaagctggatgtttggattatcagctgaagcgatcgatcctttgatgcgtcgtgcagcgaagaccatcaatttcggtgttctctacggtatgagtgcctttcgtttgtcgcaggaattaggcattccctatgaagaagctcaggcgttcattcagaaatactttcaaagctatcccaaagttaaagcatggatcgagaagactctccgtgaaggccgcacacgtggttacgtagagaccttatttggacgtcgccgctatgttcccgatttaaacgctcgcgtgaaaggcaagcgtgaagccgccgaacgcatggcgttcaacatgcctgtacagggcacggcagctgacctcatgaaacttgcaatggtgcgcctttttccacaattgcgtgaagttggtgcccgcatgctcttgcaggtccacgatgaactcttgttagaagcgccaaaagagcgtgcggaagaggtggcagccctcgcgaaagaagttatggaaggcgtgtggcccttagcggtgcctcttgaagtcgaagttggtattggcgaggattggctggctgccaaagga

SEQ ID NO: 4444 - protein, 841 aa, synthetic construct
  REGION 1..841: note = Variant of DNA polymerase I from Thermus sp. strain 2.9
MHHHHHHGGSGVLPVFEPKGRVLLVDGHHLAYRNFFALKGLTTSLGEPVQGVYGFAKSLLKALKEDGDVVIVVFDAKAPSFRHEAYEAYKAGRAPTPEDFPRQLALMKELVDLLGLERLEVPGFEADDVLATLAKKAEREGYEVQILTADRDLFQLLSPRISVLHPEGHRITPEWLWEKYGLRPEQWVDFRALAGDPSDNIPGVKGIGEKTALKLLKEWGSLENLLKNLDQVKPESVREKILAHLEDLKLSRELSRVRTDLPLEVDFGRRREPDWEGLKAFLERLEFGSLLHEFGLLESPLLAEEAPWPPPEGAFLGYRLSRPEPMWAELLALAASAQGRVYRAEDPHGALRGLFEVRGLLAKDLAVVALREGLDLPPTDDPMLLAYLLDPSNTTPEGVARRYGGEWTEDAAKRALLAERLHANLLGRLQGEERLLWLYEEVEKPLSRVLAHMEATGVKLDVAYLENLSLEVAAHMRRLEEEVERLAGRSFRLNSRDQLERVLFDELGLPPIGKTEKTGKRSTSAAVLEALREVHPIVDKILQYRELAKLKGTYIDRLPALVHPKTGRLHTRFNQTATATGRLSSSDPNLQNIPVRTPLGQKIRRAFVAEEGWRLVALDYRQIELRVLAHLSGDENLIRVFQEGKDIHTQTASWMFGLSAEAIDPLMRRAAKTINFGVLYGMSAFRLSQELGIPYEEAQAFIQKYFQSYPKVKAWIEKTLREGRTRGYVETLFGRRRYVPDLNARVKGKREAAERMAFNMPVQGTAADLMKLAMVRLFPQLREVGARMLLQVHDELLLEAPKERAEEVAALAKEVMEGVWPLAVPLEVEVGIGEDWLAAKG

SEQ ID NO: 4445 - DNA, 2523 bp, synthetic construct
  misc_feature 1..2523: note = Variant of DNA polymerase I from Thermus sp. strain 2.9
  source 1..2523: mol_type = other DNA
atgcaccatcatcatcatcatggcggtagcggcgtgttaccggtgttcgagcctaaaggtcgcgtgcttctggttgatggccatcatctcgcgtatcgtaacttctttgccctgaaaggattaaccaccagcctgggcgagccggtacagggtgtctacggctttgcaaagtcgctcctgaaagctctgaaagaagacggtgatgtggtgattgttgtctttgatgcgaaagcgccaagttttcgccacgaagcgtacgaagcttacaaagccgggcgtgctccaacgccggaagactttcctcgccaattggcgcttatgaaggaattagtggatttgcttggcctcgaacgcttggaagttcccggtttcgaggcagacgacgtattagcgactctcgcaaagaaagccgaacgtgagggctatgaagtccagatcttgacagcagatcgcgatcttttccagcttttatctccgcgcatctcggtgttacacccggaagggcatcgtatcaccccggaatggctctgggagaaatatggtttgcgtcccgaacaatgggtggattttcgcgccttagcaggcgatccgagcgacaatattccgggagttaaaggtatcggcgagaagacggcgctcaagctccttaaagaatgggggtcgttggagaacttgcttaagaatttagatcaggtcaaaccagagtcagtgcgtgagaagattcttgctcacctcgaagacctcaaattaagccgcgaattgtcccgtgtacgcaccgatttgccgctcgaagttgatttcggtcgccgccgcgaacctgactgggagggtcttaaagcgtttttagagcgtcttgaatttggttcgctcttgcatgaattcggccttttagaaagcccgttactggccgaagaagcaccttggccaccgcccgagggcgcgtttttaggttaccgtttgagtcgcccggaaccgatgtgggccgaattactggctcttgcagcgtctgcccagggacgtgtgtatcgcgcggaagaccctcatggtgcgctccgcggcctcttcgaagtccgtggactccttgccaaagacttagctgttgttgcattgcgcgaaggtcttgatttacctccgactgatgatccaatgcttcttgcgtacctcttggacccgtcaaacacgacgcccgaaggcgtagcccgtcgttacggcggcgagtggaccgaagatgcagcgaaacgcgcgttattggccgaacgtttgcacgccaatttattaggacgtttgcaaggcgaggaacgtctcctctggctttacgaagaagtggagaaaccattgagtcgcgtgctcgcgcatatggaagctaccggtgtcaaattagacgcggcgtatttggagaatctcagccttgaagttgctgcccacatgcgccgcttggaggaagaagtattccgtttagcaggccgttcctttcgccttaactctcgcgatcagttagaacgtgtgttgttcgatgaacttggtctccctcctatcggcaagacagagaagaccggtaaacgtagcacttcagcggcggttttagaagctcttcgcgaagtccatcccattgtggacaagatcttgcagtaccgcgaactcgcgaaattgaaaggcacctatattgaccgtcttccggcattagtccacccgaaaacgggacgcctccatacccgcttcaaccaaacagccacggcgaccggtcgtttgtcctcctctgatccaaaccttcagaatattccagtacgtaccccattgggccagaagatccgccgtgcgtttgtagctgaggagggttggcgtttagtggccctcgattatcgtcaaattgaattacgtgtccttgcccatctttctggcgatgagaacctcatccgcgtgtttcaggaaggcaaagacattcacactcaaacggcaagctggatgtttggattatcagctgaagcgatcgatcctttgatgcgtcgtgcagcgaagaccatcaatttcggtgttctctacggtatgagtgcctttcgtttgtcgcaggaattaggcattccctatgaagaagctcaggcgttcattcagaaatactttcaaagctatcccaaagttaaagcatggatcgagaagactctccgtgaaggccgcacacgtggttacgtagagaccttatttggacgtcgccgctatgttcccgatttaaacgctcgcgtgaaaggcaagcgtgaagccgccgaacgcatggcgttcaacatgcctgtacagggcacggcagctgacctcatgaaacttgcaatggtgcgcctttttccacaattgcgtgaagttggtgcccgcatgctcttgcaggtccacgatgaactcttgttagaagcgccaaaagagcgtgcggaagaggtggcagccctcgcgaaagaagttatggaaggcgtgtggcccttagcggtgcctcttgaagtcgaagttggtattggcgaggattggctggctgccaaagga

SEQ ID NO: 4446 - protein, 841 aa, synthetic construct
  REGION 1..841: note = Variant of DNA polymerase I from Thermus sp. strain 2.9
MHHHHHHGGSGVLPVFEPKGRVLLVDGHHLAYRNFFALKGLTTSLGEPVQGVYGFAKSLLKALKEDGDVVIVVFDAKAPSFRHEAYEAYKAGRAPTPEDFPRQLALMKELVDLLGLERLEVPGFEADDVLATLAKKAEREGYEVQILTADRDLFQLLSPRISVLHPEGHRITPEWLWEKYGLRPEQWVDFRALAGDPSDNIPGVKGIGEKTALKLLKEWGSLENLLKNLDQVKPESVREKILAHLEDLKLSRELSRVRTDLPLEVDFGRRREPDWEGLKAFLERLEFGSLLHEFGLLESPLLAEEAPWPPPEGAFLGYRLSRPEPMWAELLALAASAQGRVYRAEDPHGALRGLFEVRGLLAKDLAVVALREGLDLPPTDDPMLLAYLLDPSNTTPEGVARRYGGEWTEDAAKRALLAERLHANLLGRLQGEERLLWLYEEVEKPLSRVLAHMEATGVKLDAAYLENLSLEVAAHMRRLEEEVFRLAGRSFRLNSRDQLERVLFDELGLPPIGKTEKTGKRSTSAAVLEALREVHPIVDKILQYRELAKLKGTYIDRLPALVHPKTGRLHTRFNQTATATGRLSSSDPNLQNIPVRTPLGQKIRRAFVAEEGWRLVALDYRQIELRVLAHLSGDENLIRVFQEGKDIHTQTASWMFGLSAEAIDPLMRRAAKTINFGVLYGMSAFRLSQELGIPYEEAQAFIQKYFQSYPKVKAWIEKTLREGRTRGYVETLFGRRRYVPDLNARVKGKREAAERMAFNMPVQGTAADLMKLAMVRLFPQLREVGARMLLQVHDELLLEAPKERAEEVAALAKEVMEGVWPLAVPLEVEVGIGEDWLAAKG

SEQ ID NO: 4447 - DNA, 2523 bp, synthetic construct
  misc_feature 1..2523: note = Variant of DNA polymerase I from Thermus sp. strain 2.9
  source 1..2523: mol_type = other DNA
atgcaccatcatcatcatcatggcggtagcggcgtgttaccggtgttcgagcctaaaggtcgcgtgcttctggttgatggccatcatctcgcgtatcgtaacttctttgccctgaaaggattaaccaccagcctgggcgagccggtacagggtgtctacggctttgcaaagtcgctcctgaaagctctgaaagaagacggtgatgtggtgattgttgtctttgatgcgaaagcgccaagttttcgccacgaagcgtacgaagcttacaaagccgggcgtgctccaacgccggaagactttcctcgccaattggcgcttatgaaggaattagtggatttgcttggcctcgaacgcttggaagttcccggtttcgaggcagacgacgtattagcgactctcgcaaagaaagccgaacgtgagggctatgaagtccagatcttgacagcagatcgcgatcttttccagcttttatctccgcgcatctcggtgttacacccggaagggcatcgtatcaccccggaatggctctgggagaaatatggtttgcgtcccgaacaatgggtggattttcgcgccttagcaggcgatccgagcgacaatattccgggagttaaaggtatcggcgagaagacggcgctcaagctccttaaagaatgggggtcgttggagaacttgcttaagaatttagatcaggtcaaaccagagtcagtgcgtgagaagattcttgctcacctcgaagacctcaaattaagccgcgaattgtcccgtgtacgcaccgatttgccgctcgaagttgatttcggtcgccgccgcgaacctgactgggagggtcttaaagcgtttttagagcgtcttgaatttggttcgctcttgcatgaattcggccttttagaaagcccgttactggccgaagaagcaccttggccaccgcccgagggcgcgtttttaggttaccgtttgagtcgcccggaaccgatgtgggccgaattactggctcttgcagcgtctgcccagggacgtgtgtatcgcgcggaagaccctcatggtgcgctccgcggcctcttcgaagtccgtggactccttgccaaagacttagctgttgttgcattgcgcgaaggtcttgatttacctccgactgatgatccaatgcttcttgcgtacctcttggacccgtcaaacacgacgcccgaaggcgtagcccgtcgttacggcggcgagtggaccgaagatgcagcgaaacgcgcgttattggccgaacgtttgcacgccaatttattaggacgtttgcaagttgaggaacgtctcctctggctttacgaagaagtggagaaaccattgagtcgcgtgctcgcgcatatggaagctaccggtgtcaaattagacgtggcgtatttggagaatctcagccttgaagttgctgcccacatgcgccgcttggaggaagaagtattccgtttagcaggccgttcctttcgccttaactctcgcgatcagttagaacgtgtgttgttcgatgaacttggtctccctcctatcggcaagacagagaagaccggtaaacgtagcacttcagcggcggttttagaagctcttcgcgaagtccatcccattgtggacaagatcttgcagtaccgcgaactcgcgaaattgaaaggcacctatattgaccgtcttccggcattagtccacccgaaaacgggacgcctccatacccgcttcaaccaaacagccacggcgaccggtcgtttgtcctcctctgatccaaaccttcagaatattccagtacgtaccccattgggccagaagatccgccgtgcgtttgtagctgaggagggttggcgtttagtggccctcgattatcgtcaaattgaattacgtgtccttgcccatctttctggcgatgagaacctcatccgcgtgtttcaggaaggcaaagacattcacactcaaacggcaagctggatgtttggattatcagctgaagcgatcgatcctttgatgcgtcgtgcagcgaagaccatcaatttcggtgttctctacggtatgagtgcctttcgtttgtcgcaggaattaggcattccctatgaagaagctcaggcgttcattcagaaatactttcaaagctatcccaaagttaaagcatggatcgagaagactctccgtgaaggccgcacacgtggttacgtagagaccttatttggacgtcgccgctatgttcccgatttaaacgctcgcgtgaaaggcaagcgtgaagccgccgaacgcatggcgttcaacatgcctgtacagggcacggcagctgacctcatgaaacttgcaatggtgcgcctttttccacaattgcgtgaagttggtgcccgcatgctcttgcaggtccacgatgaactcttgttagaagcgccaaaagagcgtgcggaagaggtggcagccctcgcgaaagaagttatggaaggcgtgtggcccttagcggtgcctcttgaagtcgaagttggtattggcgaggattggctggctgccaaagga

SEQ ID NO: 4448 - protein, 841 aa, synthetic construct
  REGION 1..841: note = Variant of DNA polymerase I from Thermus sp. strain 2.9
MHHHHHHGGSGVLPVFEPKGRVLLVDGHHLAYRNFFALKGLTTSLGEPVQGVYGFAKSLLKALKEDGDVVIVVFDAKAPSFRHEAYEAYKAGRAPTPEDFPRQLALMKELVDLLGLERLEVPGFEADDVLATLAKKAEREGYEVQILTADRDLFQLLSPRISVLHPEGHRITPEWLWEKYGLRPEQWVDFRALAGDPSDNIPGVKGIGEKTALKLLKEWGSLENLLKNLDQVKPESVREKILAHLEDLKLSRELSRVRTDLPLEVDFGRRREPDWEGLKAFLERLEFGSLLHEFGLLESPLLAEEAPWPPPEGAFLGYRLSRPEPMWAELLALAASAQGRVYRAEDPHGALRGLFEVRGLLAKDLAVVALREGLDLPPTDDPMLLAYLLDPSNTTPEGVARRYGGEWTEDAAKRALLAERLHANLLGRLQVEERLLWLYEEVEKPLSRVLAHMEATGVKLDVAYLENLSLEVAAHMRRLEEEVFRLAGRSFRLNSRDQLERVLFDELGLPPIGKTEKTGKRSTSAAVLEALREVHPIVDKILQYRELAKLKGTYIDRLPALVHPKTGRLHTRFNQTATATGRLSSSDPNLQNIPVRTPLGQKIRRAFVAEEGWRLVALDYRQIELRVLAHLSGDENLIRVFQEGKDIHTQTASWMFGLSAEAIDPLMRRAAKTINFGVLYGMSAFRLSQELGIPYEEAQAFIQKYFQSYPKVKAWIEKTLREGRTRGYVETLFGRRRYVPDLNARVKGKREAAERMAFNMPVQGTAADLMKLAMVRLFPQLREVGARMLLQVHDELLLEAPKERAEEVAALAKEVMEGVWPLAVPLEVEVGIGEDWLAAKG

SEQ ID NO: 4449 - DNA, 2523 bp, synthetic construct
  misc_feature 1..2523: note = Variant of DNA polymerase I from Thermus sp. strain 2.9
  source 1..2523: mol_type = other DNA
atgcaccatcatcatcatcatggcggtagcggcgtgttaccggtgttcgagcctaaaggtcgcgtgcttctggttgatggccatcatctcgcgtatcgtaacttctttgccctgaaaggattaaccaccagcctgggcgagccggtacagggtgtctacggctttgcaaagtcgctcctgaaagctctgaaagaagacggtgatgtggtgattgttgtctttgatgcgaaagcgccaagttttcgccacgaagcgtacgaagcttacaaagccgggcgtgctccaacgccggaagactttcctcgccaattggcgcttatgaaggaattagtggatttgcttggcctcgaacgcttggaagttcccggtttcgaggcagacgacgtattagcgactctcgcaaagaaagccgaacgtgagggctatgaagtccagatcttgacagcagatcgcgatcttttccagcttttatctccgcgcatctcggtgttacacccggaagggcatcgtatcaccccggaatggctctgggagaaatatggtttgcgtcccgaacaatgggtggattttcgcgccttagcaggcgatccgagcgacaatattccgggagttaaaggtatcggcgagaagacggcgctcaagctccttaaagaatgggggtcgttggagaacttgcttaagaatttagatcaggtcaaaccagagtcagtgcgtgagaagattcttgctcacctcgaagacctcaaattaagccgcgaattgtcccgtgtacgcaccgatttgccgctcgaagttgatttcggtcgccgccgcgaacctgactgggagggtcttaaagcgtttttagagcgtcttgaatttggttcgctcttgcatgaattcggccttttagaaagcccgttactggccgaagaagcaccttggccaccgcccgagggcgcgtttttaggttaccgtttgagtcgcccggaaccgatgtgggccgaattactggctcttgcagcgtctgcccagggacgtgtgtatcgcgcggaagaccctcatggtgcgctccgcggcctcttcgaagtccgtggactccttgccaaagacttagctgttgttgcattgcgcgaaggtcttgatttacctccgactgatgatccaatgcttcttgcgtacctcttggacccgtcaaacacgacgcccgaaggcgtagcccgtcgttacggcggcgagtggaccgaagatgcagcgaaacgcgcgttattggccgaacgtttgcacgccaatttattaggacgtttgcaaggcgaggaacgtctcctctggctttacgaagaagtggagaaaccattgagtcgcgtgctcgcgcatatggaagctaccggtgtcaaattagacgtggcgtatttggagaatctcagccttgaactggctgcccacatgcgccgcttggaggaagaagtattccgtttagcaggccgttcctttcgccttaactctcgcgatcagttagaacgtgtgttgttcgatgaacttggtctccctcctatcggcaagacagagaagaccggtaaacgtagcacttcagcggcggttttagaagctcttcgcgaagtccatcccattgtggacaagatcttgcagtaccgcgaactcgcgaaattgaaaggcacctatattgaccgtcttccggcattagtccacccgaaaacgggacgcctccatacccgcttcaaccaaacagccacggcgaccggtcgtttgtcctcctctgatccaaaccttcagaatattccagtacgtaccccattgggccagaagatccgccgtgcgtttgtagctgaggagggttggcgtttagtggccctcgattatcgtcaaattgaattacgtgtccttgcccatctttctggcgatgagaacctcatccgcgtgtttcaggaaggcaaagacattcacactcaaacggcaagctggatgtttggattatcagctgaagcgatcgatcctttgatgcgtcgtgcagcgaagaccatcaatttcggtgttctctacggtatgagtgcctttcgtttgtcgcaggaattaggcattccctatgaagaagctcaggcgttcattcagaaatactttcaaagctatcccaaagttaaagcatggatcgagaagactctccgtgaaggccgcacacgtggttacgtagagaccttatttggacgtcgccgctatgttcccgatttaaacgctcgcgtgaaaggcaagcgtgaagccgccgaacgcatggcgttcaacatgcctgtacagggcacggcagctgacctcatgaaacttgcaatggtgcgcctttttccacaattgcgtgaagttggtgcccgcatgctcttgcaggtccacgatgaactcttgttagaagcgccaaaagagcgtgcggaagaggtggcagccctcgcgaaagaagttatggaaggcgtgtggcccttagcggtgcctcttgaagtcgaagttggtattggcgaggattggctggctgccaaagga

SEQ ID NO: 4450 - protein, 841 aa, synthetic construct
  REGION 1..841: note = Variant of DNA polymerase I from Thermus sp. strain 2.9
MHHHHHHGGSGVLPVFEPKGRVLLVDGHHLAYRNFFALKGLTTSLGEPVQGVYGFAKSLLKALKEDGDVVIVVFDAKAPSFRHEAYEAYKAGRAPTPEDFPRQLALMKELVDLLGLERLEVPGFEADDVLATLAKKAEREGYEVQILTADRDLFQLLSPRISVLHPEGHRITPEWLWEKYGLRPEQWVDFRALAGDPSDNIPGVKGIGEKTALKLLKEWGSLENLLKNLDQVKPESVREKILAHLEDLKLSRELSRVRTDLPLEVDFGRRREPDWEGLKAFLERLEFGSLLHEFGLLESPLLAEEAPWPPPEGAFLGYRLSRPEPMWAELLALAASAQGRVYRAEDPHGALRGLFEVRGLLAKDLAVVALREGLDLPPTDDPMLLAYLLDPSNTTPEGVARRYGGEWTEDAAKRALLAERLHANLLGRLQGEERLLWLYEEVEKPLSRVLAHMEATGVKLDVAYLENLSLELAAHMRRLEEEVFRLAGRSFRLNSRDQLERVLFDELGLPPIGKTEKTGKRSTSAAVLEALREVHPIVDKILQYRELAKLKGTYIDRLPALVHPKTGRLHTRFNQTATATGRLSSSDPNLQNIPVRTPLGQKIRRAFVAEEGWRLVALDYRQIELRVLAHLSGDENLIRVFQEGKDIHTQTASWMFGLSAEAIDPLMRRAAKTINFGVLYGMSAFRLSQELGIPYEEAQAFIQKYFQSYPKVKAWIEKTLREGRTRGYVETLFGRRRYVPDLNARVKGKREAAERMAFNMPVQGTAADLMKLAMVRLFPQLREVGARMLLQVHDELLLEAPKERAEEVAALAKEVMEGVWPLAVPLEVEVGIGEDWLAAKG

SEQ ID NO: 4451 - DNA, 2523 bp, synthetic construct
  misc_feature 1..2523: note = Variant of DNA polymerase I from Thermus sp. strain 2.9
  source 1..2523: mol_type = other DNA
atgcaccatcatcatcatcatggcggtagcggcgtgttaccggtgttcgagcctaaaggtcgcgtgcttctggttgatggccatcatctcgcgtatcgtaacttctttgccctgaaaggattaaccaccagcctgggcgagccggtacagggtgtctacggctttgcaaagtcgctcctgaaagctctgaaagaagacggtgatgtggtgattgttgtctttgatgcgaaagcgccaagttttcgccacgaagcgtacgaagcttacaaagccgggcgtgctccaacgccggaagactttcctcgccaattggcgcttatgaaggaattagtggatttgcttggcctcgaacgcttggaagttcccggtttcgaggcagacgacgtattagcgactctcgcaaagaaagccgaacgtgagggctatgaagtccagatcttgacagcagatcgcgatcttttccagcttttatctccgcgcatctcggtgttacacccggaagggcatcgtatcaccccggaatggctctgggagaaatatggtttgcgtcccgaacaatgggtggattttcgcgccttagcaggcgatccgagcgacaatattccgggagttaaaggtatcggcgagaagacggcgctcaagctccttaaagaatgggggtcgttggagaacttgcttaagaatttagatcaggtcaaaccagagtcagtgcgtgagaagattcttgctcacctcgaagacctcaaattaagccgcgaattgtcccgtgtacgcaccgatttgccgctcgaagttgatttcggtcgccgccgcgaacctgactgggagggtcttaaagcgtttttagagcgtcttgaatttggttcgctcttgcatgaattcggccttttagaaagcccgttactggccgaagaagcaccttggccaccgcccgagggcgcgtttttaggttaccgtttgagtcgcccggaaccgatgtgggccgaattactggctcttgcagcgtctgcccagggacgtgtgtatcgcgcggaagaccctcatggtgcgctccgcggcctcttcgaagtccgtggactccttgccaaagacttagctgttgttgcattgcgcgaaggtcttgatttacctccgactgatgatccaatgcttcttgcgtacctcttggacccgtcaaacacgacgcccgaaggcgtagcccgtcgttacggcggcgagtggaccgaagatgcagcgaaacgcgcgttattggccgaacgtttgcacgccaatttattaggacgtttgcaaggcgaggaacgtctcctctggctttacgaagaagtggagaaaccattgagtcgcgtgctcgcgcatatggaagctaccggtgtcaaattagacgtggcgtatttggagaatctcagccttgaagaggctgcccacatgcgccgcttggaggaagaagtattccgtttagcaggccgttcctttcgccttaactctcgcgatcagttagaacgtgtgttgttcgatgaacttggtctccctcctatcggcaagacagagaagaccggtaaacgtagcacttcagcggcggttttagaagctcttcgcgaagtccatcccattgtggacaagatcttgcagtaccgcgaactcgcgaaattgaaaggcacctatattgaccgtcttccggcattagtccacccgaaaacgggacgcctccatacccgcttcaaccaaacagccacggcgaccggtcgtttgtcctcctctgatccaaaccttcagaatattccagtacgtaccccattgggccagaagatccgccgtgcgtttgtagctgaggagggttggcgtttagtggccctcgattatcgtcaaattgaattacgtgtccttgcccatctttctggcgatgagaacctcatccgcgtgtttcaggaaggcaaagacattcacactcaaacggcaagctggatgtttggattatcagctgaagcgatcgatcctttgatgcgtcgtgcagcgaagaccatcaatttcggtgttctctacggtatgagtgcctttcgtttgtcgcaggaattaggcattccctatgaagaagctcaggcgttcattcagaaatactttcaaagctatcccaaagttaaagcatggatcgagaagactctccgtgaaggccgcacacgtggttacgtagagaccttatttggacgtcgccgctatgttcccgatttaaacgctcgcgtgaaaggcaagcgtgaagccgccgaacgcatggcgttcaacatgcctgtacagggcacggcagctgacctcatgaaacttgcaatggtgcgcctttttccacaattgcgtgaagttggtgcccgcatgctcttgcaggtccacgatgaactcttgttagaagcgccaaaagagcgtgcggaagaggtggcagccctcgcgaaagaagttatggaaggcgtgtggcccttagcggtgcctcttgaagtcgaagttggtattggcgaggattggctggctgccaaagga

SEQ ID NO: 4452 - protein, 841 aa, synthetic construct
  REGION 1..841: note = Variant of DNA polymerase I from Thermus sp. strain 2.9
MHHHHHHGGSGVLPVFEPKGRVLLVDGHHLAYRNFFALKGLTTSLGEPVQGVYGFAKSLLKALKEDGDVVIVVFDAKAPSFRHEAYEAYKAGRAPTPEDFPRQLALMKELVDLLGLERLEVPGFEADDVLATLAKKAEREGYEVQILTADRDLFQLLSPRISVLHPEGHRITPEWLWEKYGLRPEQWVDFRALAGDPSDNIPGVKGIGEKTALKLLKEWGSLENLLKNLDQVKPESVREKILAHLEDLKLSRELSRVRTDLPLEVDFGRRREPDWEGLKAFLERLEFGSLLHEFGLLESPLLAEEAPWPPPEGAFLGYRLSRPEPMWAELLALAASAQGRVYRAEDPHGALRGLFEVRGLLAKDLAVVALREGLDLPPTDDPMLLAYLLDPSNTTPEGVARRYGGEWTEDAAKRALLAERLHANLLGRLQGEERLLWLYEEVEKPLSRVLAHMEATGVKLDVAYLENLSLEEAAHMRRLEEEVFRLAGRSFRLNSRDQLERVLFDELGLPPIGKTEKTGKRSTSAAVLEALREVHPIVDKILQYRELAKLKGTYIDRLPALVHPKTGRLHTRFNQTATATGRLSSSDPNLQNIPVRTPLGQKIRRAFVAEEGWRLVALDYRQIELRVLAHLSGDENLIRVFQEGKDIHTQTASWMFGLSAEAIDPLMRRAAKTINFGVLYGMSAFRLSQELGIPYEEAQAFIQKYFQSYPKVKAWIEKTLREGRTRGYVETLFGRRRYVPDLNARVKGKREAAERMAFNMPVQGTAADLMKLAMVRLFPQLREVGARMLLQVHDELLLEAPKERAEEVAALAKEVMEGVWPLAVPLEVEVGIGEDWLAAKG

SEQ ID NO: 4453 - DNA, 2523 bp, synthetic construct
  misc_feature 1..2523: note = Variant of DNA polymerase I from Thermus sp. strain 2.9
  source 1..2523: mol_type = other DNA
atgcaccatcatcatcatcatggcggtagcggcgtgttaccggtgttcgagcctaaaggtcgcgtgcttctggttgatggccatcatctcgcgtatcgtaacttctttgccctgaaaggattaaccaccagcctgggcgagccggtacagggtgtctacggctttgcaaagtcgctcctgaaagctctgaaagaagacggtgatgtggtgattgttgtctttgatgcgaaagcgccaagttttcgccacgaagcgtacgaagcttacaaagccgggcgtgctccaacgccggaagactttcctcgccaattggcgcttatgaaggaattagtggatttgcttggcctcgaacgcttggaagttcccggtttcgaggcagacgacgtattagcgactctcgcaaagaaagccgaacgtgagggctatgaagtccagatcttgacagcagatcgcgatcttttccagcttttatctccgcgcatctcggtgttacacccggaagggcatcgtatcaccccggaatggctctgggagaaatatggtttgcgtcccgaacaatgggtggattttcgcgccttagcaggcgatccgagcgacaatattccgggagttaaaggtatcggcgagaagacggcgctcaagctccttaaagaatgggggtcgttggagaacttgcttaagaatttagatcaggtcaaaccagagtcagtgcgtgagaagattcttgctcacctcgaagacctcaaattaagccgcgaattgtcccgtgtacgcaccgatttgccgctcgaagttgatttcggtcgccgccgcgaacctgactgggagggtcttaaagcgtttttagagcgtcttgaatttggttcgctcttgcatgaattcggccttttagaaagcccgttactggccgaagaagcaccttggccaccgcccgagggcgcgtttttaggttaccgtttgagtcgcccggaaccgatgtgggccgaattactggctcttgcagcgtctgcccagggacgtgtgtatcgcgcggaagaccctcatggtgcgctccgcggcctcttcgaagtccgtggactccttgccaaagacttagctgttgttgcattgcgcgaaggtcttgatttacctccgactgatgatccaatgcttcttgcgtacctcttggacccgtcaaacacgacgcccgaaggcgtagcccgtcgttacggcggcgagtggaccgaagatgcagcgaaacgcgcgttattggccgaacgtttgcacgccaatttattaggacgtttgcaaggcgaggaacgtctcctctggctttacgaagaagtggagaaaccattgagtcgcgtgctcgcgcatatggaagctaccggtgtcaaattagacgtggcgtatttggagaatctcagccttgaagttgctgcccacatgcgccgcttggaggaagaagtattccgtttagcaggccgttcctttcgccttaactctcgcgatcagttagaacgtgtgttgttcgatgaacttggtctccctcctatcggcaagacagagaagaccggtaaacgtagcacttcagcggcggttttagaagctcttcgcgaagtccatcccattgtggacaagatcttgcagtaccgcgaactcgcgaaattgaaaggcacctatattgaccgtcttccggcattagtccacccgaaaacgggacgcctccatacccgcttcaaccaaacagccacggcgaccggtcgtttgtcctcctctgatccaaaccttcagaatattccagtacgtaccccattgggccagaagatccgccgtgcgtttgtagctgaggagggttggcgtttagtggccctcgattatcgtcaaattgaattacgtgtccttgcccatctttctggcgatgagaacctcatccgcgtgtttcaggaaggcaaagacattcacactcaaacggcaagctggatgtttggattatcagctgaagcgatcgatcctttgatgcgtcgtgcagcgaagaccatcaatttcggtgttctctacggtatgagtgcctttcgtttgtcgcaggaattagtgattccctatgaagaagctcaggcgttcattcagaaatactttcaaagctatcccaaagttaaagcatggatcgagaagactctccgtgaaggccgcacacgtggttacgtagagaccttatttggacgtcgccgctatgttcccgatttaaacgctcgcgtgaaaggcaagcgtgaagccgccgaacgcatggcgttcaacatgcctgtacagggcacggcagctgacctcatgaaacttgcaatggtgcgcctttttccacaattgcgtgaagttggtgcccgcatgctcttgcaggtccacgatgaactcttgttagaagcgccaaaagagcgtgcggaagaggtggcagccctcgcgaaagaagttatggaaggcgtgtggcccttagcggtgcctcttgaagtcgaagttggtattggcgaggattggctggctgccaaagga

SEQ ID NO: 4454 - protein, 841 aa, synthetic construct
  REGION 1..841: note = Variant of DNA polymerase I from Thermus sp. strain 2.9
MHHHHHHGGSGVLPVFEPKGRVLLVDGHHLAYRNFFALKGLTTSLGEPVQGVYGFAKSLLKALKEDGDVVIVVFDAKAPSFRHEAYEAYKAGRAPTPEDFPRQLALMKELVDLLGLERLEVPGFEADDVLATLAKKAEREGYEVQILTADRDLFQLLSPRISVLHPEGHRITPEWLWEKYGLRPEQWVDFRALAGDPSDNIPGVKGIGEKTALKLLKEWGSLENLLKNLDQVKPESVREKILAHLEDLKLSRELSRVRTDLPLEVDFGRRREPDWEGLKAFLERLEFGSLLHEFGLLESPLLAEEAPWPPPEGAFLGYRLSRPEPMWAELLALAASAQGRVYRAEDPHGALRGLFEVRGLLAKDLAVVALREGLDLPPTDDPMLLAYLLDPSNTTPEGVARRYGGEWTEDAAKRALLAERLHANLLGRLQGEERLLWLYEEVEKPLSRVLAHMEATGVKLDVAYLENLSLEVAAHMRRLEEEVFRLAGRSFRLNSRDQLERVLFDELGLPPIGKTEKTGKRSTSAAVLEALREVHPIVDKILQYRELAKLKGTYIDRLPALVHPKTGRLHTRFNQTATATGRLSSSDPNLQNIPVRTPLGQKIRRAFVAEEGWRLVALDYRQIELRVLAHLSGDENLIRVFQEGKDIHTQTASWMFGLSAEAIDPLMRRAAKTINFGVLYGMSAFRLSQELVIPYEEAQAFIQKYFQSYPKVKAWIEKTLREGRTRGYVETLFGRRRYVPDLNARVKGKREAAERMAFNMPVQGTAADLMKLAMVRLFPQLREVGARMLLQVHDELLLEAPKERAEEVAALAKEVMEGVWPLAVPLEVEVGIGEDWLAAKG

SEQ ID NO: 4455 - DNA, 2523 bp, synthetic construct
  misc_feature 1..2523: note = Variant of DNA polymerase I from Thermus sp. strain 2.9
  source 1..2523: mol_type = other DNA
atgcaccatcatcatcatcatggcggtagcggcgtgttaccggtgttcgagcctaaaggtcgcgtgcttctggttgatggccatcatctcgcgtatcgtaacttctttgccctgaaaggattaaccaccagcctgggcgagccggtacagggtgtctacggctttgcaaagtcgctcctgaaagctctgaaagaagacggtgatgtggtgattgttgtctttgatgcgaaagcgccaagttttcgccacgaagcgtacgaagcttacaaagccgggcgtgctccaacgccggaagactttcctcgccaattggcgcttatgaaggaattagtggatttgcttggcctcgaacgcttggaagttcccggtttcgaggcagacgacgtattagcgactctcgcaaagaaagccgaacgtgagggctatgaagtccagatcttgacagcagatcgcgatcttttccagcttttatctccgcgcatctcggtgttacacccggaagggcatcgtatcaccccggaatggctctgggagaaatatggtttgcgtcccgaacaatgggtggattttcgcgccttagcaggcgatccgagcgacaatattccgggagttaaaggtatcggcgagaagacggcgctcaagctccttaaagaatgggggtcgttggagaacttgcttaagaatttagatcaggtcaaaccagagtcagtgcgtgagaagattcttgctcacctcgaagacctcaaattaagccgcgaattgtcccgtgtacgcaccgatttgccgctcgaagttgatttcggtcgccgccgcgaacctgactgggagggtcttaaagcgtttttagagcgtcttgaatttggttcgctcttgcatgaattcggccttttagaaagcccgttactggccgaagaagcaccttggccaccgcccgagggcgcgtttttaggttaccgtttgagtcgcccggaaccgatgtgggccgaattactggctcttgcagcgtctgcccagggacgtgtgtatcgcgcggaagaccctcatggtgcgctccgcggcctcttcgaagtccgtggactccttgccaaagacttagctgttgttgcattgcgcgaaggtcttgatttacctccgactgatgatccaatgcttcttgcgtacctcttggacccgtcaaacacgacgcccgaaggcgtagcccgtcgttacggcggcgagtggaccgaagatgcagcgaaacgcgcgttattggccgaacgtttgcacgccaatttattaggacgtttgcaaacggaggaacgtctcctctggctttacgaagaagtggagaaaccattgagtcgcgtgctcgcgcatatggaagctaccggtgtcaaattagacgtggcgtatttggagaatctcagccttgaagttgctgcccacatgcgccgcttggaggaagaagtattccgtttagcaggccgttcctttcgccttaactctcgcgatcagttagaacgtgtgttgttcgatgaacttggtctccctcctatcggcaagacagagaagaccggtaaacgtagcacttcagcggcggttttagaagctcttcgcgaagtccatcccattgtggacaagatcttgcagtaccgcgaactcgcgaaattgaaaggcacctatattgaccgtcttccggcattagtccacccgaaaacgggacgcctccatacccgcttcaaccaaacagccacggcgaccggtcgtttgtcctcctctgatccaaaccttcagaatattccagtacgtaccccattgggccagaagatccgccgtgcgtttgtagctgaggagggttggcgtttagtggccctcgattatcgtcaaattgaattacgtgtccttgcccatctttctggcgatgagaacctcatccgcgtgtttcaggaaggcaaagacattcacactcaaacggcaagctggatgtttggattatcagctgaagcgatcgatcctttgatgcgtcgtgcagcgaagaccatcaatttcggtgttctctacggtatgagtgcctttcgtttgtcgcaggaattaggcattccctatgaagaagctcaggcgttcattcagaaatactttcaaagctatcccaaagttaaagcatggatcgagaagactctccgtgaaggccgcacacgtggttacgtagagaccttatttggacgtcgccgctatgttcccgatttaaacgctcgcgtgaaaggcaagcgtgaagccgccgaacgcatggcgttcaacatgcctgtacagggcacggcagctgacctcatgaaacttgcaatggtgcgcctttttccacaattgcgtgaagttggtgcccgcatgctcttgcaggtccacgatgaactcttgttagaagcgccaaaagagcgtgcggaagaggtggcagccctcgcgaaagaagttatggaaggcgtgtggcccttagcggtgcctcttgaagtcgaagttggtattggcgaggattggctggctgccaaagga

SEQ ID NO: 4456 - protein, 841 aa, synthetic construct
  REGION 1..841: note = Variant of DNA polymerase I from Thermus sp. strain 2.9
MHHHHHHGGSGVLPVFEPKGRVLLVDGHHLAYRNFFALKGLTTSLGEPVQGVYGFAKSLLKALKEDGDVVIVVFDAKAPSFRHEAYEAYKAGRAPTPEDFPRQLALMKELVDLLGLERLEVPGFEADDVLATLAKKAEREGYEVQILTADRDLFQLLSPRISVLHPEGHRITPEWLWEKYGLRPEQWVDFRALAGDPSDNIPGVKGIGEKTALKLLKEWGSLENLLKNLDQVKPESVREKILAHLEDLKLSRELSRVRTDLPLEVDFGRRREPDWEGLKAFLERLEFGSLLHEFGLLESPLLAEEAPWPPPEGAFLGYRLSRPEPMWAELLALAASAQGRVYRAEDPHGALRGLFEVRGLLAKDLAVVALREGLDLPPTDDPMLLAYLLDPSNTTPEGVARRYGGEWTEDAAKRALLAERLHANLLGRLQTEERLLWLYEEVEKPLSRVLAHMEATGVKLDVAYLENLSLEVAAHMRRLEEEVFRLAGRSFRLNSRDQLERVLFDELGLPPIGKTEKTGKRSTSAAVLEALREVHPIVDKILQYRELAKLKGTYIDRLPALVHPKTGRLHTRFNQTATATGRLSSSDPNLQNIPVRTPLGQKIRRAFVAEEGWRLVALDYRQIELRVLAHLSGDENLIRVFQEGKDIHTQTASWMFGLSAEAIDPLMRRAAKTINFGVLYGMSAFRLSQELGIPYEEAQAFIQKYFQSYPKVKAWIEKTLREGRTRGYVETLFGRRRYVPDLNARVKGKREAAERMAFNMPVQGTAADLMKLAMVRLFPQLREVGARMLLQVHDELLLEAPKERAEEVAALAKEVMEGVWPLAVPLEVEVGIGEDWLAAKG

SEQ ID NO: 4457 - DNA, 2523 bp, synthetic construct
  misc_feature 1..2523: note = Variant of DNA polymerase I from Thermus sp. strain 2.9
  source 1..2523: mol_type = other DNA
atgcaccatcatcatcatcatggcggtagcggcgtgttaccggtgttcgagcctaaaggtcgcgtgcttctggttgatggccatcatctcgcgtatcgtaacttctttgccctgaaaggattaaccaccagcctgggcgagccggtacagggtgtctacggctttgcaaagtcgctcctgaaagctctgaaagaagacggtgatgtggtgattgttgtctttgatgcgaaagcgccaagttttcgccacgaagcgtacgaagcttacaaagccgggcgtgctccaacgccggaagactttcctcgccaattggcgcttatgaaggaattagtggatttgcttggcctcgaacgcttggaagttcccggtttcgaggcagacgacgtattagcgactctcgcaaagaaagccgaacgtgagggctatgaagtccagatcttgacagcagatcgcgatcttttccagcttttatctccgcgcatctcggtgttacacccggaagggcatcgtatcaccccggaatggctctgggagaaatatggtttgcgtcccgaacaatgggtggattttcgcgccttagcaggcgatccgagcgacaatattccgggagttaaaggtatcggcgagaagacggcgctcaagctccttaaagaatgggggtcgttggagaacttgcttaagaatttagatcaggtcaaaccagagtcagtgcgtgagaagattcttgctcacctcgaagacctcaaattaagccgcgaattgtcccgtgtacgcaccgatttgccgctcgaagttgatttcggtcgccgccgcgaacctgactgggagggtcttaaagcgtttttagagcgtcttgaatttggttcgctcttgcatgaattcggccttttagaaagcccgttactggccgaagaagcaccttggccaccgcccgagggcgcgtttttaggttaccgtttgagtcgcccggaaccgatgtgggccgaattactggctcttgcagcgtctgcccagggacgtgtgtatcgcgcggaagaccctcatggtgcgctccgcggcctcttcgaagtccgtggactccttgccaaagacttagctgttgctgcattgcgcgaaggtcttgatttacctccgactgatgatccaatgcttcttgcgtacctcttggacccgtcaaacacgacgcccgaaggcgtagcccgtcgttacggcggcgagtggaccgaagatgcagcgaaacgcgcgttattggccgaacgtttgcacgccaatttattaggacgtttgcaaggcgaggaacgtctcctctggctttacgaagaagtggagaaaccattgagtcgcgtgctcgcgcatatggaagctaccggtgtcaaattagacgtggcgtatttggagaatctcagccttgaagttgctgcccacatgcgccgcttggaggaagaagtattccgtttagcaggccgttcctttcgccttaactctcgcgatcagttagaacgtgtgttgttcgatgaacttggtctccctcctatcggcaagacagagaagaccggtaaacgtagcacttcagcggcggttttagaagctcttcgcgaagtccatcccattgtggacaagatcttgcagtaccgcgaactcgcgaaattgaaaggcacctatattgaccgtcttccggcattagtccacccgaaaacgggacgcctccatacccgcttcaaccaaacagccacggcgaccggtcgtttgtcctcctctgatccaaaccttcagaatattccagtacgtaccccattgggccagaagatccgccgtgcgtttgtagctgaggagggttggcgtttagtggccctcgattatcgtcaaattgaattacgtgtccttgcccatctttctggcgatgagaacctcatccgcgtgtttcaggaaggcaaagacattcacactcaaacggcaagctggatgtttggattatcagctgaagcgatcgatcctttgatgcgtcgtgcagcgaagaccatcaatttcggtgttctctacggtatgagtgcctttcgtttgtcgcaggaattaggcattccctatgaagaagctcaggcgttcattcagaaatactttcaaagctatcccaaagttaaagcatggatcgagaagactctccgtgaaggccgcacacgtggttacgtagagaccttatttggacgtcgccgctatgttcccgatttaaacgctcgcgtgaaaggcaagcgtgaagccgccgaacgcatggcgttcaacatgcctgtacagggcacggcagctgacctcatgaaacttgcaatggtgcgcctttttccacaattgcgtgaagttggtgcccgcatgctcttgcaggtccacgatgaactcttgttagaagcgccaaaagagcgtgcggaagaggtggcagccctcgcgaaagaagttatggaaggcgtgtggcccttagcggtgcctcttgaagtcgaagttggtattggcgaggattggctggctgccaaagga

SEQ ID NO: 4458 - protein, 841 aa, synthetic construct
  REGION 1..841: note = Variant of DNA polymerase I from Thermus sp. strain 2.9
MHHHHHHGGSGVLPVFEPKGRVLLVDGHHLAYRNFFALKGLTTSLGEPVQGVYGFAKSLLKALKEDGDVVIVVFDAKAPSFRHEAYEAYKAGRAPTPEDFPRQLALMKELVDLLGLERLEVPGFEADDVLATLAKKAEREGYEVQILTADRDLFQLLSPRISVLHPEGHRITPEWLWEKYGLRPEQWVDFRALAGDPSDNIPGVKGIGEKTALKLLKEWGSLENLLKNLDQVKPESVREKILAHLEDLKLSRELSRVRTDLPLEVDFGRRREPDWEGLKAFLERLEFGSLLHEFGLLESPLLAEEAPWPPPEGAFLGYRLSRPEPMWAELLALAASAQGRVYRAEDPHGALRGLFEVRGLLAKDLAVAALREGLDLPPTDDPMLLAYLLDPSNTTPEGVARRYGGEWTEDAAKRALLAERLHANLLGRLQGEERLLWLYEEVEKPLSRVLAHMEATGVKLDVAYLENLSLEVAAHMRRLEEEVFRLAGRSFRLNSRDQLERVLFDELGLPPIGKTEKTGKRSTSAAVLEALREVHPIVDKILQYRELAKLKGTYIDRLPALVHPKTGRLHTRFNQTATATGRLSSSDPNLQNIPVRTPLGQKIRRAFVAEEGWRLVALDYRQIELRVLAHLSGDENLIRVFQEGKDIHTQTASWMFGLSAEAIDPLMRRAAKTINFGVLYGMSAFRLSQELGIPYEEAQAFIQKYFQSYPKVKAWIEKTLREGRTRGYVETLFGRRRYVPDLNARVKGKREAAERMAFNMPVQGTAADLMKLAMVRLFPQLREVGARMLLQVHDELLLEAPKERAEEVAALAKEVMEGVWPLAVPLEVEVGIGEDWLAAKG

SEQ ID NO: 4459 - DNA, 2523 bp, synthetic construct
  misc_feature 1..2523: note = Variant of DNA polymerase I from Thermus sp. strain 2.9
  source 1..2523: mol_type = other DNA
atgcaccatcatcatcatcatggcggtagcggcgtgttaccggtgttcgagcataaaggtcgcgtgcttctggttgatggccatcatctcgcgtatcgtaacttctttgccctgaaaggattaaccaccagcctgggcgagccggtacagggtgtctacggctttgcaaagtcgctcctgaaagctctgaaagaagacggtgatgtggtgattgttgtctttgatgcgaaagcgccaagttttcgccacgaagcgtacgaagcttacaaagccgggcgtgctccaacgccggaagactttcctcgccaattggcgcttatgaaggaattagtggatttgcttggcctcgaacgcttggaagttcccggtttcgaggcagacgacgtattagcgactctcgcaaagaaagccgaagatgagggctatgaagtccagatcttgacagcagatcgcgatcttttccagcttttatctccgcgcatctcggtgttacacccggaagggcatcgtatcaccccggaatggctctgggagaaatatggtttgcgtcccgaacaatgggtggattttcgcgccttagcaggcgatccgagcgacaatattccgggagttaaaggtatcggcgagaagacggcgctcaagctccttaaagaatgggggtcgttggagaacttgcttaagaatttagatcaggtcaaaccagagtcagtgcgtgagaagattcttgctcacctcgaagacctcgagttaagccgcgaattgtcccgtgtacgcaccgatttgccgctcgaagttgatttcggtcgccgccgcgaacctgactgggagggtcttaaagcgtttttagagcgtcttgaatttggttcgctcctgcatgaattcggccttttagaaagcccgttactggccgaagaagcaccttggccaccgcccgagggcgcgtttttaggttaccgtttgagtcgcccggaaccgatgtgggccgaattactggctcttgcagcgtctgcccagggacgtgtgtatcgcgcggaagaccctcatggtgcgctccgcggcctcttcgaagtccgtggactccttgccaaagacttagctgttgttgcattgcgcgaaggtcttgatttacctccgactgatgatccaatgcttcttgcgtacctcttggacccgtcaaacacgacgcccgaaggcgtagcccgtcgttacggcggcgagtggaccgaagatgcagcgaaacgcgcgttattggccgaacgtttgcacgagaatttactgggacgtttgcaaggcgagaagcgtctcctctggctttacgaagaagtggagaaaccattgagtcgcgtgctcgctcatatggaagctaccggtgtcaaattagacgtggcgtatttggagaatctcagccttgaagttgctgcccacatgcgccgcttggaggaagaagtattccgtttagcaggccgttcctttcgccttaactctcgcgatcagttagaaaaagtgttgttcgatgaacttggtctccctcctatcggcaagacagagaagaccggtaaacgtagcacttcagcggcggttttagaagctcttcgcgaagtccatcccattgtggacaagatcttgcagtaccgcgaaatggcgaaattgaaaggcacctatattgaccgtcttccggcattagtccacccgaaaacgggacgcctccatacccgcttcaaccaaacagccacggcgaccggtcgtttgtcctcctctgatccaaaccttcagaatattccagtacgtaccccattgggccagaagatccgccgtgcgtttgtagctgaggagggttggcgtttagtggccctcgattatcgtcaaattgaattacgtgtccttgcccatctttctggcgatgagaacctcatccgcgtgtttcaggaaggcaaagacattcacactcaaacggcaagctggatgtttggattatcagctgaagcgatcgatcctttgatgcgtcgtgcagcgaagaccatcaatttcggtgttctctacggtatgagtgcctttcgtttgtcgcaggaattaggcattccctatgaagaagctcaggcgttcattcagaaatactttcaaagctatcccaaagttaaagcatggatcgagaagactctccgtgaaggccgccaccgtggttacgtagagaccttatttggacgtcgccgctatgttcccgatttaaacgcccgcgtgaaaggcaagcgtgaagccgccgaacgcatggcgttcaacatgcctgtacagggcacggcagctgacctcatgaaacttgcaatggtgcgcctttttccacaattgcgtgaagttggtgcccgcatgctcttgcaggtccacgatgaactcttgttagaagcgccaaaagagcgtgcggaagaggtggcagccctcgcgaaagaagttatggaaggcgtgtggcccttagcggtgcctcttgaagtcgaagttggtattggcgaggattggctggctgccaaagga

SEQ ID NO: 4460 - protein, 841 aa, synthetic construct
  REGION 1..841: note = Variant of DNA polymerase I from Thermus sp. strain 2.9
MHHHHHHGGSGVLPVFEHKGRVLLVDGHHLAYRNFFALKGLTTSLGEPVQGVYGFAKSLLKALKEDGDVVIVVFDAKAPSFRHEAYEAYKAGRAPTPEDFPRQLALMKELVDLLGLERLEVPGFEADDVLATLAKKAEDEGYEVQILTADRDLFQLLSPRISVLHPEGHRITPEWLWEKYGLRPEQWVDFRALAGDPSDNIPGVKGIGEKTALKLLKEWGSLENLLKNLDQVKPESVREKILAHLEDLELSRELSRVRTDLPLEVDFGRRREPDWEGLKAFLERLEFGSLLHEFGLLESPLLAEEAPWPPPEGAFLGYRLSRPEPMWAELLALAASAQGRVYRAEDPHGALRGLFEVRGLLAKDLAVVALREGLDLPPTDDPMLLAYLLDPSNTTPEGVARRYGGEWTEDAAKRALLAERLHENLLGRLQGEKRLLWLYEEVEKPLSRVLAHMEATGVKLDVAYLENLSLEVAAHMRRLEEEVFRLAGRSFRLNSRDQLEKVLFDELGLPPIGKTEKTGKRSTSAAVLEALREVHPIVDKILQYREMAKLKGTYIDRLPALVHPKTGRLHTRFNQTATATGRLSSSDPNLQNIPVRTPLGQKIRRAFVAEEGWRLVALDYRQIELRVLAHLSGDENLIRVFQEGKDIHTQTASWMFGLSAEAIDPLMRRAAKTINFGVLYGMSAFRLSQELGIPYEEAQAFIQKYFQSYPKVKAWIEKTLREGRHRGYVETLFGRRRYVPDLNARVKGKREAAERMAFNMPVQGTAADLMKLAMVRLFPQLREVGARMLLQVHDELLLEAPKERAEEVAALAKEVMEGVWPLAVPLEVEVGIGEDWLAAKG

SEQ ID NO: 4461 - DNA, 2523 bp, synthetic construct
  misc_feature 1..2523: note = Variant of DNA polymerase I from Thermus sp. strain 2.9
  source 1..2523: mol_type = other DNA
atgcaccatcatcatcatcatggcggtagcggcgtgttaccggtgttcgagcctaaaggtcgcgtgcttctggttgatggccatcatctcgcgtatcgtaacttctttgccctgaaaggattaaccaccagcctgggcgagccggtacagggtgtctacggctttgcaaagtcgctcctgaaagctctgaaagaagacggtgatgtggtgattgttgtctttgatgcgaaagcgccaagttttcgccacgaagcgtacgaagcttacaaagccgggcgtgctccaacgccggaagactttcctcgccaattggcgcttatgaaggaattagtggatttgcttggcctcgaacgcttggaagttcccggtttcgaggcagacgacgtattagcgactctcgcaaagaaagccgaacgtgagggctatgaagtccagatcttgacagcagatcgcgatcttttccagcttttatctccgcgcatctcggtgttacacccggaagggcatcgtatcaccccggaatggctctgggagaaatatggtttgcgtcccgaacaatgggtggattttcgcgccttagcaggcgatccgagcgacaatattccgggagttaaaggtatcggcgagaagacggcgctcaagctccttaaagaatgggggtcgttggagaacttgcttaagaatttagatcaggtcaaaccagagtcagtgcgtgagaagattcttgctcacctcgaagacctcaaattaagccgcgaattgtcccgtgtacgcaccgatttgccgctcgaagttgatttcggtcgccgccgcgaacctgactgggagggtcttaaagcgtttttagagcgtcttgaatttggttcgctcttgcatgaattcggccttttagaaagcccgttactggccgaagaagcaccttggccaccgcccgagggcgcgtttttaggttaccgtttgagtcgcccggaaccgatgtgggccgaattactggctcttgcagcgtctgcccagggacgtgtgtatcgcgcggaagaccctcatggtgcgctccgcggcctcttcgaagtccgtggactccttgccaaagacttagctgttgttgcattgcgcgaaggtcttgatttacctccgactgatgatccaatgcttcttgcgtacctcttggacccgtcaaacacgacgcccgaaggcgtagcccgtcgttacggcggcgagtggaccgaagatgcagcgaaacgcgcgttattggccgaacgtttgcacgccaatttattaggacgtttgcaaggcgaggaacgtctcctctggctttacgaagaagtggagaaaccattgagtcgcgtgctcgcgcatatggaagctaccggtgtcaaattagacgtggcgtatttggagaatctcagccttgaagttgctgcccacatgcgccgcttggaggaagaagtattccgtttagcaggccgttcctttcgccttaactctcgcgatcagttagaacgtgtgttgttcgatgaacttggtctccctcctatcggcaagacagagaagaccggtaaacgtagcacttcagcggcggttttagaagctcttcgcgaagtccatcccattgtggacaagatcttgcagtaccgcgaactcgcgaaattgaaaggcacctatgctgaccgtcttccggcattagtccacccgaaaacgggacgcctccatacccgcttcaaccaaacagccacggcgaccggtcgtttgtcctcctctgatccaaaccttcagaatattccagtacgtaccccattgggccagaagatccgccgtgcgtttgtagctgaggagggttggcgtttagtggccctcgattatcgtcaaattgaattacgtgtccttgcccatctttctggcgatgagaacctcatccgcgtgtttcaggaaggcaaagacattcacactcaaacggcaagctggatgtttggattatcagctgaagcgatcgatcctttgatgcgtcgtgcagcgaagaccatcaatttcggtgttctctacggtatgagtgcctttcgtttgtcgcaggaattaggcattccctatgaagaagctcaggcgttcattcagaaatactttcaaagctatcccaaagttaaagcatggatcgagaagactctccgtgaaggccgcacacgtggttacgtagagaccttatttggacgtcgccgctatgttcccgatttaaacgctcgcgtgaaaggcaagcgtgaagccgccgaacgcatggcgttcaacatgcctgtacagggcacggcagctgacctcatgaaacttgcaatggtgcgcctttttccacaattgcgtgaagttggtgcccgcatgctcttgcaggtccacgatgaactcttgttagaagcgccaaaagagcgtgcggaagaggtggcagccctcgcgaaagaagttatggaaggcgtgtggcccttagcggtgcctcttgaagtcgaagttggtattggcgaggattggctggctgccaaagga

SEQ ID NO: 4462 - protein, 841 aa, synthetic construct
  REGION 1..841: note = Variant of DNA polymerase I from Thermus sp. strain 2.9
MHHHHHHGGSGVLPVFEPKGRVLLVDGHHLAYRNFFALKGLTTSLGEPVQGVYGFAKSLLKALKEDGDVVIVVFDAKAPSFRHEAYEAYKAGRAPTPEDFPRQLALMKELVDLLGLERLEVPGFEADDVLATLAKKAEREGYEVQILTADRDLFQLLSPRISVLHPEGHRITPEWLWEKYGLRPEQWVDFRALAGDPSDNIPGVKGIGEKTALKLLKEWGSLENLLKNLDQVKPESVREKILAHLEDLKLSRELSRVRTDLPLEVDFGRRREPDWEGLKAFLERLEFGSLLHEFGLLESPLLAEEAPWPPPEGAFLGYRLSRPEPMWAELLALAASAQGRVYRAEDPHGALRGLFEVRGLLAKDLAVVALREGLDLPPTDDPMLLAYLLDPSNTTPEGVARRYGGEWTEDAAKRALLAERLHANLLGRLQGEERLLWLYEEVEKPLSRVLAHMEATGVKLDVAYLENLSLEVAAHMRRLEEEVFRLAGRSFRLNSRDQLERVLFDELGLPPIGKTEKTGKRSTSAAVLEALREVHPIVDKILQYRELAKLKGTYADRLPALVHPKTGRLHTRFNQTATATGRLSSSDPNLQNIPVRTPLGQKIRRAFVAEEGWRLVALDYRQIELRVLAHLSGDENLIRVFQEGKDIHTQTASWMFGLSAEAIDPLMRRAAKTINFGVLYGMSAFRLSQELGIPYEEAQAFIQKYFQSYPKVKAWIEKTLREGRTRGYVETLFGRRRYVPDLNARVKGKREAAERMAFNMPVQGTAADLMKLAMVRLFPQLREVGARMLLQVHDELLLEAPKERAEEVAALAKEVMEGVWPLAVPLEVEVGIGEDWLAAKG

SEQ ID NO: 4463 - DNA, 2523 bp, synthetic construct
  misc_feature 1..2523: note = Variant of DNA polymerase I from Thermus sp. strain 2.9
  source 1..2523: mol_type = other DNA
atgcaccatcatcatcatcatggcggtagcggcgtgttaccggtgttcgagcctaaaggtcgcgtgcttctggttgatggccatcatctcgcgtatcgtaacttctttgccctgaaaggattaaccaccagcctgggcgagccggtacagggtgtctacggctttgcaaagtcgctcctgaaagctctgaaagaagacggtgatgtggtgattgttgtctttgatgcgaaagcgccaagttttcgccacgaagcgtacgaagcttacaaagccgggcgtgctccaacgccggaagactttcctcgccaattggcgcttatgaaggaattagtggatttgcttggcctcgaacgcttggaagttcccggtttcgaggcagacgacgtattagcgactctcgcaaagaaagccgaacgtgagggctatgaagtccagatcttgacagcagatcgcgatcttttccagcttttatctccgcgcatctcggtgttacacccggaagggcatcgtatcaccccggaatggctctgggagaaatatggtttgcgtcccgaacaatgggtggattttcgcgccttagcaggcgatccgagcgacaatattccgggagttaaaggtatcggcgagaagacggcgctcaagctccttaaagaatgggggtcgttggagaacttgcttaagaatttagatcaggtcaaaccagagtcagtgcgtgagaagattcttgctcacctcgaagacctcaaattaagccgcgaattgtcccgtgtacgcaccgatttgccgctcgaagttgatttcggtcgccgccgcgaacctgactgggagggtcttaaagcgtttttagagcgtcttgaatttggttcgctcttgcatgaattcggccttttagaaagcccgttactggccgaagaagcaccttggccaccgcccgagggcgcgtttttaggttaccgtttgagtcgcccggaaccgatgtgggccgaattactggctcttgcagcgtctgcccagggacgtgtgtatcgcgcggaagaccctcatggtgcgctccgcggcctcttcgaagtccgtggactccttgccaaagacttagctgttgttgcattgcgcgaaggtcttgatttacctccgactgatgatccaatgcttcttgcgtacctcttggacccgtcaaacacgacgcccgaaggcgtagcccgtcgttacggcggcgagtggaccgaagatgcagcgaaacgcgcgttattggccgaacgtttgcacgccaatttattaggacgtttgcaaggcgaggaacgtctcctctggctttacgaagaagtggagaaaccattgagtcgcgtgctcgcgcatatggaagctaccggtgtcaaattagacgtggcgtatttggagaatctcagccttgaagttgctgcccacatgcgccgcttggaggaagaagtattccgtttagcaggccgttcctttcgccttaactctcgcgatcagttagaacgtgtgttgttcgatgaacttggtctccctcctatcggcaagacagagaagaccggtaaacgtagcacttcagcggcggttttagaagctcttcgcgaagtccatcccattgtggacaagatcttgcagtaccgcgaactcgcgaaattgaaaggcacctatattgaccgtcttccggcattagtccacccgaaaacgggacgcctccatacccgcttcaaccaaacagccacggcgaccggtcgtttgtcctcctctgatccaaaccttcagaatattccagtacgtaccccattgggccagaagatccgccgtgcgtttgtagctgaggagggttggcgtttagtggccctcgattatcgtcaaattgaattacgtgtccttgcccatctttctggcgatgagaacctcatccgcgtgtttcaggaaggcaaagacattcacactcaaacggcaagctggttttttggattatcagctgaagcgatcgatcctttgatgcgtcgtgcagcgaagaccatcaatttcggtgttctctacggtatgagtgcctttcgtttgtcgcaggaattaggcattccctatgaagaagctcaggcgttcattcagaaatactttcaaagctatcccaaagttaaagcatggatcgagaagactctccgtgaaggccgcacacgtggttacgtagagaccttatttggacgtcgccgctatgttcccgatttaaacgctcgcgtgaaaggcaagcgtgaagccgccgaacgcatggcgttcaacatgcctgtacagggcacggcagctgacctcatgaaacttgcaatggtgcgcctttttccacaattgcgtgaagttggtgcccgcatgctcttgcaggtccacgatgaactcttgttagaagcgccaaaagagcgtgcggaagaggtggcagccctcgcgaaagaagttatggaaggcgtgtggcccttagcggtgcctcttgaagtcgaagttggtattggcgaggattggctggctgccaaagga

SEQ ID NO: 4464 - protein, 841 aa, synthetic construct
  REGION 1..841: note = Variant of DNA polymerase I from Thermus sp. strain 2.9
MHHHHHHGGSGVLPVFEPKGRVLLVDGHHLAYRNFFALKGLTTSLGEPVQGVYGFAKSLLKALKEDGDVVIVVFDAKAPSFRHEAYEAYKAGRAPTPEDFPRQLALMKELVDLLGLERLEVPGFEADDVLATLAKKAEREGYEVQILTADRDLFQLLSPRISVLHPEGHRITPEWLWEKYGLRPEQWVDFRALAGDPSDNIPGVKGIGEKTALKLLKEWGSLENLLKNLDQVKPESVREKILAHLEDLKLSRELSRVRTDLPLEVDFGRRREPDWEGLKAFLERLEFGSLLHEFGLLESPLLAEEAPWPPPEGAFLGYRLSRPEPMWAELLALAASAQGRVYRAEDPHGALRGLFEVRGLLAKDLAVVALREGLDLPPTDDPMLLAYLLDPSNTTPEGVARRYGGEWTEDAAKRALLAERLHANLLGRLQGEERLLWLYEEVEKPLSRVLAHMEATGVKLDVAYLENLSLEVAAHMRRLEEEVFRLAGRSFRLNSRDQLERVLFDELGLPPIGKTEKTGKRSTSAAVLEALREVHPIVDKILQYRELAKLKGTYIDRLPALVHPKTGRLHTRFNQTATATGRLSSSDPNLQNIPVRTPLGQKIRRAFVAEEGWRLVALDYRQIELRVLAHLSGDENLIRVFQEGKDIHTQTASWFFGLSAEAIDPLMRRAAKTINFGVLYGMSAFRLSQELGIPYEEAQAFIQKYFQSYPKVKAWIEKTLREGRTRGYVETLFGRRRYVPDLNARVKGKREAAERMAFNMPVQGTAADLMKLAMVRLFPQLREVGARMLLQVHDELLLEAPKERAEEVAALAKEVMEGVWPLAVPLEVEVGIGEDWLAAKG

SEQ ID NO: 4465 - DNA, 2523 bp, synthetic construct
  misc_feature 1..2523: note = Variant of DNA polymerase I from Thermus sp. strain 2.9
  source 1..2523: mol_type = other DNA
atgcaccatcatcatcatcatggcggtagcggcgtgttaccggtgttcgagcctaaaggtcgcgtgcttctggttgatggccatcatctcgcgtatcgtaacttctttgccctgaaaggattaaccaccagcctgggcgagccggtacagggtgtctacggctttgcaaagtcgctcctgaaagctctgaaagaagacggtgatgtggtgattgttgtctttgatgcgaaagcgccaagttttcgccacgaagcgtacgaagcttacaaagccgggcgtgctccaacgccggaagactttcctcgccaattggcgcttatgaaggaattagtggatttgcttggcctcgaacgcttggaagttcccggtttcgaggcagacgacgtattagcgactctcgcaaagaaagccgaacgtgagggctatgaagtccagatcttgacagcagatcgcgatcttttccagcttttatctccgcgcatctcggtgttacacccggaagggcatcgtatcaccccggaatggctctgggagaaatatggtttgcgtcccgaacaatgggtggattttcgcgccttagcaggcgatccgagcgacaatattccgggagttaaaggtatcggcgagaagacggcgctcaagctccttaaagaatgggggtcgttggagaacttgcttaagaatttagatcaggtcaaaccagagtcagtgcgtgagaagattcttgctcacctcgaagacctcaaattaagccgcgaattgtcccgtgtacgcaccgatttgccgctcgaagttgatttcggtcgccgccgcgaacctgactgggagggtcttaaagcgtttttagagcgtcttgaatttggttcgctcttgcatgaattcggccttttagaaagcccgttactggccgaagaagcaccttggccaccgcccgagggcgcgtttttaggttaccgtttgagtcgcccggaaccgatgtgggccgaattactggctcttgcagcgtctgcccagggacgtgtgtatcgcgcggaagaccctcatggtgcgctccgcggcctcttcgaagtccgtggactccttgccaaagacttagctgttgttgcattgcgcgaaggtcttgatttacctccgactgatgatccaatgcttcttgcgtacctcttggacccgtcaaacacgacgcccgaaggcgtagcccgtcgttacggcggcgagtggaccgaagatgcagcgaaacgcgcgttattggccgaacgtttgcacgccaatttattaggacgtttgcaaggcgaggaacgtctcctctggctttacgaagaagtggagaaaccattgagtcgcgtgctcgcgcatatggaagctaccggtgtcaaattagacgtggcgtatttggagaatctcagccttgaagttgctgcccacatgcgccgcttggaggaagaagtattccgtttagcaggccgttcctttcgccttaactctcgcgatcagttagaacgtgtgttgttcgatgaacttggtctccctcctatcggcaagacagagaagaccggtaaacgtagcacttcagcggcggttttagaagctcttcgcgaagtccatcccattgtggacaagatcttgcagtaccgcgaactcgcgaaattgaaaggcacctatattgaccgtcttccggcattagtccacccgaaaacgggacgcctccatacccgcttcaaccaaacagccacggcgaccggtcgtttgtcctcctctgatccaaaccttcagaatattccagtacgtaccccattgggccagaagatccgccgtgcgtttgtagctgaggagggttggcgtttagtggccctcgattatcgtcaaattgaattacgtgtccttgcccatctttctggcgatgagaacctcatccgcgtgtttcagatgggcaaagacattcacactcaaacggcaagctggatgtttggattatcagctgaagcgatcgatcctttgatgcgtcgtgcagcgaagaccatcaatttcggtgttctctacggtatgagtgcctttcgtttgtcgcaggaattaggcattccctatgaagaagctcaggcgttcattcagaaatactttcaaagctatcccaaagttaaagcatggatcgagaagactctccgtgaaggccgcacacgtggttacgtagagaccttatttggacgtcgccgctatgttcccgatttaaacgctcgcgtgaaaggcaagcgtgaagccgccgaacgcatggcgttcaacatgcctgtacagggcacggcagctgacctcatgaaacttgcaatggtgcgcctttttccacaattgcgtgaagttggtgcccgcatgctcttgcaggtccacgatgaactcttgttagaagcgccaaaagagcgtgcggaagaggtggcagccctcgcgaaagaagttatggaaggcgtgtggcccttagcggtgcctcttgaagtcgaagttggtattggcgaggattggctggctgccaaagga

SEQ ID NO: 4466 - protein, 841 aa, synthetic construct
  REGION 1..841: note = Variant of DNA polymerase I from Thermus sp. strain 2.9
MHHHHHHGGSGVLPVFEPKGRVLLVDGHHLAYRNFFALKGLTTSLGEPVQGVYGFAKSLLKALKEDGDVVIVVFDAKAPSFRHEAYEAYKAGRAPTPEDFPRQLALMKELVDLLGLERLEVPGFEADDVLATLAKKAEREGYEVQILTADRDLFQLLSPRISVLHPEGHRITPEWLWEKYGLRPEQWVDFRALAGDPSDNIPGVKGIGEKTALKLLKEWGSLENLLKNLDQVKPESVREKILAHLEDLKLSRELSRVRTDLPLEVDFGRRREPDWEGLKAFLERLEFGSLLHEFGLLESPLLAEEAPWPPPEGAFLGYRLSRPEPMWAELLALAASAQGRVYRAEDPHGALRGLFEVRGLLAKDLAVVALREGLDLPPTDDPMLLAYLLDPSNTTPEGVARRYGGEWTEDAAKRALLAERLHANLLGRLQGEERLLWLYEEVEKPLSRVLAHMEATGVKLDVAYLENLSLEVAAHMRRLEEEVFRLAGRSFRLNSRDQLERVLFDELGLPPIGKTEKTGKRSTSAAVLEALREVHPIVDKILQYRELAKLKGTYIDRLPALVHPKTGRLHTRFNQTATATGRLSSSDPNLQNIPVRTPLGQKIRRAFVAEEGWRLVALDYRQIELRVLAHLSGDENLIRVFQMGKDIHTQTASWMFGLSAEAIDPLMRRAAKTINFGVLYGMSAFRLSQELGIPYEEAQAFIQKYFQSYPKVKAWIEKTLREGRTRGYVETLFGRRRYVPDLNARVKGKREAAERMAFNMPVQGTAADLMKLAMVRLFPQLREVGARMLLQVHDELLLEAPKERAEEVAALAKEVMEGVWPLAVPLEVEVGIGEDWLAAKG

SEQ ID NO: 4467 - DNA, 2523 bp, synthetic construct
  misc_feature 1..2523: note = Variant of DNA polymerase I from Thermus sp. strain 2.9
  source 1..2523: mol_type = other DNA
atgcaccatcatcatcatcatggcggtagcggcgtgttaccggtgttcgagcctaaaggtcgcgtgcttctggttgatggccatcatctcgcgtatcgtaacttctttgccctgaaaggattaaccaccagcctgggcgagccggtacagggtgtctacggctttgcaaagtcgctcctgaaagctctgaaagaagacggtgatgtggtgattgttgtctttgatgcgaaagcgccaagttttcgccacgaagcgtacgaagcttacaaagccgggcgtgctccaacgccggaagactttcctcgccaattggcgcttatgaaggaattagtggatttgcttggcctcgaacgcttggaagttcccggtttcgaggcagacgacgtattagcgactctcgcaaagaaagccgaacgtgagggctatgaagtccagatcttgacagcagatcgcgatcttttccagcttttatctccgcgcatctcggtgttacacccggaagggcatcgtatcaccccggaatggctctgggagaaatatggtttgcgtcccgaacaatgggtggattttcgcgccttagcaggcgatccgagcgacaatattccgggagttaaaggtatcggcgagaagacggcgctcaagctccttaaagaatgggggtcgttggagaacttgcttaagaatttagatcaggtcaaaccagagtcagtgcgtgagaagattcttgctcacctcgaagacctcaaattaagccgcgaattgtcccgtgtacgcaccgatttgccgctcgaagttgatttcggtcgccgccgcgaacctgactgggagggtcttaaagcgtttttagagcgtcttgaatttggttcgctcttgcatgaattcggccttttagaaagcccgttactggccgaagaagcaccttggccaccgcccgagggcgcgtttttaggttaccgtttgagtcgcccggaaccgatgtgggccgaattactggctcttgcagcgtctgcccagggacgtgtgtatcgcgcggaagaccctcatggtgcgctccgcggcctcttcgaagtccgtggactccttgccaaagacttagctgttgttgcattgcgcgaaggtcttgatttacctccgactgatgatccaatgcttcttgcgtacctcttggacccgtcaaacacgacgcccgaaggcgtagcccgtcgttacggcggcgagtggaccgaagatgcagcgaaacgcgcgttattggccgaacgtttgcacgccaatttattaggacgtttgcaaggcgaggaacgtctcctctggctttacgaagaagtggagaaaccattgagtcgcgtgctcgcgcatatggaagctaccggtgtcaaattagacgtggcgtatttggagaatctcagccttgaagttgctgcccacatgcgccgcttggaggaagaagtattccgtttagcaggccgttcctttcgccttaactctcgcgatcagttagaacgtgtgttgttcgatgaacttggtctccctcctatcggcaagacagagaagaccggtaaacgtagcacttcagcggcggttttagaagctcttcgcgaagtccatcccattgtggacacgatcttgcagtaccgcgaactcgcgaaattgaaaggcacctatattgaccgtcttccggcattagtccacccgaaaacgggacgcctccatacccgcttcaaccaaacagccacggcgaccggtcgtttgtcctcctctgatccaaaccttcagaatattccagtacgtaccccattgggccagaagatccgccgtgcgtttgtagctgaggagggttggcgtttagtggccctcgattatcgtcaaattgaattacgtgtccttgcccatctttctggcgatgagaacctcatccgcgtgtttcaggaaggcaaagacattcacactcaaacggcaagctggatgtttggattatcagctgaagcgatcgatcctttgatgcgtcgtgcagcgaagaccatcaatttcggtgttctctacggtatgagtgcctttcgtttgtcgcaggaattaggcattccctatgaagaagctcaggcgttcattcagaaatactttcaaagctatcccaaagttaaagcatggatcgagaagactctccgtgaaggccgcacacgtggttacgtagagaccttatttggacgtcgccgctatgttcccgatttaaacgctcgcgtgaaaggcaagcgtgaagccgccgaacgcatggcgttcaacatgcctgtacagggcacggcagctgacctcatgaaacttgcaatggtgcgcctttttccacaattgcgtgaagttggtgcccgcatgctcttgcaggtccacgatgaactcttgttagaagcgccaaaagagcgtgcggaagaggtggcagccctcgcgaaagaagttatggaaggcgtgtggcccttagcggtgcctcttgaagtcgaagttggtattggcgaggattggctggctgccaaagga

SEQ ID NO: 4468 - protein, 841 aa, synthetic construct
  REGION 1..841: note = Variant of DNA polymerase I from Thermus sp. strain 2.9
MHHHHHHGGSGVLPVFEPKGRVLLVDGHHLAYRNFFALKGLTTSLGEPVQGVYGFAKSLLKALKEDGDVVIVVFDAKAPSFRHEAYEAYKAGRAPTPEDFPRQLALMKELVDLLGLERLEVPGFEADDVLATLAKKAEREGYEVQILTADRDLFQLLSPRISVLHPEGHRITPEWLWEKYGLRPEQWVDFRALAGDPSDNIPGVKGIGEKTALKLLKEWGSLENLLKNLDQVKPESVREKILAHLEDLKLSRELSRVRTDLPLEVDFGRRREPDWEGLKAFLERLEFGSLLHEFGLLESPLLAEEAPWPPPEGAFLGYRLSRPEPMWAELLALAASAQGRVYRAEDPHGALRGLFEVRGLLAKDLAVVALREGLDLPPTDDPMLLAYLLDPSNTTPEGVARRYGGEWTEDAAKRALLAERLHANLLGRLQGEERLLWLYEEVEKPLSRVLAHMEATGVKLDVAYLENLSLEVAAHMRRLEEEVFRLAGRSFRLNSRDQLERVLFDELGLPPIGKTEKTGKRSTSAAVLEALREVHPIVDTILQYRELAKLKGTYIDRLPALVHPKTGRLHTRFNQTATATGRLSSSDPNLQNIPVRTPLGQKIRRAFVAEEGWRLVALDYRQIELRVLAHLSGDENLIRVFQEGKDIHTQTASWMFGLSAEAIDPLMRRAAKTINFGVLYGMSAFRLSQELGIPYEEAQAFIQKYFQSYPKVKAWIEKTLREGRTRGYVETLFGRRRYVPDLNARVKGKREAAERMAFNMPVQGTAADLMKLAMVRLFPQLREVGARMLLQVHDELLLEAPKERAEEVAALAKEVMEGVWPLAVPLEVEVGIGEDWLAAKG

SEQ ID NO: 4469 - DNA, 2523 bp, synthetic construct
  misc_feature 1..2523: note = Variant of DNA polymerase I from Thermus sp. strain 2.9
  source 1..2523: mol_type = other DNA
atgcaccatcatcatcatcatggcggtagcggcgtgttaccggtgttcgagcctaaaggtcgcgtgcttctggttgatggccatcatctcgcgtatcgtaacttctttgccctgaaaggattaaccaccagcctgggcgagccggtacagggtgtctacggctttgcaaagtcgctcctgaaagctctgaaagaagacggtgatgtggtgattgttgtctttgatgcgaaagcgccaagttttcgccacgaagcgtacgaagcttacaaagccgggcgtgctccaacgccggaagactttcctcgccaattggcgcttatgaaggaattagtggatttgcttggcctcgaacgcttggaagttcccggtttcgaggcagacgacgtattagcgactctcgcaaagaaagccgaacgtgagggctatgaagtccagatcttgacagcagatcgcgatcttttccagcttttatctccgcgcatctcggtgttacacccggaagggcatcgtatcaccccggaatggctctgggagaaatatggtttgcgtcccgaacaatgggtggattttcgcgccttagcaggcgatccgagcgacaatattccgggagttaaaggtatcggcgagaagacggcgctcaagctccttaaagaatgggggtcgttggagaacttgcttaagaatttagatcaggtcaaaccagagtcagtgcgtgagaagattcttgctcacctcgaagacctcaaattaagccgcgaattgtcccgtgtacgcaccgatttgccgctcgaagttgatttcggtcgccgccgcgaacctgactgggagggtcttaaagcgtttttagagcgtcttgaatttggttcgctcttgcatgaattcggccttttagaaagcccgttactggccgaagaagcaccttggccaccgcccgagggcgcgtttttaggttaccgtttgagtcgcccggaaccgatgtgggccgaattactggctcttgcagcgtctgcccagggacgtgtgtatcgcgcggaagaccctcatggtgcgctccgcggcctcttcgaagtccgtggactccttgccaaagacttagctgttgttgcattgcgcgaaggtcttgatttacctccgactgatgatccaatgcttcttgcgtacctcttggacccgtcaaacacgacgcccgaaggcgtagcccgtcgttacggcggcgagtggaccgaagatgcagcgaaacgcgcgttattggccgaacgtttgcacgccaatttattaggacgtttgcaaggcgaggaacgtctcctctggctttacgaagaagtggagaaaccattgagtcgcgtgctcgcgcatatggaagctaccggtgtcaaattagacgtggcgtatttggagaatctcagccttgaagttgctgcccacatgcgccgcttggaggaagaagtattccgtttagcaggccgttcctttcgccttaactctcgcgatcagttagaacgtgtgttgttcgatgaacttggtctccctcctatcggcaagacagagaagaccggtaaacgtagcacttcagcggcggttttagaagctcttcgcgaagtccatcccattgtggacaagatcttgcagtaccgcgaactcgcgaaattgaaaggcacctatattgaccgtcttccggcattagtccacccgaaaacgggacgcctccatacccgcttcaaccaaacagccacggcgaccggtcgtttgtcctcctctgatccaaaccttcagaatattccagtacgtaccccattgtctcagaagatccgccgtgcgtttgtagctgaggagggttggcgtttagtggccctcgattatcgtcaaattgaattacgtgtccttgcccatctttctggcgatgagaacctcatccgcgtgtttcaggaaggcaaagacattcacactcaaacggcaagctggatgtttggattatcagctgaagcgatcgatcctttgatgcgtcgtgcagcgaagaccatcaatttcggtgttctctacggtatgagtgcctttcgtttgtcgcaggaattaggcattccctatgaagaagctcaggcgttcattcagaaatactttcaaagctatcccaaagttaaagcatggatcgagaagactctccgtgaaggccgcacacgtggttacgtagagaccttatttggacgtcgccgctatgttcccgatttaaacgctcgcgtgaaaggcaagcgtgaagccgccgaacgcatggcgttcaacatgcctgtacagggcacggcagctgacctcatgaaacttgcaatggtgcgcctttttccacaattgcgtgaagttggtgcccgcatgctcttgcaggtccacgatgaactcttgttagaagcgccaaaagagcgtgcggaagaggtggcagccctcgcgaaagaagttatggaaggcgtgtggcccttagcggtgcctcttgaagtcgaagttggtattggcgaggattggctggctgccaaagga

SEQ ID NO: 4470 - protein, 841 aa, synthetic construct
  REGION 1..841: note = Variant of DNA polymerase I from Thermus sp. strain 2.9
MHHHHHHGGSGVLPVFEPKGRVLLVDGHHLAYRNFFALKGLTTSLGEPVQGVYGFAKSLLKALKEDGDVVIVVFDAKAPSFRHEAYEAYKAGRAPTPEDFPRQLALMKELVDLLGLERLEVPGFEADDVLATLAKKAEREGYEVQILTADRDLFQLLSPRISVLHPEGHRITPEWLWEKYGLRPEQWVDFRALAGDPSDNIPGVKGIGEKTALKLLKEWGSLENLLKNLDQVKPESVREKILAHLEDLKLSRELSRVRTDLPLEVDFGRRREPDWEGLKAFLERLEFGSLLHEFGLLESPLLAEEAPWPPPEGAFLGYRLSRPEPMWAELLALAASAQGRVYRAEDPHGALRGLFEVRGLLAKDLAVVALREGLDLPPTDDPMLLAYLLDPSNTTPEGVARRYGGEWTEDAAKRALLAERLHANLLGRLQGEERLLWLYEEVEKPLSRVLAHMEATGVKLDVAYLENLSLEVAAHMRRLEEEVFRLAGRSFRLNSRDQLERVLFDELGLPPIGKTEKTGKRSTSAAVLEALREVHPIVDKILQYRELAKLKGTYIDRLPALVHPKTGRLHTRFNQTATATGRLSSSDPNLQNIPVRTPLSQKIRRAFVAEEGWRLVALDYRQIELRVLAHLSGDENLIRVFQEGKDIHTQTASWMFGLSAEAIDPLMRRAAKTINFGVLYGMSAFRLSQELGIPYEEAQAFIQKYFQSYPKVKAWIEKTLREGRTRGYVETLFGRRRYVPDLNARVKGKREAAERMAFNMPVQGTAADLMKLAMVRLFPQLREVGARMLLQVHDELLLEAPKERAEEVAALAKEVMEGVWPLAVPLEVEVGIGEDWLAAKG

SEQ ID NO: 4471 - DNA, 2523 bp, synthetic construct
  misc_feature 1..2523: note = Variant of DNA polymerase I from Thermus sp. strain 2.9
  source 1..2523: mol_type = other DNA
atgcaccatcatcatcatcatggcggtagcggcgtgttaccggtgttcgagcctaaaggtcgcgtgcttctggttgatggccatcatctcgcgtatcgtaacttctttgccctgaaaggattaaccaccagcctgggcgagccggtacagggtgtctacggctttgcaaagtcgctcctgaaagctctgaaagaagacggtgatgtggtgattgttgtctttgatgcgaaagcgccaagttttcgccacgaagcgtacgaagcttacaaagccgggcgtgctccaacgccggaagactttcctcgccaattggcgcttatgaaggaattagtggatttgcttggcctcgaacgcttggaagttcccggtttcgaggcagacgacgtattagcgactctcgcaaagaaagccgaacgtgagggctatgaagtccagatcttgacagcagatcgcgatcttttccagcttttatctccgcgcatctcggtgttacacccggaagggcatcgtatcaccccggaatggctctgggagaaatatggtttgcgtcccgaacaatgggtggattttcgcgccttagcaggcgatccgagcgacaatattccgggagttaaaggtatcggcgagaagacggcgctcaagctccttaaagaatgggggtcgttggagaacttgcttaagaatttagatcaggtcaaaccagagtcagtgcgtgagaagattcttgctcacctcgaagacctcaaattaagccgcgaattgtcccgtgtacgcaccgatttgccgctcgaagttgatttcggtcgccgccgcgaacctgactgggagggtcttaaagcgtttttagagcgtcttgaatttggttcgctcttgcatgaattcggccttttagaaagcccgttactggccgaagaagcaccttggccaccgcccgagggcgcgtttttaggttaccgtttgagtcgcccggaaccgatgtgggccgaattactggctcttgcagcgtctgcccagggacgtgtgtatcgcgcggaagaccctcatggtgcgctccgcggcctcttcgaagtccgtggactccttgccaaagacttagctgttgttgcattgcgcgaaggtcttgatttacctccgactgatgatccaatgcttcttgcgtacctcttggacccgggtaacacgacgcccgaaggcgtagcccgtcgttacggcggcgagtggaccgaagatgcagcgaaacgcgcgttattggccgaacgtttgcacgccaatttattaggacgtttgcaaggcgaggaacgtctcctctggctttacgaagaagtggagaaaccattgagtcgcgtgctcgcgcatatggaagctaccggtgtcaaattagacgtggcgtatttggagaatctcagccttgaagttgctgcccacatgcgccgcttggaggaagaagtattccgtttagcaggccgttcctttcgccttaactctcgcgatcagttagaacgtgtgttgttcgatgaacttggtctccctcctatcggcaagacagagaagaccggtaaacgtagcacttcagcggcggttttagaagctcttcgcgaagtccatcccattgtggacaagatcttgcagtaccgcgaactcgcgaaattgaaaggcacctatattgaccgtcttccggcattagtccacccgaaaacgggacgcctccatacccgcttcaaccaaacagccacggcgaccggtcgtttgtcctcctctgatccaaaccttcagaatattccagtacgtaccccattgggccagaagatccgccgtgcgtttgtagctgaggagggttggcgtttagtggccctcgattatcgtcaaattgaattacgtgtccttgcccatctttctggcgatgagaacctcatccgcgtgtttcaggaaggcaaagacattcacactcaaacggcaagctggatgtttggattatcagctgaagcgatcgatcctttgatgcgtcgtgcagcgaagaccatcaatttcggtgttctctacggtatgagtgcctttcgtttgtcgcaggaattaggcattccctatgaagaagctcaggcgttcattcagaaatactttcaaagctatcccaaagttaaagcatggatcgagaagactctccgtgaaggccgcacacgtggttacgtagagaccttatttggacgtcgccgctatgttcccgatttaaacgctcgcgtgaaaggcaagcgtgaagccgccgaacgcatggcgttcaacatgcctgtacagggcacggcagctgacctcatgaaacttgcaatggtgcgcctttttccacaattgcgtgaagttggtgcccgcatgctcttgcaggtccacgatgaactcttgttagaagcgccaaaagagcgtgcggaagaggtggcagccctcgcgaaagaagttatggaaggcgtgtggcccttagcggtgcctcttgaagtcgaagttggtattggcgaggattggctggctgccaaagga

SEQ ID NO: 4472 - protein, 841 aa, synthetic construct
  REGION 1..841: note = Variant of DNA polymerase I from Thermus sp. strain 2.9
MHHHHHHGGSGVLPVFEPKGRVLLVDGHHLAYRNFFALKGLTTSLGEPVQGVYGFAKSLLKALKEDGDVVIVVFDAKAPSFRHEAYEAYKAGRAPTPEDFPRQLALMKELVDLLGLERLEVPGFEADDVLATLAKKAEREGYEVQILTADRDLFQLLSPRISVLHPEGHRITPEWLWEKYGLRPEQWVDFRALAGDPSDNIPGVKGIGEKTALKLLKEWGSLENLLKNLDQVKPESVREKILAHLEDLKLSRELSRVRTDLPLEVDFGRRREPDWEGLKAFLERLEFGSLLHEFGLLESPLLAEEAPWPPPEGAFLGYRLSRPEPMWAELLALAASAQGRVYRAEDPHGALRGLFEVRGLLAKDLAVVALREGLDLPPTDDPMLLAYLLDPGNTTPEGVARRYGGEWTEDAAKRALLAERLHANLLGRLQGEERLLWLYEEVEKPLSRVLAHMEATGVKLDVAYLENLSLEVAAHMRRLEEEVFRLAGRSFRLNSRDQLERVLFDELGLPPIGKTEKTGKRSTSAAVLEALREVHPIVDKILQYRELAKLKGTYIDRLPALVHPKTGRLHTRFNQTATATGRLSSSDPNLQNIPVRTPLGQKIRRAFVAEEGWRLVALDYRQIELRVLAHLSGDENLIRVFQEGKDIHTQTASWMFGLSAEAIDPLMRRAAKTINFGVLYGMSAFRLSQELGIPYEEAQAFIQKYFQSYPKVKAWIEKTLREGRTRGYVETLFGRRRYVPDLNARVKGKREAAERMAFNMPVQGTAADLMKLAMVRLFPQLREVGARMLLQVHDELLLEAPKERAEEVAALAKEVMEGVWPLAVPLEVEVGIGEDWLAAKG

SEQ ID NO: 4473 - DNA, 2523 bp, synthetic construct
  misc_feature 1..2523: note = Variant of DNA polymerase I from Thermus sp. strain 2.9
  source 1..2523: mol_type = other DNA
atgcaccatcatcatcatcatggcggtagcggcgtgttaccggtgttcgagcctaaaggtcgcgtgcttctggttgatggccatcatctcgcgtatcgtaacttctttgccctgaaaggattaaccaccagcctgggcgagccggtacagggtgtctacggctttgcaaagtcgctcctgaaagctctgaaagaagacggtgatgtggtgattgttgtctttgatgcgaaagcgccaagttttcgccacgaagcgtacgaagcttacaaagccgggcgtgctccaacgccggaagactttcctcgccaattggcgcttatgaaggaattagtggatttgcttggcctcgaacgcttggaagttcccggtttcgaggcagacgacgtattagcgactctcgcaaagaaagccgaacgtgagggctatgaagtccagatcttgacagcagatcgcgatcttttccagcttttatctccgcgcatctcggtgttacacccggaagggcatcgtatcaccccggaatggctctgggagaaatatggtttgcgtcccgaacaatgggtggattttcgcgccttagcaggcgatccgagcgacaatattccgggagttaaaggtatcggcgagaagacggcgctcaagctccttaaagaatgggggtcgttggagaacttgcttaagaatttagatcaggtcaaaccagagtcagtgcgtgagaagattcttgctcacctcgaagacctcaaattaagccgcgaattgtcccgtgtacgcaccgatttgccgctcgaagttgatttcggtcgccgccgcgaacctgactgggagggtcttaaagcgtttttagagcgtcttgaatttggttcgctcttgcatgaattcggccttttagaaagcccgttactggccgaagaagcaccttggccaccgcccgagggcgcgtttttaggttaccgtttgagtcgcccggaaccgatgtgggccgaattactggctcttgcagcgtctgcccagggacgtgtgtatcgcgcggaagaccctcatggtgcgctccgcggcctcttcgaagtccgtggactccttgccgttgacttagctgttgttgcattgcgcgaaggtcttgatttacctccgactgatgatccaatgcttcttgcgtacctcttggacccgtcaaacacgacgcccgaaggcgtagcccgtcgttacggcggcgagtggaccgaagatgcagcgaaacgcgcgttattggccgaacgtttgcacgccaatttattaggacgtttgcaaggcgaggaacgtctcctctggctttacgaagaagtggagaaaccattgagtcgcgtgctcgcgcatatggaagctaccggtgtcaaattagacgtggcgtatttggagaatctcagccttgaagttgctgcccacatgcgccgcttggaggaagaagtattccgtttagcaggccgttcctttcgccttaactctcgcgatcagttagaacgtgtgttgttcgatgaacttggtctccctcctatcggcaagacagagaagaccggtaaacgtagcacttcagcggcggttttagaagctcttcgcgaagtccatcccattgtggacaagatcttgcagtaccgcgaactcgcgaaattgaaaggcacctatattgaccgtcttccggcattagtccacccgaaaacgggacgcctccatacccgcttcaaccaaacagccacggcgaccggtcgtttgtcctcctctgatccaaaccttcagaatattccagtacgtaccccattgggccagaagatccgccgtgcgtttgtagctgaggagggttggcgtttagtggccctcgattatcgtcaaattgaattacgtgtccttgcccatctttctggcgatgagaacctcatccgcgtgtttcaggaaggcaaagacattcacactcaaacggcaagctggatgtttggattatcagctgaagcgatcgatcctttgatgcgtcgtgcagcgaagaccatcaatttcggtgttctctacggtatgagtgcctttcgtttgtcgcaggaattaggcattccctatgaagaagctcaggcgttcattcagaaatactttcaaagctatcccaaagttaaagcatggatcgagaagactctccgtgaaggccgcacacgtggttacgtagagaccttatttggacgtcgccgctatgttcccgatttaaacgctcgcgtgaaaggcaagcgtgaagccgccgaacgcatggcgttcaacatgcctgtacagggcacggcagctgacctcatgaaacttgcaatggtgcgcctttttccacaattgcgtgaagttggtgcccgcatgctcttgcaggtccacgatgaactcttgttagaagcgccaaaagagcgtgcggaagaggtggcagccctcgcgaaagaagttatggaaggcgtgtggcccttagcggtgcctcttgaagtcgaagttggtattggcgaggattggctggctgccaaagga

SEQ ID NO: 4474 - protein, 841 aa, synthetic construct
  REGION 1..841: note = Variant of DNA polymerase I from Thermus sp. strain 2.9
MHHHHHHGGSGVLPVFEPKGRVLLVDGHHLAYRNFFALKGLTTSLGEPVQGVYGFAKSLLKALKEDGDVVIVVFDAKAPSFRHEAYEAYKAGRAPTPEDFPRQLALMKELVDLLGLERLEVPGFEADDVLATLAKKAEREGYEVQILTADRDLFQLLSPRISVLHPEGHRITPEWLWEKYGLRPEQWVDFRALAGDPSDNIPGVKGIGEKTALKLLKEWGSLENLLKNLDQVKPESVREKILAHLEDLKLSRELSRVRTDLPLEVDFGRRREPDWEGLKAFLERLEFGSLLHEFGLLESPLLAEEAPWPPPEGAFLGYRLSRPEPMWAELLALAASAQGRVYRAEDPHGALRGLFEVRGLLAVDLAVVALREGLDLPPTDDPMLLAYLLDPSNTTPEGVARRYGGEWTEDAAKRALLAERLHANLLGRLQGEERLLWLYEEVEKPLSRVLAHMEATGVKLDVAYLENLSLEVAAHMRRLEEEVFRLAGRSFRLNSRDQLERVLFDELGLPPIGKTEKTGKRSTSAAVLEALREVHPIVDKILQYRELAKLKGTYIDRLPALVHPKTGRLHTRFNQTATATGRLSSSDPNLQNIPVRTPLGQKIRRAFVAEEGWRLVALDYRQIELRVLAHLSGDENLIRVFQEGKDIHTQTASWMFGLSAEAIDPLMRRAAKTINFGVLYGMSAFRLSQELGIPYEEAQAFIQKYFQSYPKVKAWIEKTLREGRTRGYVETLFGRRRYVPDLNARVKGKREAAERMAFNMPVQGTAADLMKLAMVRLFPQLREVGARMLLQVHDELLLEAPKERAEEVAALAKEVMEGVWPLAVPLEVEVGIGEDWLAAKG

SEQ ID NO: 4475 - DNA, 2523 bp, synthetic construct
  misc_feature 1..2523: note = Variant of DNA polymerase I from Thermus sp. strain 2.9
  source 1..2523: mol_type = other DNA
atgcaccatcatcatcatcatggcggtagcggcgtgttaccggtgttcgagcctaaaggtcgcgtgcttctggttgatggccatcatctcgcgtatcgtaacttctttgccctgaaaggattaaccaccagcctgggcgagccggtacagggtgtctacggctttgcaaagtcgctcctgaaagctctgaaagaagacggtgatgtggtgattgttgtctttgatgcgaaagcgccaagttttcgccacgaagcgtacgaagcttacaaagccgggcgtgctccaacgccggaagactttcctcgccaattggcgcttatgaaggaattagtggatttgcttggcctcgaacgcttggaagttcccggtttcgaggcagacgacgtattagcgactctcgcaaagaaagccgaacgtgagggctatgaagtccagatcttgacagcagatcgcgatcttttccagcttttatctccgcgcatctcggtgttacacccggaagggcatcgtatcaccccggaatggctctgggagaaatatggtttgcgtcccgaacaatgggtggattttcgcgccttagcaggcgatccgagcgacaatattccgggagttaaaggtatcggcgagaagacggcgctcaagctccttaaagaatgggggtcgttggagaacttgcttaagaatttagatcaggtcaaaccagagtcagtgcgtgagaagattcttgctcacctcgaagacctcaaattaagccgcgaattgtcccgtgtacgcaccgatttgccgctcgaagttgatttcggtcgccgccgcgaacctgactgggagggtcttaaagcgtttttagagcgtcttgaatttggttcgctcttgcatgaattcggccttttagaaagcccgttactggccgaagaagcaccttggccaccgcccgagggcgcgtttttaggttaccgtttgagtcgcccggaaccgatgtgggccgaattactggctcttgcagcgtctgcccagggacgtgtgtatcgcgcggaagaccctcatggtgcgctccgcggcctcttcgaagtccgtggactccttgccaaagacttagctgttgttgcattgcgcgaaggtcttgatttacctccgactgatgatccaatgcttcttgcgtacctcttggacccgtcaaacacgacgcccgaaggcgtagcccgtcgttacggcggcgagtggaccgaagatgcagcgaaacgcgcgttattggccgaacgtttgcacgccaatttattaggacgtttgcaaggcgaggaacgtctcctctggctttacgaagaagtggagaaaccattgagtcgcgtgctcgcgcatatggaagctaccggtgtcaaattagacgtggcgtatttggagaatctcagccttgaagttgctgcccacatgcgccgcttggaggaagaagtattccgtttagcaggccgttcctttcgccttaactctcgcgatcagttagaacgtgtgttgttcgatgaacttggtctccctcctatcggcaagacagagaagaccggtaaacgtagcacttcagcggcggttttagaagctcttcgcgaagtccatcccattgtggacaagatcttgcagtaccgcgaactcgcgaaattgaaaggcacctatattgaccgtcttccggcattagtccacccgaaaacgggacgcctccatacccgcttcaaccaaacagccacggcgaccggtcgtttgtcctcctctgatccaaaccttcagaatattccagtacgtaccccattgggccagaagatccgccgtgcgtttgtagctgaggagggttggcgtttagtggccctcgattatcgtcaaattgaattacgtgtccttgcccatctttctggcgatgagaacctcatccgcgtgtttcaggaaggcaaagacattcacactcaaacggcaagctggatgtttggattatcagctgaagcgatcgatcctttgatgcgtcgtgcagcgaagaccatcaatttcggtgttctctacggtatgagtgcctttcgtttgtcgcaggaattaggcattccctatgaagaagctcaggcgttcattcagaaattttttcaaagctatcccaaagttaaagcatggatcgagaagactctccgtgaaggccgcacacgtggttacgtagagaccttatttggacgtcgccgctatgttcccgatttaaacgctcgcgtgaaaggcaagcgtgaagccgccgaacgcatggcgttcaacatgcctgtacagggcacggcagctgacctcatgaaacttgcaatggtgcgcctttttccacaattgcgtgaagttggtgcccgcatgctcttgcaggtccacgatgaactcttgttagaagcgccaaaagagcgtgcggaagaggtggcagccctcgcgaaagaagttatggaaggcgtgtggcccttagcggtgcctcttgaagtcgaagttggtattggcgaggattggctggctgccaaagga

SEQ ID NO: 4476 - protein, 841 aa, synthetic construct
  REGION 1..841: note = Variant of DNA polymerase I from Thermus sp. strain 2.9
MHHHHHHGGSGVLPVFEPKGRVLLVDGHHLAYRNFFALKGLTTSLGEPVQGVYGFAKSLLKALKEDGDVVIVVFDAKAPSFRHEAYEAYKAGRAPTPEDFPRQLALMKELVDLLGLERLEVPGFEADDVLATLAKKAEREGYEVQILTADRDLFQLLSPRISVLHPEGHRITPEWLWEKYGLRPEQWVDFRALAGDPSDNIPGVKGIGEKTALKLLKEWGSLENLLKNLDQVKPESVREKILAHLEDLKLSRELSRVRTDLPLEVDFGRRREPDWEGLKAFLERLEFGSLLHEFGLLESPLLAEEAPWPPPEGAFLGYRLSRPEPMWAELLALAASAQGRVYRAEDPHGALRGLFEVRGLLAKDLAVVALREGLDLPPTDDPMLLAYLLDPSNTTPEGVARRYGGEWTEDAAKRALLAERLHANLLGRLQGEERLLWLYEEVEKPLSRVLAHMEATGVKLDVAYLENLSLEVAAHMRRLEEEVFRLAGRSFRLNSRDQLERVLFDELGLPPIGKTEKTGKRSTSAAVLEALREVHPIVDKILQYRELAKLKGTYIDRLPALVHPKTGRLHTRFNQTATATGRLSSSDPNLQNIPVRTPLGQKIRRAFVAEEGWRLVALDYRQIELRVLAHLSGDENLIRVFQEGKDIHTQTASWMFGLSAEAIDPLMRRAAKTINFGVLYGMSAFRLSQELGIPYEEAQAFIQKFFQSYPKVKAWIEKTLREGRTRGYVETLFGRRRYVPDLNARVKGKREAAERMAFNMPVQGTAADLMKLAMVRLFPQLREVGARMLLQVHDELLLEAPKERAEEVAALAKEVMEGVWPLAVPLEVEVGIGEDWLAAKG

SEQ ID NO: 4477 - DNA, 2523 bp, synthetic construct
  misc_feature 1..2523: note = Variant of DNA polymerase I from Thermus sp. strain 2.9
  source 1..2523: mol_type = other DNA
atgcaccatcatcatcatcatggcggtagcggcgtgttaccggtgttcgagcctaaaggtcgcgtgcttctggttgatggccatcatctcgcgtatcgtaacttctttgccctgaaaggattaaccaccagcctgggcgagccggtacagggtgtctacggctttgcaaagtcgctcctgaaagctctgaaagaagacggtgatgtggtgattgttgtctttgatgcgaaagcgccaagttttcgccacgaagcgtacgaagcttacaaagccgggcgtgctccaacgccggaagactttcctcgccaattggcgcttatgaaggaattagtggatttgcttggcctcgaacgcttggaagttcccggtttcgaggcagacgacgtattagcgactctcgcaaagaaattggaacgtgagggctatgaagtccagatcttgacagcagatcgcgatcttttccagcttttatctccgcgcatctcggtgttacacccggaagggcatcgtatcaccccggaatggctctgggagaaatatggtttgcgtcccgaacaatgggtggattttcgcgccttagcaggcgatccgagcgacaatattccgggagttaaaggtatcggcgagaagacggcgctcaagctccttaaagaatgggggtcgttggagaacttgcttaagaatttagatcaggtcaaaccagagtcagtgcgtgagaagattcttgctcacctcgaagacctcaaattaagccgcgaattgtcccgtgtacgcaccgatttgccgctcgaagttgatttcggtcgccgccgcgaacctgactgggagggtcttaaagcgtttttagagcgtcttgaatttggttcgctcttgcatgaattcggccttttagaaagcccgttactggccgaagaagcaccttggccaccgcccgagggcgcgtttttaggttaccgtttgagtcgcccggaaccgatgtgggccgaattactggctcttgcagcgtctgcccagggacgtgtgtatcgcgcggaagaccctcatggtgcgctccgcggcctcttcgaagtccgtggactccttgccaaagacttagctgttgttgcattgcgcgaaggtcttgatttacctccgactgatgatccaatgcttcttgcgtacctcttggacccgtcaaacacgacgcccgaaggcgtagcccgtcgttacggcggcgagtggaccgaagatgcagcgaaacgcgcgttattggccgaacgtttgcacgccaatttattaggacgtttgcaaggcgaggaacgtctcctctggctttacgaagaagtggagaaaccattgagtcgcgtgctcgcgcatatggaagctaccggtgtcaaattagacgtggcgtatttggagaatctcagccttgaagttgctgcccacatgcgccgcttggaggaagaagtattccgtttagcaggccgttcctttcgccttaactctcgcgatcagttagaacgtgtgttgttcgatgaacttggtctccctcctatcggcaagacagagaagaccggtaaacgtagcacttcagcggcggttttagaagctcttcgcgaagtccatcccattgtggacaagatcttgcagtaccgcgaactcgcgaaattgaaaggcacctatattgaccgtcttccggcattagtccacccgaaaacgggacgcctccatacccgcttcaaccaaacagccacggcgaccggtcgtttgtcctcctctgatccaaaccttcagaatattccagtacgtaccccattgggccagaagatccgccgtgcgtttgtagctgaggagggttggcgtttagtggccctcgattatcgtcaaattgaattacgtgtccttgcccatctttctggcgatgagaacctcatccgcgtgtttcaggaaggcaaagacattcacactcaaacggcaagctggatgtttggattatcagctgaagcgatcgatcctttgatgcgtcgtgcagcgaagaccatcaatttcggtgttctctacggtatgagtgcctttcgtttgtcgcaggaattaggcattccctatgaagaagctcaggcgttcattcagaaatactttcaaagctatcccaaagttaaagcatggatcgagaagactctccgtgaaggccgcacacgtggttacgtagagaccttatttggacgtcgccgctatgttcccgatttaaacgctcgcgtgaaaggcaagcgtgaagccgccgaacgcatggcgttcaacatgcctgtacagggcacggcagctgacctcatgaaacttgcaatggtgcgcctttttccacaattgcgtgaagttggtgcccgcatgctcttgcaggtccacgatgaactcttgttagaagcgccaaaagagcgtgcggaagaggtggcagccctcgcgaaagaagttatggaaggcgtgtggcccttagcggtgcctcttgaagtcgaagttggtattggcgaggattggctggctgccaaagga

SEQ ID NO: 4478 - protein, 841 aa, synthetic construct
  REGION 1..841: note = Variant of DNA polymerase I from Thermus sp. strain 2.9
MHHHHHHGGSGVLPVFEPKGRVLLVDGHHLAYRNFFALKGLTTSLGEPVQGVYGFAKSLLKALKEDGDVVIVVFDAKAPSFRHEAYEAYKAGRAPTPEDFPRQLALMKELVDLLGLERLEVPGFEADDVLATLAKKLEREGYEVQILTADRDLFQLLSPRISVLHPEGHRITPEWLWEKYGLRPEQWVDFRALAGDPSDNIPGVKGIGEKTALKLLKEWGSLENLLKNLDQVKPESVREKILAHLEDLKLSRELSRVRTDLPLEVDFGRRREPDWEGLKAFLERLEFGSLLHEFGLLESPLLAEEAPWPPPEGAFLGYRLSRPEPMWAELLALAASAQGRVYRAEDPHGALRGLFEVRGLLAKDLAVVALREGLDLPPTDDPMLLAYLLDPSNTTPEGVARRYGGEWTEDAAKRALLAERLHANLLGRLQGEERLLWLYEEVEKPLSRVLAHMEATGVKLDVAYLENLSLEVAAHMRRLEEEVFRLAGRSFRLNSRDQLERVLFDELGLPPIGKTEKTGKRSTSAAVLEALREVHPIVDKILQYRELAKLKGTYIDRLPALVHPKTGRLHTRFNQTATATGRLSSSDPNLQNIPVRTPLGQKIRRAFVAEEGWRLVALDYRQIELRVLAHLSGDENLIRVFQEGKDIHTQTASWMFGLSAEAIDPLMRRAAKTINFGVLYGMSAFRLSQELGIPYEEAQAFIQKYFQSYPKVKAWIEKTLREGRTRGYVETLFGRRRYVPDLNARVKGKREAAERMAFNMPVQGTAADLMKLAMVRLFPQLREVGARMLLQVHDELLLEAPKERAEEVAALAKEVMEGVWPLAVPLEVEVGIGEDWLAAKG

SEQ ID NO: 4479 - DNA, 2523 bp, synthetic construct
  misc_feature 1..2523: note = Variant of DNA polymerase I from Thermus sp. strain 2.9
  source 1..2523: mol_type = other DNA
atgcaccatcatcatcatcatggcggtagcggcgtgttaccggtgttcgagcctaaaggtcgcgtgcttctggttgatggccatcatctcgcgtatcgtaacttctttgccctgaaaggattaaccaccagcctgggcgagccggtacagggtgtctacggctttgcaaagtcgctcctgaaagctctgaaagaagacggtgatgtggtgattgttgtctttgatgcgaaagcgccaagttttcgccacgaagcgtacgaagcttacaaagccgggcgtgctccaacgccggaagactttcctcgccaattggcgcttatgaaggaattagtggatttgcttggcctcgaacgcttggaagttcccggtttcgaggcagacgacgtattagcgactctcgcaaagaaagccgaacgtgagggctatgaagtccagatcttgacagcagatcgcgatcttttccagcttttatctccgcgcatctcggtgttacacccggaagggcatcgtatcaccccggaatggctctgggagaaatatggtttgcgtcccgaacaatgggtggattttcgcgccttagcaggcgatccgagcgacaatattccgggagttaaaggtatcggcgagaagacggcgctcaagctccttaaagaatgggggtcgttggagaacttgcttaagaatttagatcaggtcaaaccagagtcagtgcgtgagaagattcttgctcacctcgaagacctcaaattaagccgcgaattgtcccgtgtacgcaccgatttgccgctcgaagttgatttcggtcgccgccgcgaacctgactgggagggtcttaaagcgtttttagagcgtcttgaatttggttcgctcttgcatgaattcggccttttagaaagcccgttactggccgaagaagcaccttggccaccgcccgagggcgcgtttttaggttaccgtttgagtcgcccggaaccgatgtgggccgaattactggctcttgcagcgtctgcccagggacgtgtgtatcgcgcggaagaccctcatggtgcgctccgcggcctcttcgaagtccgtggactccttgccaaagacttagctgttgttgcattgcgcgaaggtcttgatttacctccgactgatgatccaatgcttcttgcgtacctcttggacccgtcaaacacgacgcccgaaggcgtagcccgtcgttacggcggcgagtggaccgaagatgcagcgaaacgcgcgttattggccgaacgtttgcacgccaatttattaggacgtttgcaaggcgaggaacgtctcctctggctttacgaagaagtggagaaaccattgagtcgcgtgctcgcgcatatggaagctaccggtgtcaaattagacgtggcgtatttggagaatctcagccttgaagttgctgcccacatgcgccgcttggaggaagaagtattccgtttagcaggccgttcctttcgccttaactctcgcgatcagttagaacgtgtgttgttcgatgaacttggtctccctcctatcggcaagacagagaagaccggtaaacgtagcacttcagcggcggttttagaagctcttcgcgaagtccatcccattgtggacaagatcttgcagtaccgcgaactcgcgaaattgaaaggcacctatattgaccgtcttccggcattagtccacccgaaaacgggacgcctccatacccgcttcaaccaaacagccacggcgaccggtcgtttgtcctcctctgatccaaaccttcagaatattccagtacgtaccccattgggccagaagatccgccgtgcgtttgtagctgaggaggtttggcgtttagtggccctcgattatcgtcaaattgaattacgtgtccttgcccatctttctggcgatgagaacctcatccgcgtgtttcaggaaggcaaagacattcacactcaaacggcaagctggatgtttggattatcagctgaagcgatcgatcctttgatgcgtcgtgcagcgaagaccatcaatttcggtgttctctacggtatgagtgcctttcgtttgtcgcaggaattaggcattccctatgaagaagctcaggcgttcattcagaaatactttcaaagctatcccaaagttaaagcatggatcgagaagactctccgtgaaggccgcacacgtggttacgtagagaccttatttggacgtcgccgctatgttcccgatttaaacgctcgcgtgaaaggcaagcgtgaagccgccgaacgcatggcgttcaacatgcctgtacagggcacggcagctgacctcatgaaacttgcaatggtgcgcctttttccacaattgcgtgaagttggtgcccgcatgctcttgcaggtccacgatgaactcttgttagaagcgccaaaagagcgtgcggaagaggtggcagccctcgcgaaagaagttatggaaggcgtgtggcccttagcggtgcctcttgaagtcgaagttggtattggcgaggattggctggctgccaaagga

SEQ ID NO: 4480 - protein, 841 aa, synthetic construct
  REGION 1..841: note = Variant of DNA polymerase I from Thermus sp. strain 2.9
MHHHHHHGGSGVLPVFEPKGRVLLVDGHHLAYRNFFALKGLTTSLGEPVQGVYGFAKSLLKALKEDGDVVIVVFDAKAPSFRHEAYEAYKAGRAPTPEDFPRQLALMKELVDLLGLERLEVPGFEADDVLATLAKKAEREGYEVQILTADRDLFQLLSPRISVLHPEGHRITPEWLWEKYGLRPEQWVDFRALAGDPSDNIPGVKGIGEKTALKLLKEWGSLENLLKNLDQVKPESVREKILAHLEDLKLSRELSRVRTDLPLEVDFGRRREPDWEGLKAFLERLEFGSLLHEFGLLESPLLAEEAPWPPPEGAFLGYRLSRPEPMWAELLALAASAQGRVYRAEDPHGALRGLFEVRGLLAKDLAVVALREGLDLPPTDDPMLLAYLLDPSNTTPEGVARRYGGEWTEDAAKRALLAERLHANLLGRLQGEERLLWLYEEVEKPLSRVLAHMEATGVKLDVAYLENLSLEVAAHMRRLEEEVFRLAGRSFRLNSRDQLERVLFDELGLPPIGKTEKTGKRSTSAAVLEALREVHPIVDKILQYRELAKLKGTYIDRLPALVHPKTGRLHTRFNQTATATGRLSSSDPNLQNIPVRTPLGQKIRRAFVAEEVWRLVALDYRQIELRVLAHLSGDENLIRVFQEGKDIHTQTASWMFGLSAEAIDPLMRRAAKTINFGVLYGMSAFRLSQELGIPYEEAQAFIQKYFQSYPKVKAWIEKTLREGRTRGYVETLFGRRRYVPDLNARVKGKREAAERMAFNMPVQGTAADLMKLAMVRLFPQLREVGARMLLQVHDELLLEAPKERAEEVAALAKEVMEGVWPLAVPLEVEVGIGEDWLAAKG

SEQ ID NO: 4481 - DNA, 2523 bp, synthetic construct
  misc_feature 1..2523: note = Variant of DNA polymerase I from Thermus sp. strain 2.9
  source 1..2523: mol_type = other DNA
atgcaccatcatcatcatcatggcggtagcggcgtgttaccggtgttcgagcctaaaggtcgcgtgcttctggttgatggccatcatctcgcgtatcgtaacttctttgccctgaaaggattaaccaccagcctgggcgagccggtacagggtgtctacggctttgcaaagtcgctcctgaaagctctgaaagaagacggtgatgtggtgattgttgtctttgatgcgaaagcgccaagttttcgccacgaagcgtacgaagcttacaaagccgggcgtgctccaacgccggaagactttcctcgccaattggcgcttatgaaggaattagtggatttgcttggcctcgaacgcttggaagttcccggtttcgaggcagacgacgtattagcgactctcgcaaagaaagccgaacgtgagggctatgaagtccagatcttgacagcagatcgcgatcttttccagcttttatctccgcgcatctcggtgttacacccggaagggcatcgtatcaccccggaatggctctgggagaaatatggtttgcgtcccgaacaatgggtggattttcgcgccttagcaggcgatccgagcgacaatattccgggagttaaaggtatcggcgagaagacggcgctcaagctccttaaagaatgggggtcgttggagaacttgcttaagaatttagatcaggtcaaaccagagtcagtgcgtgagaagattcttgctcacctcgaagacctcaaattaagccgcgaattgtcccgtgtacgcaccgatttgccgctcgaagttgatttcggtcgccgccgcgaacctgactgggagggtcttaaagcgtttttagagcgtcttgaatttggttcgctcttgcatgaattcggccttttagaaagcccgttactggccgaagaagcaccttggccaccgcccgagggcgcgtttttaggttaccgtttgagtcgcccggaaccgatgtgggccgaattactggctcttgcagcgtctgcccagggacgtgtgtatcgcgcggaagaccctcatggtgcgctccgcggcctcttcgaagtccgtggactccttgccaaagacttagctgttgttgcattgcgcgaaggtcttgatttacctccgactgatgatccaatgcttcttgcgtacctcttggacccgtcaaacacgacgcccgaaggcgtagcccgtcgttacggcggcgagtggaccgaagatgcagcgaaacgcgcgttattggccgaacgtttgcacgccaatttattaggacgtttgcaaggcgaggaacgtctcctctggctttacgaagaagtggagaaaccattgagtcgcgtgctcgcgcatatggaagctaccggtgtcaaattagacggggcgtatttggagaatctcagccttgaagttgctgcccacatgcgccgcttggaggaagaagtattccgtttagcaggccgttcctttcgccttaactctcgcgatcagttagaacgtgtgttgttcgatgaacttggtctccctcctatcggcaagacagagaagaccggtaaacgtagcacttcagcggcggttttagaagctcttcgcgaagtccatcccattgtggacaagatcttgcagtaccgcgaactcgcgaaattgaaaggcacctatattgaccgtcttccggcattagtccacccgaaaacgggacgcctccatacccgcttcaaccaaacagccacggcgaccggtcgtttgtcctcctctgatccaaaccttcagaatattccagtacgtaccccattgggccagaagatccgccgtgcgtttgtagctgaggagggttggcgtttagtggccctcgattatcgtcaaattgaattacgtgtccttgcccatctttctggcgatgagaacctcatccgcgtgtttcaggaaggcaaagacattcacactcaaacggcaagctggatgtttggattatcagctgaagcgatcgatcctttgatgcgtcgtgcagcgaagaccatcaatttcggtgttctctacggtatgagtgcctttcgtttgtcgcaggaattaggcattccctatgaagaagctcaggcgttcattcagaaatactttcaaagctatcccaaagttaaagcatggatcgagaagactctccgtgaaggccgcacacgtggttacgtagagaccttatttggacgtcgccgctatgttcccgatttaaacgctcgcgtgaaaggcaagcgtgaagccgccgaacgcatggcgttcaacatgcctgtacagggcacggcagctgacctcatgaaacttgcaatggtgcgcctttttccacaattgcgtgaagttggtgcccgcatgctcttgcaggtccacgatgaactcttgttagaagcgccaaaagagcgtgcggaagaggtggcagccctcgcgaaagaagttatggaaggcgtgtggcccttagcggtgcctcttgaagtcgaagttggtattggcgaggattggctggctgccaaagga

SEQ ID NO: 4482 - protein, 841 aa, synthetic construct
  REGION 1..841: note = Variant of DNA polymerase I from Thermus sp. strain 2.9
MHHHHHHGGSGVLPVFEPKGRVLLVDGHHLAYRNFFALKGLTTSLGEPVQGVYGFAKSLLKALKEDGDVVIVVFDAKAPSFRHEAYEAYKAGRAPTPEDFPRQLALMKELVDLLGLERLEVPGFEADDVLATLAKKAEREGYEVQILTADRDLFQLLSPRISVLHPEGHRITPEWLWEKYGLRPEQWVDFRALAGDPSDNIPGVKGIGEKTALKLLKEWGSLENLLKNLDQVKPESVREKILAHLEDLKLSRELSRVRTDLPLEVDFGRRREPDWEGLKAFLERLEFGSLLHEFGLLESPLLAEEAPWPPPEGAFLGYRLSRPEPMWAELLALAASAQGRVYRAEDPHGALRGLFEVRGLLAKDLAVVALREGLDLPPTDDPMLLAYLLDPSNTTPEGVARRYGGEWTEDAAKRALLAERLHANLLGRLQGEERLLWLYEEVEKPLSRVLAHMEATGVKLDGAYLENLSLEVAAHMRRLEEEVFRLAGRSFRLNSRDQLERVLFDELGLPPIGKTEKTGKRSTSAAVLEALREVHPIVDKILQYRELAKLKGTYIDRLPALVHPKTGRLHTRFNQTATATGRLSSSDPNLQNIPVRTPLGQKIRRAFVAEEGWRLVALDYRQIELRVLAHLSGDENLIRVFQEGKDIHTQTASWMFGLSAEAIDPLMRRAAKTINFGVLYGMSAFRLSQELGIPYEEAQAFIQKYFQSYPKVKAWIEKTLREGRTRGYVETLFGRRRYVPDLNARVKGKREAAERMAFNMPVQGTAADLMKLAMVRLFPQLREVGARMLLQVHDELLLEAPKERAEEVAALAKEVMEGVWPLAVPLEVEVGIGEDWLAAKG

SEQ ID NO: 4483 - DNA, 2523 bp, synthetic construct
  misc_feature 1..2523: note = Variant of DNA polymerase I from Thermus sp. strain 2.9
  source 1..2523: mol_type = other DNA
atgcaccatcatcatcatcatggcggtagcggcgtgttaccggtgttcgagcctaaaggtcgcgtgcttctggttgatggccatcatctcgcgtatcgtaacttctttgccctgaaaggattaaccaccagcctgggcgagccggtacagggtgtctacggctttgcaaagtcgctcctgaaagctctgaaagaagacggtgatgtggtgattgttgtctttgatgcgaaagcgccaagttttcgccacgaagcgtacgaagcttacaaagccgggcgtgctccaacgccggaagactttcctcgccaattggcgcttatgaaggaattagtggatttgcttggcctcgaacgcttggaagttcccggtttcgaggcagacgacgtattagcgactctcgcaaagaaagccgaacgtgagggctatgaagtccagatcttgacagcagatcgcgatcttttccagcttttatctccgcgcatctcggtgttacacccggaagggcatcgtatcaccccggaatggctctgggagaaatatggtttgcgtcccgaacaatgggtggattttcgcgccttagcaggcgatccgagcgacaatattccgggagttaaaggtatcggcgagaagacggcgctcaagctccttaaagaatgggggtcgttggagaacttgcttaagaatttagatcaggtcaaaccagagtcagtgcgtgagaagattcttgctcacctcgaagacctcaaattaagccgcgaattgtcccgtgtacgcaccgatttgccgctcgaagttgatttcggtcgccgccgcgaacctgactgggagggtcttaaagcgtttttagagcgtcttgaatttggttcgctcttgcatgaattcggccttttagaaagcccgttactggccgaagaagcaccttggccaccgcccgagggcgcgtttttaggttaccgtttgagtcgcccggaaccgatgtgggccgaattactggctcttgcagcgtctgcccagggacgtgtgtatcgcgcggaagaccctcatggtgcgctccgcggcctcttcgaagtccgtggactccttgccaaagacttagctgttgttgcattgcgcgaaggtcttgatttacctccgactgatgatccaatgcttcttgcgtacctcttggacccgtcaaacacgacgcccgaaggcgtagcccgtcgttacggcggcgagtggaccgaagatgcagcgaaacgcgcgttattggccgaacgtttgcacgccaatttattaggacgtttgcaaggcgaggaacgtctcctctggctttacgaagaagtggagaaaccattgagtcgcgtgctcgcgcatatggaagctaccggtgtcaaattagacgtggcgtatttggagaatctcagccttgaagttgctgcccacatgcgccgcttggaggaagaagtattccgtttagcaggccgttcctttcgccttaactctcgcgatcagttagaacgtgtgttgttcgatgaacttggtctccctcctatcggcaagacagagaagaccgataaacgtagcacttcagcggcggttttagaagctcttcgcgaagtccatcccattgtggacaagatcttgcagtaccgcgaactcgcgaaattgaaaggcacctatattgaccgtcttccggcattagtccacccgaaaacgggacgcctccatacccgcttcaaccaaacagccacggcgaccggtcgtttgtcctcctctgatccaaaccttcagaatattccagtacgtaccccattgggccagaagatccgccgtgcgtttgtagctgaggagggttggcgtttagtggccctcgattatcgtcaaattgaattacgtgtccttgcccatctttctggcgatgagaacctcatccgcgtgtttcaggaaggcaaagacattcacactcaaacggcaagctggatgtttggattatcagctgaagcgatcgatcctttgatgcgtcgtgcagcgaagaccatcaatttcggtgttctctacggtatgagtgcctttcgtttgtcgcaggaattaggcattccctatgaagaagctcaggcgttcattcagaaatactttcaaagctatcccaaagttaaagcatggatcgagaagacttcgcgtgaaggccgcacacgtggttacgtagagaccttatttggacgtcgccgctatgttcccgatttaaacgctcgcgtgaaaggcaagcgtgaagccgccgaacgcatggcgttcaacatgcctgtacagggcacggcagctgacctcatgaaacttgcaatggtgcgcctttttccacaattgcgtgaagttggtgcccgcatgctcttgcaggtccacgatgaactcttgttagaagcgccaaaagagcgtgcggaagaggtggcagccctcgcgaaagaagttatggaaggcgtgtggcccttagcggtgcctcttgaagtcgaagttggtattggcgaggattggctggctgccaaagga

SEQ ID NO: 4484 - protein, 841 aa, synthetic construct
  REGION 1..841: note = Variant of DNA polymerase I from Thermus sp. strain 2.9
MHHHHHHGGSGVLPVFEPKGRVLLVDGHHLAYRNFFALKGLTTSLGEPVQGVYGFAKSLLKALKEDGDVVIVVFDAKAPSFRHEAYEAYKAGRAPTPEDFPRQLALMKELVDLLGLERLEVPGFEADDVLATLAKKAEREGYEVQILTADRDLFQLLSPRISVLHPEGHRITPEWLWEKYGLRPEQWVDFRALAGDPSDNIPGVKGIGEKTALKLLKEWGSLENLLKNLDQVKPESVREKILAHLEDLKLSRELSRVRTDLPLEVDFGRRREPDWEGLKAFLERLEFGSLLHEFGLLESPLLAEEAPWPPPEGAFLGYRLSRPEPMWAELLALAASAQGRVYRAEDPHGALRGLFEVRGLLAKDLAVVALREGLDLPPTDDPMLLAYLLDPSNTTPEGVARRYGGEWTEDAAKRALLAERLHANLLGRLQGEERLLWLYEEVEKPLSRVLAHMEATGVKLDVAYLENLSLEVAAHMRRLEEEVFRLAGRSFRLNSRDQLERVLFDELGLPPIGKTEKTDKRSTSAAVLEALREVHPIVDKILQYRELAKLKGTYIDRLPALVHPKTGRLHTRFNQTATATGRLSSSDPNLQNIPVRTPLGQKIRRAFVAEEGWRLVALDYRQIELRVLAHLSGDENLIRVFQEGKDIHTQTASWMFGLSAEAIDPLMRRAAKTINFGVLYGMSAFRLSQELGIPYEEAQAFIQKYFQSYPKVKAWIEKTSREGRTRGYVETLFGRRRYVPDLNARVKGKREAAERMAFNMPVQGTAADLMKLAMVRLFPQLREVGARMLLQVHDELLLEAPKERAEEVAALAKEVMEGVWPLAVPLEVEVGIGEDWLAAKG

SEQ ID NO: 4485 - DNA, 2523 bp, synthetic construct
  misc_feature 1..2523: note = Variant of DNA polymerase I from Thermus sp. strain 2.9
  source 1..2523: mol_type = other DNA
atgcaccatcatcatcatcatggcggtagcggcgtgttaccggtgttcgagcataaaggtcgcgtgcttctggttgatggccatcatctcgcgtatcgtaacttctttgccctgaaaggattaaccaccagcctgggcgagccggtacagggtgtctacggctttgcaaagtcgctcctgaaagctctgaaagaagacggtgatgtggtgattgttgtctttgatgcgaaagcgccaagttttcgccacgaagcgtacgaagcttacaaagccgggcgtgctccaacgccggaagactttcctcgccaattggcgcttatgaaggaattagtggatttgcttggcctcgaacgcttggaagttcccggtttcgaggcagacgacgtattagcgactctcgcaaagaaagccgaacgtgagggctatgaagtccagatcttgacagcagatcgcgatcttttccagcttttatctccgcgcatctcggtgttacacccggaagggcatcgtatcaccccggaatggctctgggagaaatatggtttgcgtcccgaacaatgggtggattttcgcgccttagcaggcgatccgagcgacaatattccgggagttaaaggtatcggcgagaagacggcgctcaagctccttaaagaatgggggtcgttggagaacttgcttaagaatttagatcaggtcaaaccagagtcagtgcgtgagaagattcttgctcacctcgaagacctcaagttaagccgcgaattgtcccgtgtacgcaccgatttgccgctcgaagttgatttcggtcgccgccgcgaacctgactgggagggtcttaaagcgtttttagagcgtcttgaatttggttcgctcttgcatgaattcggccttttagaaagcccgttactggccgaagaagcaccttggccaccgcccgagggcgcgtttttaggttaccgtttgagtcgcccggaaccgatgtgggccgaattactggctcttgcagcgtctgcccagggacgtgtgtatcgcgcggaagaccctcatggtgcgctccgcggcctcttcgaagtccgtggactccttgccaaagacttagctgttgttgcattgcgcgaaggtcttgatttacctccgactgatgatccaatgcttcttgcgtacctcttggacccgtcaaacacgacgcccgaaggcgtagcccgtcgttacggcggcgagtggaccgaagatgcagcgaaacgcgcgttattggccgaacgtttgcacgccaatttattaggacgtttgcaaggcgaggaacgtctcctctggctttacgaagaagtggagaaaccattgagtcgcgtgctcgcgcatatggaagctaccggtgtcaaattagacgtggcgtatttggagaatctcagccttgaagttgctgcccacatgcgccgcttggaggaagaagtattccgtttagcaggccgttcctttcgccttaactctcgcgatcagttagaacgtgtgttgttcgatgaacttggtctccctcctatcggcaagacagagaagaccggtaaacgtagcacttcagcggcggttttagaagctcttcgcgaagtccatcccattgtggacaagatcttgcagtaccgcgaactcgcgaaattgaaaggcacctatattgaccgtcttccggcattagtccacccgaaaacgggacgcctccatacccgcttcaaccaaacagccacggcgaccggtcgtttgtcctcctctgatccaaaccttcagaatattccagtacgtaccaaattgggccagaagatccgccgtgcgtttgtagctgaggagggttggcgtttagtggccctcgattatcgtcaaattgaattacgtgtccttgcccatctttctggcgatgagaacctcatccgcgtgtttcaagaaggcaaagacattcacactcaaacggcaagctggatgtttggattatcagctgaagcgatcgatcctttgatgcgtcgtgcagcgaagaccatcaatttcggtgttctctacggtatgagtgcatttcgtttgtcgcaggaattaggcattccctatgaagaagctcaggcgttcattcagaaatactttcaaagctatcccaaagttaaagcatggatcgagaagactctccgtgaaggccgccaccgtggttacgtagagaccttatttggacgtcgccgctatgttcccgatttaaacgctcgcgtgaaaggcaagcgtgaagccgccgaacgcatggcgttcaacatgcctgtacagggcacggcagctgacctcatgaaacttgcaatggtgcgcctttttccacaattgcgtgaagttggtgcccgcatgctcttgcaggtccacgatgaactcttgttagaagcgccaaaagagcgtgcggaagaggtggcagccctcgcgaaagaagttatggaaggcgtgtggcccttagcggtgcctcttgaagtcgaagttggtattggcgaggattggctggctgccaaagga

SEQ ID NO: 4486 - protein, 841 aa, synthetic construct
  REGION 1..841: note = Variant of DNA polymerase I from Thermus sp. strain 2.9
MHHHHHHGGSGVLPVFEHKGRVLLVDGHHLAYRNFFALKGLTTSLGEPVQGVYGFAKSLLKALKEDGDVVIVVFDAKAPSFRHEAYEAYKAGRAPTPEDFPRQLALMKELVDLLGLERLEVPGFEADDVLATLAKKAEREGYEVQILTADRDLFQLLSPRISVLHPEGHRITPEWLWEKYGLRPEQWVDFRALAGDPSDNIPGVKGIGEKTALKLLKEWGSLENLLKNLDQVKPESVREKILAHLEDLKLSRELSRVRTDLPLEVDFGRRREPDWEGLKAFLERLEFGSLLHEFGLLESPLLAEEAPWPPPEGAFLGYRLSRPEPMWAELLALAASAQGRVYRAEDPHGALRGLFEVRGLLAKDLAVVALREGLDLPPTDDPMLLAYLLDPSNTTPEGVARRYGGEWTEDAAKRALLAERLHANLLGRLQGEERLLWLYEEVEKPLSRVLAHMEATGVKLDVAYLENLSLEVAAHMRRLEEEVFRLAGRSFRLNSRDQLERVLFDELGLPPIGKTEKTGKRSTSAAVLEALREVHPIVDKILQYRELAKLKGTYIDRLPALVHPKTGRLHTRFNQTATATGRLSSSDPNLQNIPVRTKLGQKIRRAFVAEEGWRLVALDYRQIELRVLAHLSGDENLIRVFQEGKDIHTQTASWMFGLSAEAIDPLMRRAAKTINFGVLYGMSAFRLSQELGIPYEEAQAFIQKYFQSYPKVKAWIEKTLREGRHRGYVETLFGRRRYVPDLNARVKGKREAAERMAFNMPVQGTAADLMKLAMVRLFPQLREVGARMLLQVHDELLLEAPKERAEEVAALAKEVMEGVWPLAVPLEVEVGIGEDWLAAKG

SEQ ID NO: 4487 - DNA, 2523 bp, synthetic construct
  misc_feature 1..2523: note = Variant of DNA polymerase I from Thermus sp. strain 2.9
  source 1..2523: mol_type = other DNA
atgcaccatcatcatcatcatggcggtagcggcgtgttaccggtgttcgagcctaaaggtcgcgtgcttctggttgatggccatcatctcgcgtatcgtaacttctttgccctgaaaggattaaccaccagcctgggcgagccggtacagggtgtctacggctttgcaaagtcgctcctgaaagctctgaaagaagacggtgatgtggtgattgttgtctttgatgcgaaagcgccaagttttcgccacgaagcgtacgaagcttacaaagccgggcgtgctccaacgccggaagactttcctcgccaattggctcttatgaaggaattagtggatttgcttggcctcgaacgcttggaagttcccggtttcgaggcagacgacgtattagcgactctcgcaaagaaagccgaacgtgagggctatgaagtccagatcttgacagcagatcgcgatcttttccagcttttatctccgcgcatctcggtgttacacccggaagggcatcgtatcaccccggaatggctctgggagaaatatggtttgcgtcccgaacaatgggtggattttcgcgccttagcaggcgatccgagcgacaatattccgggagttaaaggtatcggcgagaagacggcgctcaagctccttaaagaatgggggtcgttggagaacttgcttaagaatttagatcaggtcaaaccagagtcagtgcgtgagaagattcttgctcacctcgaagacctcaaattaagccgcgaattgtcccgtgtacgcaccgatttgccgctcgaagttgatttcggtcgccgccgcgaacctgactgggagggtcttaaagcgtttttagagcgtcttgaatttggttcgctcctgcatgaattcggccttttagaaagcccgttactggccgaagaagcaccttggccaccgcccgagggcgcgtttttaggttaccgtttgagccgcccggaaccgatgtgggccgaattactggctcttgcagcgtctgcccagggacgtgtgtatcgcgcggaagaccctcatggtgcgctccgcggcctcttcgaagtccgtggactccttgccaaagacttagctgttgttgcattgcgcgaaggtcttgatttacctccgactgatgatccaatgcttcttgcgtacctcttggacccgtcaaacacgacgcccgaaggcgtagcccgtcgttacggcggcgagtggaccgaagatgcagcgaaacgcgcgttattggccgaacgtttgcacgagaatttactgggacgtttgcaaggcgaggaacgtctcctctggctttacgaagaagtggagaaaccattgagtcgcgtgctcgcgcatatggaagctaccggtgtcaaattagacgtggcgtatttggagaatctcagccttgaagttgctgcccacatgcgccgcttggaggaagaagtattccgtttagcaggccgttcctttcgccttaactctcgcgatcagttagaacgtgtgttgttcgatgaacttggtctccctcctatcggcaagacagagaagaccggtaaacgtagcacttcagcggcggttttagaagctcttcgcgaagtccatcccattgtggacaagatcttgcagtaccgcgaaatggcgaaattgaaaggcacctatattgaccgtcttccggcattagtccacccgaaaacgggacgcctccatacccgcttcaaccaaacagccacggcgaccggtcgtttgtcctcctctgatccaaaccttcagaatattccagtacgtaccaaattgggccagaagatccgccgtgcgtttgtagctgaggagggttggcgtttagtggccctcgattatcgtcaaattgaattacgtgtccttgcccatctttctggcgatgagaacctcatccgcgtgtttgaagaaggcaaagacattcacactcaaacggcaagctggatgtttggattaagcgctgaagcgatcgatcctttgatgcgtcgtgcagcgaagaccatcaatttcggtgttctctacggtatgagtgcctttcgtttgtcgcaggaattaggcattccctatgaagaagctcaggcgttcattcagaaatactttcaaagctatcccaaagttaaagcatggatcgagaagactctccgtgaaggccgcacccgtggttacgtagagaccttatttggacgtcgccgctatgttcccgatttaaacgctcgcgtgaaaggcaagcgtgaagccgccgaacgcatggcgttcaacatgcctgtacagggcacggcagctgacctcatgaaacttgcaatggtgcgcctttttccacaattgcgtgaagttggtgcccgcatgctcttgcaggtccacgatgaactcttgttagaagcgccaaaagagcgtgcggaagaggtggcagccctcgcgaaagaagttatggaaggcgtgtggcccttagcggtgcctcttgaagtcgaagttggtattggcgaggattggctggctgccaaagga

SEQ ID NO: 4488 - protein, 841 aa, synthetic construct
  REGION 1..841: note = Variant of DNA polymerase I from Thermus sp. strain 2.9
MHHHHHHGGSGVLPVFEPKGRVLLVDGHHLAYRNFFALKGLTTSLGEPVQGVYGFAKSLLKALKEDGDVVIVVFDAKAPSFRHEAYEAYKAGRAPTPEDFPRQLALMKELVDLLGLERLEVPGFEADDVLATLAKKAEREGYEVQILTADRDLFQLLSPRISVLHPEGHRITPEWLWEKYGLRPEQWVDFRALAGDPSDNIPGVKGIGEKTALKLLKEWGSLENLLKNLDQVKPESVREKILAHLEDLKLSRELSRVRTDLPLEVDFGRRREPDWEGLKAFLERLEFGSLLHEFGLLESPLLAEEAPWPPPEGAFLGYRLSRPEPMWAELLALAASAQGRVYRAEDPHGALRGLFEVRGLLAKDLAVVALREGLDLPPTDDPMLLAYLLDPSNTTPEGVARRYGGEWTEDAAKRALLAERLHENLLGRLQGEERLLWLYEEVEKPLSRVLAHMEATGVKLDVAYLENLSLEVAAHMRRLEEEVFRLAGRSFRLNSRDQLERVLFDELGLPPIGKTEKTGKRSTSAAVLEALREVHPIVDKILQYREMAKLKGTYIDRLPALVHPKTGRLHTRFNQTATATGRLSSSDPNLQNIPVRTKLGQKIRRAFVAEEGWRLVALDYRQIELRVLAHLSGDENLIRVFEEGKDIHTQTASWMFGLSAEAIDPLMRRAAKTINFGVLYGMSAFRLSQELGIPYEEAQAFIQKYFQSYPKVKAWIEKTLREGRTRGYVETLFGRRRYVPDLNARVKGKREAAERMAFNMPVQGTAADLMKLAMVRLFPQLREVGARMLLQVHDELLLEAPKERAEEVAALAKEVMEGVWPLAVPLEVEVGIGEDWLAAKG

SEQ ID NO: 4489 - DNA, 2523 bp, synthetic construct
  misc_feature 1..2523: note = Variant of DNA polymerase I from Thermus sp. strain 2.9
  source 1..2523: mol_type = other DNA
atgcaccatcatcatcatcatggcggtagcggcgtgttaccggtgttcgagcctaaaggtcgcgtgcttctggttgatggccatcatctcgcgtatcgtaacttctttgccctgaaaggattaaccaccagcctgggcgagccggtacagggtgtctacggctttgcaaagtcgctcctgaaagctctgggggaagacggtgatgtggtgattgttgtctttgatgcgaaagcgccaagttttcgccacgaagcgtacgaagcttacaaagccgggcgtgctccaacgccggaagactttcctcgccaattggcgcttatgaaggaattagtggatttgcttggcctcgaacgcttggaagttcccggtttcgaggcagacgacgtattagcgactctcgcaaagaaagccgaacgtgagggctatgaagtccagatcttgacagcagatcgcgatcttttccagcttttatctccgcgcatctcggtgttacacccggaagggcatcgtatcaccccggaatggctctgggagaaatatggtttgcgtcccgaacaatgggtggattttcgcgccttagcaggcgatccgagcgacaatattccgggagttaaaggtatcggcgagaagacggcgctcaagctccttaaagaatgggggtcgttggagaacttgcttaagaatttagatcaggtcaaaccagagtcagtgcgtgagaagattcttgctcacctcgaagacctcaaattaagccgcgaattgtcccgtgtacgcaccgatttgccgctcgaagttgatttcggtcgccgccgcgaacctgactgggagggtcttaaagcgtttttagagcgtcttgaatttggttcgctcttgcatgaattcggccttttagaaagcccgttactggccgaagaagcaccttggccaccgcccgagggcgcgtttttaggttaccgtttgagtcgcccggaaccgatgtgggccgaattactggctcttgcagcgtctgcccagggacgtgtgtatcgcgcggaagaccctcatggtgcgctccgcggcctcttcgaagtccgtggactccttgccaaagacttagctgttgttgcattgcgcgaaggtcttgatttacctccgactgatgatccaatgcttcttgcgtacctcttggacccgtcaaacacgacgcccgaaggcgtagcccgtcgttacggcggcgagtggaccgaagatgcagcgaaacgcgcgttattggccgaacgtttgcacgccaatttattaggacgtttgcaaggcgaggaacgtctcctctggctttacgaagaagtggagaaaccattgagtcgcgtgctcgcgcatatggaagctaccggtgtcaaattagacgtggcgtatttggagaatctcagccttgaagttgctgcccacatgcgccgcttggaggaagaagtattccgtttagcaggccgttcctttcgccttaactctcgcgatcagttagaacgtgtgttgttcgatgaacttggtctccctcctatcggcaagacagagaagaccggtaaacgtagcacttcagcggcggttttagaagctcttcgcgaagtccatcccattgtggacaagatcttgcagtaccgcgaactcgcgaaattgaaaggcacctatattgaccgtcttccggcattagtccacccgaaaacgggacgcctccatacccgcttcaaccaaacagccacggcgaccggtcgtttgtcctcctctgatccaaaccttcagaatattccagtacgtaccccattgggccagaagatccgccgtgcgtttgtagctgaggagggttggcgtttagtggccctcgattatcgtcaaattgaattacgtgtccttgcccatctttctggcgatgagaacctcatccgcgtgtttcaggaaggcaaagacattcacactcaaacggcaagctggatgtttggattatcagctgaagcgatcgatcctttgatgcgtcgtgcagcgaagaccatcaatttcggtgttctctacggtatgagtgcctttcgtttgtcgcaggaattaggcattccctatgaagaagctcaggcgttcattcagaaatactttcaaagctatcccaaagttaaagcatggatcgagaagactctccgtgaaggccgcacacgtggttacgtagagaccttatttggacgtcgccgctatgttcccgatttaaacgctcgcgtgaaaggcaagcgtgaagccgccgaacgcatggcgttcaacatgcctgtacagggcacggcagctgacctcatgaaacttgcaatggtgcgcctttttccacaattgcgtgaagttggtgcccgcatgctcttgcaggtccacgatgaactcttgttagaagcgccaaaagagcgtgcggaagaggtggcagccctcgcgaaagaagttatggaaggcgtgtggcccttagcggtgcctcttgaagtcgaagttggtattggcgaggattggctggctgccaaagga

SEQ ID NO: 4490 - protein, 841 aa, synthetic construct
  REGION 1..841: note = Variant of DNA polymerase I from Thermus sp. strain 2.9
MHHHHHHGGSGVLPVFEPKGRVLLVDGHHLAYRNFFALKGLTTSLGEPVQGVYGFAKSLLKALGEDGDVVIVVFDAKAPSFRHEAYEAYKAGRAPTPEDFPRQLALMKELVDLLGLERLEVPGFEADDVLATLAKKAEREGYEVQILTADRDLFQLLSPRISVLHPEGHRITPEWLWEKYGLRPEQWVDFRALAGDPSDNIPGVKGIGEKTALKLLKEWGSLENLLKNLDQVKPESVREKILAHLEDLKLSRELSRVRTDLPLEVDFGRRREPDWEGLKAFLERLEFGSLLHEFGLLESPLLAEEAPWPPPEGAFLGYRLSRPEPMWAELLALAASAQGRVYRAEDPHGALRGLFEVRGLLAKDLAVVALREGLDLPPTDDPMLLAYLLDPSNTTPEGVARRYGGEWTEDAAKRALLAERLHANLLGRLQGEERLLWLYEEVEKPLSRVLAHMEATGVKLDVAYLENLSLEVAAHMRRLEEEVFRLAGRSFRLNSRDQLERVLFDELGLPPIGKTEKTGKRSTSAAVLEALREVHPIVDKILQYRELAKLKGTYIDRLPALVHPKTGRLHTRFNQTATATGRLSSSDPNLQNIPVRTPLGQKIRRAFVAEEGWRLVALDYRQIELRVLAHLSGDENLIRVFQEGKDIHTQTASWMFGLSAEAIDPLMRRAAKTINFGVLYGMSAFRLSQELGIPYEEAQAFIQKYFQSYPKVKAWIEKTLREGRTRGYVETLFGRRRYVPDLNARVKGKREAAERMAFNMPVQGTAADLMKLAMVRLFPQLREVGARMLLQVHDELLLEAPKERAEEVAALAKEVMEGVWPLAVPLEVEVGIGEDWLAAKG

SEQ ID NO: 4491 - DNA, 2523 bp, synthetic construct
  misc_feature 1..2523: note = Variant of DNA polymerase I from Thermus sp. strain 2.9
  source 1..2523: mol_type = other DNA
atgcaccatcatcatcatcatggcggtagcggcgtgttaccggtgttcgagcctaaaggtcgcgtgcttctggttgatggccatcatctcgcgtatcgtaacttctttgccctgaaaggattaaccaccagcctgggcgagccggtacagggtgtctacggctttgcaaagtcgctcctgaaagctctgaaagaagacggtgatgtggtgattgttgtctttgatgcgaaagcgccaagttttcgccacgaagcgtacgaagcttacaaagccgggcgtgctccaacgccggaagactttcctcgccaattggcgcttatgaaggaattagtggatttgcttggcctcgaacgcttggaagttcccggtttcgaggcagacgacgtattagcgactctcgcaaagaaagccgaacgtgagggctatgaagtccagatcttgacagcagatcgcgatcttttccagcttttatctccgcgcatctcggtgttacacccggaagggcatcgtatcaccccggaatggctctgggagaaatatggtttgcgtcccgaacaatgggtggattttcgcgccttagcaggcgatccgagcgacaatattccgggagttaaaggtatcggcgagaagacggcgctcaagctccttaaagaatgggggtcgttggagaacttgcttaagaatttagatcaggtcaaaccagagtcagtgcgtgagaagattcttgctcacctcgaagacctcaaattaagccgcgaattgtcccgtgtacgcaccgatttgccgctcgaagttgatttcggtcgccgccgcgaacctgactgggagggtcttaaagcgtttttagagcgtcttgaatttggttcgctcttgcatgaattcggccttttagaaagcccgttactggccgaagaagcaccttggccaccgcccgagggcgcgtttttaggttaccgtttgagtcgcccggaaccgatgtgggccgaattactggctcttgcagcgtctgcccagggacgtgtgtatcgcgcggaagaccctcatggtgcgctccgcggcctcttcgaagtccgtggactccttgccaaagacttagctgttagggcattgcgcgaaggtcttgatttacctccgactgatgatccaatgcttcttgcgtacctcttggacccgtcaaacacgacgcccgaaggcgtagcccgtcgttacggcggcgagtggaccgaagatgcagcgaaacgcgcgttattggccgaacgtttgcacgccaatttattaggacgtttgcaaggcgaggaacgtctcctctggctttacgaagaagtggagaaaccattgagtcgcgtgctcgcgcatatggaagctaccggtgtcaaattagacgtggcgtatttggagaatctcagccttgaagttgctgcccacatgcgccgcttggaggaagaagtattccgtttagcaggccgttcctttcgccttaactctcgcgatcagttagaacgtgtgttgttcgatgaacttggtctccctcctatcggcaagacagagaagaccggtaaacgtagcacttcagcggcggttttagaagctcttcgcgaagtccatcccattgtggacaagatcttgcagtaccgcgaactcgcgaaattgaaaggcacctatattgaccgtcttccggcattagtccacccgaaaacgggacgcctccatacccgcttcaaccaaacagccacggcgaccggtcgtttgtcctcctctgatccaaaccttcagaatattccagtacgtaccccattgggccagaagatccgccgtgcgtttgtagctgaggagggttggcgtttagtggccctcgattatcgtcaaattgaattacgtgtccttgcccatctttctggcgatgagaacctcatccgcgtgtttcaggaaggcaaagacattcacactcaaacggcaagctggatgtttggattatcagctgaagcgatcgatcctttgatgcgtcgtgcagcgaagaccatcaatttcggtgttctctacggtatgagtgcctttcgtttgtcgcaggaattaggcattccctatgaagaagctcaggcgttcattcagaaatactttcaaagctatcccaaagttaaagcatggatcgagaagactctccgtgaaggccgcacacgtggttacgtagagaccttatttggacgtcgccgctatgttcccgatttaaacgctcgcgtgaaaggcaagcgtgaagccgccgaacgcatggcgttcaacatgcctgtacagggcacggcagctgacctcatgaaacttgcaatggtgcgcctttttccacaattgcgtgaagttggtgcccgcatgctcttgcaggtccacgatgaactcttgttagaagcgccaaaagagcgtgcggaagaggtggcagccctcgcgaaagaagttatggaaggcgtgtggcccttagcggtgcctcttgaagtcgaagttggtattggcgaggattggctggctgccaaagga

SEQ ID NO: 4492 - protein, 841 aa, synthetic construct
  REGION 1..841: note = Variant of DNA polymerase I from Thermus sp. strain 2.9
MHHHHHHGGSGVLPVFEPKGRVLLVDGHHLAYRNFFALKGLTTSLGEPVQGVYGFAKSLLKALKEDGDVVIVVFDAKAPSFRHEAYEAYKAGRAPTPEDFPRQLALMKELVDLLGLERLEVPGFEADDVLATLAKKAEREGYEVQILTADRDLFQLLSPRISVLHPEGHRITPEWLWEKYGLRPEQWVDFRALAGDPSDNIPGVKGIGEKTALKLLKEWGSLENLLKNLDQVKPESVREKILAHLEDLKLSRELSRVRTDLPLEVDFGRRREPDWEGLKAFLERLEFGSLLHEFGLLESPLLAEEAPWPPPEGAFLGYRLSRPEPMWAELLALAASAQGRVYRAEDPHGALRGLFEVRGLLAKDLAVRALREGLDLPPTDDPMLLAYLLDPSNTTPEGVARRYGGEWTEDAAKRALLAERLHANLLGRLQGEERLLWLYEEVEKPLSRVLAHMEATGVKLDVAYLENLSLEVAAHMRRLEEEVFRLAGRSFRLNSRDQLERVLFDELGLPPIGKTEKTGKRSTSAAVLEALREVHPIVDKILQYRELAKLKGTYIDRLPALVHPKTGRLHTRFNQTATATGRLSSSDPNLQNIPVRTPLGQKIRRAFVAEEGWRLVALDYRQIELRVLAHLSGDENLIRVFQEGKDIHTQTASWMFGLSAEAIDPLMRRAAKTINFGVLYGMSAFRLSQELGIPYEEAQAFIQKYFQSYPKVKAWIEKTLREGRTRGYVETLFGRRRYVPDLNARVKGKREAAERMAFNMPVQGTAADLMKLAMVRLFPQLREVGARMLLQVHDELLLEAPKERAEEVAALAKEVMEGVWPLAVPLEVEVGIGEDWLAAKG

SEQ ID NO: 4493 - DNA, 2523 bp, synthetic construct
  misc_feature 1..2523: note = Variant of DNA polymerase I from Thermus sp. strain 2.9
  source 1..2523: mol_type = other DNA
atgcaccatcatcatcatcatggcggtagcggcgtgttaccggtgttcgagcctaaaggtcgcgtgcttctggttgatggccatcatctcgcgtatcgtaacttctttgccctgaaaggattaaccaccagcctgggcgagccggtacagggtgtctacggctttgcaaagtcgctcctgaaagctctgaaagaagacggtgatgtggtgattgttgtctttgatgcgaaagcgccaagttttcgccacgaagcgtacgaagcttacaaagccgggcgtgctccaacgccggaagactttcctcgccaattggcgcttatgaaggaattagtggatttgcttggcctcgaacgcttggaagttcccggtttcgaggcagacgacgtattagcgactctcgcaaagaaagccgaacgtgagggctatgaagtccagatcttgacagcagatcgcgatcttttccagcttttatctccgcgcatctcggtgttacacccggaagggcatcgtatcaccccggaatggctctgggagaaatatggtttgcgtcccgaacaatgggtggattttcgcgccttagcaggcgatccgagcgacaatattccgggagttaaaggtatcggcgagaagacggcgctcaagctccttaaagaatgggggtcgttggagaacttgcttaagaatttagatcaggtcaaaccagagtcagtgcgtgagaagattcttgctcacctcgaagacctcaaattaagccgcgaattgtcccgtgtacgcaccgatttgccgctcgaagttgatttcggtcgccgccgcgaacctgactgggagggtcttaaagcgtttttagagcgtcttgaatttggttcgctcttgcatgaattcggccttttagaaagcccgttactggccgaagaagcaccttggccaccgcccgagggcgcgtttttaggttaccgtttgagtcgcccggaaccgatgtgggccgaattactggctcttgcagcgtctgcccagggacgtgtgtatcgcgcggaagaccctcatggtgcgctccgcggcctcttcgaagtccgtggactccttgccaaagacttagctgttgttgcattgcgcgaaggtcttgatttacctccgactgatgatccaatgcttcttgcgtacctcttggacccgtcaaacacgacgcccgaaggcgtagcccgtcgttacggcggcgagtggaccgaagatgcagcgaaacgcgcgttattggccgaacgtttgcacgccaatttattaggacgtttgcaaggcgaggaacgtctcctctggctttacgaagaagtggagaaaccattgagtcgcgtgctcgcgcatatggaagctaccggtgtcaaattagacgtggcgtatttggagaatctcagccttgaagttgctgcccacatgcgccgcttggaggaagaagtattccgtttagcaggccgttcctttcgccttaactctcgcgatcagttagaacgtgtgttgttcgatgaacttggtctccctcctatcggcaagacagagaagaccggtaaacgtagcacttcagcggcggttttagaagctcttcgcgaagtccatcccattgtggacaagatcttgcagtaccgcgaactcgcgaaattgaaaggcacctatattgaccgtcttccggcattagtccacccgaaaacgggacgcctccatacccgcttcaaccaaacagccacggcgaccggtcgtttgtcctcctctgatccaaaccttcagaatattccagtacgtaccccattgggccagaagatccgccgtgcgtttgtagctgaggagggttggcgtttagtggccctcgattatcgttctattgaattacgtgtccttgcccatctttctggcgatgagaacctcatccgcgtgtttcaggaaggcaaagacattcacactcaaacggcaagctggatgtttggattatcagctgaagcgatcgatcctttgatgcgtcgtgcagcgaagaccatcaatttcggtgttctctacggtatgagtgcctttcgtttgtcgcaggaattaggcattccctatgaagaagctcaggcgttcattcagaaatactttcaaagctatcccaaagttaaagcatggatcgagaagactctccgtgaaggccgcacacgtggttacgtagagaccttatttggacgtcgccgctatgttcccgatttaaacgctcgcgtgaaaggcaagcgtgaagccgccgaacgcatggcgttcaacatgcctgtacagggcacggcagctgacctcatgaaacttgcaatggtgcgcctttttccacaattgcgtgaagttggtgcccgcatgctcttgcaggtccacgatgaactcttgttagaagcgccaaaagagcgtgcggaagaggtggcagccctcgcgaaagaagttatggaaggcgtgtggcccttagcggtgcctcttgaagtcgaagttggtattggcgaggattggctggctgccaaagga

SEQ ID NO: 4494 - protein, 841 aa, synthetic construct
  REGION 1..841: note = Variant of DNA polymerase I from Thermus sp. strain 2.9
MHHHHHHGGSGVLPVFEPKGRVLLVDGHHLAYRNFFALKGLTTSLGEPVQGVYGFAKSLLKALKEDGDVVIVVFDAKAPSFRHEAYEAYKAGRAPTPEDFPRQLALMKELVDLLGLERLEVPGFEADDVLATLAKKAEREGYEVQILTADRDLFQLLSPRISVLHPEGHRITPEWLWEKYGLRPEQWVDFRALAGDPSDNIPGVKGIGEKTALKLLKEWGSLENLLKNLDQVKPESVREKILAHLEDLKLSRELSRVRTDLPLEVDFGRRREPDWEGLKAFLERLEFGSLLHEFGLLESPLLAEEAPWPPPEGAFLGYRLSRPEPMWAELLALAASAQGRVYRAEDPHGALRGLFEVRGLLAKDLAVVALREGLDLPPTDDPMLLAYLLDPSNTTPEGVARRYGGEWTEDAAKRALLAERLHANLLGRLQGEERLLWLYEEVEKPLSRVLAHMEATGVKLDVAYLENLSLEVAAHMRRLEEEVFRLAGRSFRLNSRDQLERVLFDELGLPPIGKTEKTGKRSTSAAVLEALREVHPIVDKILQYRELAKLKGTYIDRLPALVHPKTGRLHTRFNQTATATGRLSSSDPNLQNIPVRTPLGQKIRRAFVAEEGWRLVALDYRSIELRVLAHLSGDENLIRVFQEGKDIHTQTASWMFGLSAEAIDPLMRRAAKTINFGVLYGMSAFRLSQELGIPYEEAQAFIQKYFQSYPKVKAWIEKTLREGRTRGYVETLFGRRRYVPDLNARVKGKREAAERMAFNMPVQGTAADLMKLAMVRLFPQLREVGARMLLQVHDELLLEAPKERAEEVAALAKEVMEGVWPLAVPLEVEVGIGEDWLAAKG

SEQ ID NO: 4495 - DNA, 2523 bp, synthetic construct
  misc_feature 1..2523: note = Variant of DNA polymerase I from Thermus sp. strain 2.9
  source 1..2523: mol_type = other DNA
atgcaccatcatcatcatcatggcggtagcggcgtgttaccggtgttcgagcctaaaggtcgcgtgcttctggttgatggccatcatctcgcgtatcgtaacttctttgccctgaaaggattaaccaccagcctgggcgagccggtacagggtgtctacggctttgcaaagtcgctcctgaaagctctgaaagaagacggtgatgtggtgattgttgtctttgatgcgaaagcgccaagttttcgccacgaagcgtacgaagcttacaaagccgggcgtgctccaacgccggaagactttcctcgccaattggcgcttatgaaggaattagtggatttgcttggcctcgaacgcttggaagttcccggtttcgaggcagacgacgtattagcgactctcgcaaagaaagccgaacgtgagggctatgaagtccagatcttgacagcagatcgcgatcttttccagcttttatctccgcgcatctcggtgttacacccggaagggcatcgtatcaccccggaatggctctgggagaaatatggtttgcgtcccgaacaatgggtggattttcgcgccttagcaggcgatccgagcgacaatattccgggagttaaaggtatcggcgagaagacggcgctcaagctccttaaagaatgggggtcgttggagaacttgcttaagaatttagatcaggtcaaaccagagtcagtgcgtgagaagattcttgctcacctcgaagacctcaaattaagccgcgaattgtcccgtgtacgcaccgatttgccgctcgaagttgatttcggtcgccgccgcgaacctgactgggagggtcttaaagcgtttttagagcgtcttgaatttggttcgctcttgcatgaattcggccttttagaaagcccgttactggccgaagaagcaccttggccaccgcccgagggcgcgtttttaggttaccgtttgagtcgcccggaaccgatgtgggccgaattactggctcttgcagcgtctgcccagggacgtgtgtatcgcgcggaagaccctcatggtgcgctccgcggcctcttcgaagtccgtggactccttgccaaagacttagctgttgttgcattgcgcgaaggtcttgatttacctccgactgatgatccaatgcttcttgcgtacctcttggacccgtcaaacacgacgcccgaaggcgtagcccgtcgttacggcggcgagtggaccgaagatgcagcgaaacgcgcgttattggccgaacgtttgcacgccaatttattaggacgtttgcaaggcgaggaacgtctcctctggctttacgaagaagtggagaaaccattgagtcgcgtgctcgcgcatatggaagctaccggtgtcaaattagacgtggcgtatttggagaatctcagccttgaagttgctgcccacatgcgccgcttggaggaagaagtattccgtttagcaggccgttcctttcgccttaactctcgcgatcagttagaacgtgtgttgttcgatgaacttggtctccctcctatcggcaagacagagaagaccggtaaacgtagcacttcagcggcggttttagaagctcttcgcgaagtccatcccattgtggacaagatcttgcagtaccgcgaactcgcgaaattgaaaggcacctatattgaccgtcttccggcattagtccacccgaaaacgggacgcctccatacccgcttcaaccaaacagccacggcgaccggtcgtttgtcctcctctgatccaaaccttcagaatattccagtacgtaccccattgggccagaagatccgccgtgcgtttgtagctgaggagggttggcgtttagtggccctcgattatcgtcaaattgaattacgtgtccttgcccatctttctggcgatgagaacctcatccgcgtgtttcaggaaggcaaagacattcacactcaaacggcaagctggatgtttggattatcagctgaagcgatcgatcctttgatgcgtcgtgcagcgaagaccatcgggttcggtgttctctacggtatgagtgcctttcgtttgtcgcaggaattaggcattccctatgaagaagctcaggcgttcattcagaaatactttcaaagctatcccaaagttaaagcatggatcgagaagactctccgtgaaggccgcacacgtggttacgtagagaccttatttggacgtcgccgctatgttcccgatttaaacgctcgcgtgaaaggcaagcgtgaagccgccgaacgcatggcgttcaacatgcctgtacagggcacggcagctgacctcatgaaacttgcaatggtgcgcctttttccacaattgcgtgaagttggtgcccgcatgctcttgcaggtccacgatgaactcttgttagaagcgccaaaagagcgtgcggaagaggtggcagccctcgcgaaagaagttatggaaggcgtgtggcccttagcggtgcctcttgaagtcgaagttggtattggcgaggattggctggctgccaaagga

SEQ ID NO: 4496 - protein, 841 aa, synthetic construct
  REGION 1..841: note = Variant of DNA polymerase I from Thermus sp. strain 2.9
MHHHHHHGGSGVLPVFEPKGRVLLVDGHHLAYRNFFALKGLTTSLGEPVQGVYGFAKSLLKALKEDGDVVIVVFDAKAPSFRHEAYEAYKAGRAPTPEDFPRQLALMKELVDLLGLERLEVPGFEADDVLATLAKKAEREGYEVQILTADRDLFQLLSPRISVLHPEGHRITPEWLWEKYGLRPEQWVDFRALAGDPSDNIPGVKGIGEKTALKLLKEWGSLENLLKNLDQVKPESVREKILAHLEDLKLSRELSRVRTDLPLEVDFGRRREPDWEGLKAFLERLEFGSLLHEFGLLESPLLAEEAPWPPPEGAFLGYRLSRPEPMWAELLALAASAQGRVYRAEDPHGALRGLFEVRGLLAKDLAVVALREGLDLPPTDDPMLLAYLLDPSNTTPEGVARRYGGEWTEDAAKRALLAERLHANLLGRLQGEERLLWLYEEVEKPLSRVLAHMEATGVKLDVAYLENLSLEVAAHMRRLEEEVFRLAGRSFRLNSRDQLERVLFDELGLPPIGKTEKTGKRSTSAAVLEALREVHPIVDKILQYRELAKLKGTYIDRLPALVHPKTGRLHTRFNQTATATGRLSSSDPNLQNIPVRTPLGQKIRRAFVAEEGWRLVALDYRQIELRVLAHLSGDENLIRVFQEGKDIHTQTASWMFGLSAEAIDPLMRRAAKTIGFGVLYGMSAFRLSQELGIPYEEAQAFIQKYFQSYPKVKAWIEKTLREGRTRGYVETLFGRRRYVPDLNARVKGKREAAERMAFNMPVQGTAADLMKLAMVRLFPQLREVGARMLLQVHDELLLEAPKERAEEVAALAKEVMEGVWPLAVPLEVEVGIGEDWLAAKG

SEQ ID NO: 4497 - DNA, 2523 bp, synthetic construct
  misc_feature 1..2523: note = Variant of DNA polymerase I from Thermus sp. strain 2.9
  source 1..2523: mol_type = other DNA
atgcaccatcatcatcatcatggcggtagcggcgtgttaccggtgttcgagcctaaaggtcgcgtgcttctggttgatggccatcatctcgcgtatcgtaacttctttgccctgaaaggattaaccaccagcctgggcgagccggtacagggtgtctacggctttgcaaagtcgctcctgaaagctctgaaagaagacggtgatgtggtgattgttgtctttgatgcgaaagcgccaagttttcgccacgaagcgtacgaagcttacaaagccgggcgtgctccaacgccggaagactttcctcgccaattggcgcttatgaaggaattagtggatttgcttggcctcgaacgcttggaagttcccggtttcgaggcagacgacgtattagcgactctcgcaaagaaagccgaacgtgagggctatgaagtccagatcttgacagcagatcgcgatcttttccagcttttatctccgcgcatctcggtgttacacccggaagggcatcgtatcaccccggaatggctctgggagaaatatggtttgcgtcccgaacaatgggtggattttcgcgccttagcaggcgatccgagcgacaatattccgggagttaaaggtatcggcgagaagacggcgctcaagctccttaaagaatgggggtcgttggagaacttgcttaagaatttagatcaggtcaaaccagagtcagtgcgtgagaagattcttgctcacctcgaagacctcaaattaagccgcgaattgtcccgtgtacgcaccgatttgccgctcgaagttgatttcggtcgccgccgcgaacctgactgggagggtcttaaagcgtttttagagcgtcttgaatttggttcgctcttgcatgaattcggccttttagaaagcccgttactggccgaagaagcaccttggccaccgcccgagggcgcgtttttaggttaccgtttgagtcgcccggaaccgatgtgggccgaattactggctcttgcagcgtctgcccagggacgtgtgtatcgcgcggaagaccctcatggtgcgctccgcggcctcttcgaagtccgtggactccttgccaaagacttagctgttgttgcattgcgcgaaggtcttgatttacctccgactgatgatccaatgcttcttgcgtacctcttggacccgtcaaacacgacgcccgaaggcgtagcccgtcgttacggcggcgagtggaccgaagatgcagcgaaacgcgcgttattggccgaacgtttgcacgccaatttattaggacgtttgcaaggcgaggaacgtctcctctggctttacgaagaagtggagaaaccattgagtcgcgtgctcgcgcatatggaagctaccggtgtcaaattagacgtggcgtatttggagaatctcagccttgaagttgctgcccacatgcgccgcttggaggaagaagtattccgtttagcaggccattcctttcgccttaactctcgcgatcagttagaacgtgtgttgttcgatgaacttggtctccctcctatcggcaagacagagaagaccggtaaacgtagcacttcagcggcggttttagaagctcttcgcgaagtccatcccattgtggacaagatcttgcagtaccgcgaactcgcgaaattgaaaggcacctatattgaccgtcttccggcattagtccacccgaaaacgggacgcctccatacccgcttcaaccaaacagccacggcgaccggtcgtttgtcctcctctgatccaaaccttcagaatattccagtacgtaccccattgggccagaagatccgccgtgcgtttgtagctgaggagggttggcgtttagtggccctcgattatcgtcaaattgaattacgtgtccttgcccatctttctggcgatgagaacctcatccgcgtgtttcaggaaggcaaagacattcacactcaaacggcaagctggatgtttggattatcagctgaagcgatcgatcctttgatgcgtcgtgcagcgaagaccatcaatttcggtgttctctacggtatgagtgcctttcgtttgtcgcaggaattaggcattccctatgaagaagctcaggcgttcattcagaaatactttcaaagctatcccaaagttaaagcatggatcgagaagactctccgtgaaggccgcacacgtggttacgtagagaccttatttggacgtcgccgctatgttcccgatttaaacgctcgcgtgaaaggcaagcgtgaagccgccgaacgcatggcgttcaacatgcctgtacagggcacggcagctgacctcatgaaacttgcaatggtgcgcctttttccacaattgcgtgaagttggtgcccgcatgctcttgcaggtccacgatgaactcttgttagaagcgccaaaagagcgtgcggaagaggtggcagccctcgcgaaagaagttatggaaggcgtgtggcccttagcggtgcctcttgaagtcgaagttggtattggcgaggattggctggctgccaaagga

SEQ ID NO: 4498 - protein, 841 aa, synthetic construct
  REGION 1..841: note = Variant of DNA polymerase I from Thermus sp. strain 2.9
MHHHHHHGGSGVLPVFEPKGRVLLVDGHHLAYRNFFALKGLTTSLGEPVQGVYGFAKSLLKALKEDGDVVIVVFDAKAPSFRHEAYEAYKAGRAPTPEDFPRQLALMKELVDLLGLERLEVPGFEADDVLATLAKKAEREGYEVQILTADRDLFQLLSPRISVLHPEGHRITPEWLWEKYGLRPEQWVDFRALAGDPSDNIPGVKGIGEKTALKLLKEWGSLENLLKNLDQVKPESVREKILAHLEDLKLSRELSRVRTDLPLEVDFGRRREPDWEGLKAFLERLEFGSLLHEFGLLESPLLAEEAPWPPPEGAFLGYRLSRPEPMWAELLALAASAQGRVYRAEDPHGALRGLFEVRGLLAKDLAVVALREGLDLPPTDDPMLLAYLLDPSNTTPEGVARRYGGEWTEDAAKRALLAERLHANLLGRLQGEERLLWLYEEVEKPLSRVLAHMEATGVKLDVAYLENLSLEVAAHMRRLEEEVFRLAGHSFRLNSRDQLERVLFDELGLPPIGKTEKTGKRSTSAAVLEALREVHPIVDKILQYRELAKLKGTYIDRLPALVHPKTGRLHTRFNQTATATGRLSSSDPNLQNIPVRTPLGQKIRRAFVAEEGWRLVALDYRQIELRVLAHLSGDENLIRVFQEGKDIHTQTASWMFGLSAEAIDPLMRRAAKTINFGVLYGMSAFRLSQELGIPYEEAQAFIQKYFQSYPKVKAWIEKTLREGRTRGYVETLFGRRRYVPDLNARVKGKREAAERMAFNMPVQGTAADLMKLAMVRLFPQLREVGARMLLQVHDELLLEAPKERAEEVAALAKEVMEGVWPLAVPLEVEVGIGEDWLAAKG

SEQ ID NO: 4499 - DNA, 2523 bp, synthetic construct
  misc_feature 1..2523: note = Variant of DNA polymerase I from Thermus sp. strain 2.9
  source 1..2523: mol_type = other DNA
atgcaccatcatcatcatcatggcggtagcggcgtgttaccggtgttcgagcctaaaggtcgcgtgcttctggttgatggccatcatctcgcgtatcgtaacttctttgccctgaaaggattaaccaccagcctgggcgagccggtacagggtgtctacggctttgcaaagtcgctcctgaaagctctgaaagaagacggtgatgtggtgattgttgtctttgatgcgaaagcgccaagttttcgccacgaagcgtacgaagcttacaaagccgggcgtgctccaacgccggaagactttcctcgccaattggcgcttatgaaggaattagtggatttgcttggcctcgaacgcttggaagttcccggtttcgaggcagacgacgtattagcgactctcgcaaagaaagccgaacgtgagggctatgaagtccagatcttgacagcagatcgcgatcttttccagcttttatctccgcgcatctcggtgttacacccggaagggcatcgtatcaccccggaatggctctgggagaaatatggtttgcgtcccgaacaatgggtggattttcgcgccttagcaggcgatccgagcgacaatattccgggagttaaaggtatcggcgagaagacggcgctcaagctccttaaagaatgggggtcgttggagaacttgcttaagaatttagatcaggtcaaaccagagtcagtgcgtgagaagattcttgctcacctcgaagacctcaaattaagccgcgaattgtcccgtgtacgcaccgatttgccgctcgaagttgatttcggtcgccgccgcgaacctgactgggagggtcttaaagcgtttttagagcgtcttgaatttggttcgctcttgcatgaattcggccttttagaaagcccgttactggccgaagaagcaccttggccaccgcccgagggcgcgtttttaggttaccgtttgagtcgcccggaaccgatgtgggccgaattactggctcttgcagcgtctgcccagggacgtgtgtatcgcgcggaagaccctcatggtgcgctccgcggcctcttcgaagtccgtggactccttgccaaagacttagctgttgttgcattgcgcgaaggtcttgatttacctccgactgatgatccaatgcttcttgcgtacctcttggacccgtcaaacacgacgcccgaaggcgtagcccgtcgttacggcggcgagtggaccgaagatgcagcgaaacgcgcgttattggccgaacgtttgcacgccaatttattaggacgtttgcaaggcgaggaacgtctcctctggctttacgaagaagtggagaaaccattgagtcgcgtgctcgcgcatatggaagctaccggtgtcaaattagacgtggcgtatttggagaatctcagccttgaagttgctgcccacatgcgccgcttggaggaagaagtattccgtttagcaggccgttcctttcgccttaactctcgcgatcagttagaacgtgtgttgttcgatgaacttggtctccctcctatcggcaagacagagaagaccggtaaacgtagcacttcagcggcggttttagaagctcttcgcgaagtccatcccattgtggacaagatcttgcagtaccgcgaactcgcgaaattgaaaggcacctatattgaccgtcttccggcattagtccacccgaaaacgggacgcctccatacccgcttcaaccaaacagccacggcgaccggtcgtttgtcctcctctgatccaaaccttcagaatattccagtacgtaccccattgggccagaagatccgccgtgcgtttgtagctgaggagggttggcgtttagtggccctcgattatcgtcaaattgaattacgtgtccttgcccatctttctggcgatgagaacctcatccgcgtgtttcaggaaggcaaagacattcacactcaaacggcaagctggatgtttggattatcagctgaagcgatcgatcctttgatgcgtcgtgcagcgaagaccatcaatttcggtgttctctacggtatgagtgcctttcgtttgtcgcaggaattaggcattccctatgaagaagctcaggcgttcattcagaaatactttcaaagctatcccaaagttaaagcatggatcgagaagactctccgtgaaggccgcacacgtggttacgtagagaccttatttggacgtcgccgctatgttcccgatttaaacgctcgcgtgaaaggcaagcgtgaagccgccgaacgcatggcgttcaacatgcctgtacagggcacggcagctgacctcatgaaacttgcaatggtgcgcctttttccacaattgcgtgaagttggtgcccgcatgctcttgcaggtccacgatgaactcttgttagaagcgccaaaagagcgtatggaagaggtggcagccctcgcgaaagaagttatggaaggcgtgtggcccttagcggtgcctcttgaagtcgaagttggtattggcgaggattggctggctgccaaagga

SEQ ID NO: 4500 - protein, 841 aa, synthetic construct
  REGION 1..841: note = Variant of DNA polymerase I from Thermus sp. strain 2.9
MHHHHHHGGSGVLPVFEPKGRVLLVDGHHLAYRNFFALKGLTTSLGEPVQGVYGFAKSLLKALKEDGDVVIVVFDAKAPSFRHEAYEAYKAGRAPTPEDFPRQLALMKELVDLLGLERLEVPGFEADDVLATLAKKAEREGYEVQILTADRDLFQLLSPRISVLHPEGHRITPEWLWEKYGLRPEQWVDFRALAGDPSDNIPGVKGIGEKTALKLLKEWGSLENLLKNLDQVKPESVREKILAHLEDLKLSRELSRVRTDLPLEVDFGRRREPDWEGLKAFLERLEFGSLLHEFGLLESPLLAEEAPWPPPEGAFLGYRLSRPEPMWAELLALAASAQGRVYRAEDPHGALRGLFEVRGLLAKDLAVVALREGLDLPPTDDPMLLAYLLDPSNTTPEGVARRYGGEWTEDAAKRALLAERLHANLLGRLQGEERLLWLYEEVEKPLSRVLAHMEATGVKLDVAYLENLSLEVAAHMRRLEEEVFRLAGRSFRLNSRDQLERVLFDELGLPPIGKTEKTGKRSTSAAVLEALREVHPIVDKILQYRELAKLKGTYIDRLPALVHPKTGRLHTRFNQTATATGRLSSSDPNLQNIPVRTPLGQKIRRAFVAEEGWRLVALDYRQIELRVLAHLSGDENLIRVFQEGKDIHTQTASWMFGLSAEAIDPLMRRAAKTINFGVLYGMSAFRLSQELGIPYEEAQAFIQKYFQSYPKVKAWIEKTLREGRTRGYVETLFGRRRYVPDLNARVKGKREAAERMAFNMPVQGTAADLMKLAMVRLFPQLREVGARMLLQVHDELLLEAPKERMEEVAALAKEVMEGVWPLAVPLEVEVGIGEDWLAAKG

SEQ ID NO: 4501 - DNA, 2523 bp, synthetic construct
  misc_feature 1..2523: note = Variant of DNA polymerase I from Thermus sp. strain 2.9
  source 1..2523: mol_type = other DNA
atgcaccatcatcatcatcatggcggtagcggcgtgttaccggtgttcgagcctaaaggtcgcgtgcttctggttgatggccatcatctcgcgtatcgtaacttctttgccctgaaaggattaaccaccagcctgggcgagccggtacagggtgtctacggctttgcaaagtcgctcctgaaagctctgaaagaagacggtgatgtggtgattgttgtctttgatgcgaaagcgccaagttttcgccacgaagcgtacgaagcttacaaagccgggcgtgctccaacgccggaagactttcctcgccaattggcgcttatgaaggaattagtggatttgcttggcctcgaacgcttggaagttcccggtttcgaggcagacgacgtattagcgactctcgcaaagaaagccgaacgtgagggctatgaagtccagatcttgacagcagatcgcgatcttttccagcttttatctccgcgcatctcggtgttacacccggaagggcatcgtatcaccccggaatggctctgggagaaatatggtttgcgtcccgaacaatgggtggattttcgcgccttagcaggcgatccgagcgacaatattccgggagttaaaggtatcggcgagaagacggcgctcaagctccttaaagaatgggggtcgttggagaacttgcttaagaatttagatcaggtcaaaccagagtcagtgcgtgagaagattcttgctcacctcgaagacctcaaattaagccgcgaattgtcccgtgtacgcaccgatttgccgctcgaagttgatttcggtcgccgccgcgaacctgactgggagggtcttaaagcgtttttagagcgtcttgaatttggttcgctcttgcatgaattcggccttttagaaagcccgttactggccgaagaagcaccttggccaccgcccgagggcgcgtttttaggttaccgtttgagtcgcccggaaccgatgtgggccgaattactggctcttgcagcgtctgcccagggacgtgtgtatcgcgcggaagaccctcatggtgcgctccgcggcctcttcgaagtccgtggactccttgccaaagacttagctgttgttgcattgcgcgaaggtcttgatttacctccgactgatgatccaatgcttcttgcgtacctcttggacccgtcaaacacgacgcccgaaggcgtagcccgtcgttacggcggcgagtggaccgaagatgcagcgaaacgcgcgttattggccgaacgtttgcacgccaatttattaggacgtttgcaaggcgaggaacgtctcctctggctttacgaagaagtggagaaaccattgagtcgcgtgctcgcgcatatggaagctaccggtgtcaaattagacgtggcgtatttggagaatctcagccttgaagttgctgcccacatgcgccgcttggaggaagaagtattccgtttagcaggccgttcctttcgccttaactctcgcgatcagttagaacgtgtgttgttcgatgaacttggtctccctcctatcggcaagacagagaagaccggtaaacgtagcacttcagcggcggttttagaagctcttcgcgaagtccatcccattgtggacaagatcttgcagtaccgcgaactcgcgaaattgaaaggcacctatattgaccgtcttccggcattagtccacccgaaaacgggacgcctccatacccgcttcaaccaaacagccacggcgaccggtcgtttgtcctcctctgatccaaaccttcagaatattccagtacgtaccccattgggccagaagatccgccgtgcgtttgtagctgaggagggttggcgtttagtggccctcgattatcgtcaaattgaattacgtgtccttgcccatctttctggcgatgagaacctcatccgcgtgtttcaggaaggcaaagacattcacactcaaacggcaagctggatgtttggattatcagctgaagcgatcgatcctttgatgcgtcgtgcagcgaagaccatcaatttcggtgttctctacggtatgagtgcctttcgtttgtcgcaggaattaggcattccctatgaagaagctcaggcgttcatttttaaatactttcaaagctatcccaaagttaaagcatggatcgagaagactctccgtgaaggccgcacacgtggttacgtagagaccttatttggacgtcgccgctatgttcccgatttaaacgctcgcgtgaaaggcaagcgtgaagccgccgaacgcatggcgttcaacatgcctgtacagggcacggcagctgacctcatgaaacttgcaatggtgcgcctttttccacaattgcgtgaagttggtgcccgcatgctcttgcaggtccacgatgaactcttgttagaagcgccaaaagagcgtgcggaagaggtggcagccctcgcgaaagaagttatggaaggcgtgtggcccttagcggtgcctcttgaagtcgaagttggtattggcgaggattggctggctgccaaagga

SEQ ID NO: 4502 - protein, 841 aa, synthetic construct
  REGION 1..841: note = Variant of DNA polymerase I from Thermus sp. strain 2.9
MHHHHHHGGSGVLPVFEPKGRVLLVDGHHLAYRNFFALKGLTTSLGEPVQGVYGFAKSLLKALKEDGDVVIVVFDAKAPSFRHEAYEAYKAGRAPTPEDFPRQLALMKELVDLLGLERLEVPGFEADDVLATLAKKAEREGYEVQILTADRDLFQLLSPRISVLHPEGHRITPEWLWEKYGLRPEQWVDFRALAGDPSDNIPGVKGIGEKTALKLLKEWGSLENLLKNLDQVKPESVREKILAHLEDLKLSRELSRVRTDLPLEVDFGRRREPDWEGLKAFLERLEFGSLLHEFGLLESPLLAEEAPWPPPEGAFLGYRLSRPEPMWAELLALAASAQGRVYRAEDPHGALRGLFEVRGLLAKDLAVVALREGLDLPPTDDPMLLAYLLDPSNTTPEGVARRYGGEWTEDAAKRALLAERLHANLLGRLQGEERLLWLYEEVEKPLSRVLAHMEATGVKLDVAYLENLSLEVAAHMRRLEEEVFRLAGRSFRLNSRDQLERVLFDELGLPPIGKTEKTGKRSTSAAVLEALREVHPIVDKILQYRELAKLKGTYIDRLPALVHPKTGRLHTRFNQTATATGRLSSSDPNLQNIPVRTPLGQKIRRAFVAEEGWRLVALDYRQIELRVLAHLSGDENLIRVFQEGKDIHTQTASWMFGLSAEAIDPLMRRAAKTINFGVLYGMSAFRLSQELGIPYEEAQAFIFKYFQSYPKVKAWIEKTLREGRTRGYVETLFGRRRYVPDLNARVKGKREAAERMAFNMPVQGTAADLMKLAMVRLFPQLREVGARMLLQVHDELLLEAPKERAEEVAALAKEVMEGVWPLAVPLEVEVGIGEDWLAAKG

SEQ ID NO: 4503 - DNA, 2523 bp, synthetic construct
  misc_feature 1..2523: note = Variant of DNA polymerase I from Thermus sp. strain 2.9
  source 1..2523: mol_type = other DNA
atgcaccatcatcatcatcatggcggtagcggcgtgttaccggtgttcgagcctaaaggtcgcgtgcttctggttgatggccatcatctcgcgtatcgtaacttctttgccctgaaaggattaaccaccagcctgggcgagccggtacagggtgtctacggctttgcaaagtcgctcctgaaagctctgaaagaagacggtgatgtggtgattgttgtctttgatgcgaaagcgccaagttttcgccacgaagcgtacgaagcttacaaagccgggcgtgctccaacgccggaagactttcctcgccaattggcgcttatgaaggaattagtggatttgcttggcctcgaacgcttggaagttcccggtttcgaggcagacgacgtattagcgactctcgcaaagaaagccgaacgtgagggctatgaagtccagatcttgacagcagatcgcgatcttttccagcttttatctccgcgcatctcggtgttacacccggaagggcatcgtatcaccccggaatggctctgggagaaatatggtttgcgtcccgaacaatgggtggattttcgcgccttagcaggcgatccgagcgacaatattccgggagttaaaggtatcggcgagaagacggcgctcaagctccttaaagaatgggggtcgttggagaacttgcttaagaatttagatcaggtcaaaccagagtcagtgcgtgagaagattcttgctcacctcgaagacctcaaattaagccgcgaattgtcccgtgtacgcaccgatttgccgctcgaagttgatttcggtcgccgccgcgaacctgactgggagggtcttaaagcgtttttagagcgtcttgaatttggttcgctcttgcatgaattcggccttttagaaagcccgttactggccgaagaagcaccttggccaccgcccgagggcgcgtttttaggttaccgtttgagtcgcccggaaccgatgtgggccgaattactggctcttgcagcgtctgcccagggacgtgtgtatcgcgcggaagaccctcatggtgcgctccgcggcctcttcgaagtccgtggactccttgccaaagacttagctgttgttgcattgcgcgaaggtcttgatttacctccgactgatgatccaatgcttcttgcgtacctcttggacccgtcaaacacgacgcccgaaggcgtagcccgtcgttacggcggcgagtggaccgaagatgcagcgaaacgcgcgttattggccgaacgtttgcacgccaatttattaggacgtttgcaaggcgaggaacgtctcctctggctttacgaagaagtggagaaaccattgagtcgcgtgctcgcgcatatggaagagaccggtgtcaaattagacgtggcgtatttggagaatctcagccttgaagttgctgcccacatgcgccgcttggaggaagaagtattccgtttagcaggccgttcctttcgccttaactctcgcgatcagttagaacgtgtgttgttcgatgaacttggtctccctcctatcggcaagacagagaagaccggtaaacgtagcacttcagcggcggttttagaagctcttcgcgaagtccatcccattgtggacaagatcttgcagtaccgcgaactcgcgaaattgaaaggcacctatattgaccgtcttccggcattagtccacccgaaaacgggacgcctccatacccgcttcaaccaaacagccacggcgaccggtcgtttgtcctcctctgatccaaaccttcagaatattccagtacgtaccccattgggccagaagatccgccgtgcgtttgtagctgaggagggttggcgtttagtggccctcgattatcgtcaaattgaattacgtgtccttgcccatctttctggcgatgagaacctcatccgcgtgtttcaggaaggcaaagacattcacactcaaacggcaagctggatgtttggattatcagctgaagcgatcgatcctttgatgcgtcgtgcagcgaagaccatcaatttcggtgttctctacggtatgagtgcctttcgtttgtcgcaggaattaggcattccctatgaagaagctcaggcgttcattcagaaatactttcaaagctatcccaaagttaaagcatggatcgagaagactctccgtgaaggccgcacacgtggttacgtagagaccttatttggacgtcgccgctatgttcccgatttaaacgctcgcgtgaaaggcaagcgtgaagccgccgaacgcatggcgttcaacatgcctgtacagggcacggcagctgacctcatgaaacttgcaatggtgcgcctttttccacaattgcgtgaagttggtgcccgcatgctcttgcaggtccacgatgaactcttgttagaagcgccaaaagagcgtgcggaagaggtggcagccctcgcgaaagaagttatggaaggcgtgtggcccttagcggtgcctcttgaagtcgaagttggtattggcgaggattggctggctgccaaagga

SEQ ID NO: 4504 - protein, 841 aa, synthetic construct
  REGION 1..841: note = Variant of DNA polymerase I from Thermus sp. strain 2.9
MHHHHHHGGSGVLPVFEPKGRVLLVDGHHLAYRNFFALKGLTTSLGEPVQGVYGFAKSLLKALKEDGDVVIVVFDAKAPSFRHEAYEAYKAGRAPTPEDFPRQLALMKELVDLLGLERLEVPGFEADDVLATLAKKAEREGYEVQILTADRDLFQLLSPRISVLHPEGHRITPEWLWEKYGLRPEQWVDFRALAGDPSDNIPGVKGIGEKTALKLLKEWGSLENLLKNLDQVKPESVREKILAHLEDLKLSRELSRVRTDLPLEVDFGRRREPDWEGLKAFLERLEFGSLLHEFGLLESPLLAEEAPWPPPEGAFLGYRLSRPEPMWAELLALAASAQGRVYRAEDPHGALRGLFEVRGLLAKDLAVVALREGLDLPPTDDPMLLAYLLDPSNTTPEGVARRYGGEWTEDAAKRALLAERLHANLLGRLQGEERLLWLYEEVEKPLSRVLAHMEETGVKLDVAYLENLSLEVAAHMRRLEEEVFRLAGRSFRLNSRDQLERVLFDELGLPPIGKTEKTGKRSTSAAVLEALREVHPIVDKILQYRELAKLKGTYIDRLPALVHPKTGRLHTRFNQTATATGRLSSSDPNLQNIPVRTPLGQKIRRAFVAEEGWRLVALDYRQIELRVLAHLSGDENLIRVFQEGKDIHTQTASWMFGLSAEAIDPLMRRAAKTINFGVLYGMSAFRLSQELGIPYEEAQAFIQKYFQSYPKVKAWIEKTLREGRTRGYVETLFGRRRYVPDLNARVKGKREAAERMAFNMPVQGTAADLMKLAMVRLFPQLREVGARMLLQVHDELLLEAPKERAEEVAALAKEVMEGVWPLAVPLEVEVGIGEDWLAAKG

SEQ ID NO: 4505 - DNA, 2523 bp, synthetic construct
  misc_feature 1..2523: note = Variant of DNA polymerase I from Thermus sp. strain 2.9
  source 1..2523: mol_type = other DNA
atgcaccatcatcatcatcatggcggtagcggcgtgttaccggtgttcgagcctaaaggtcgcgtgcttctggttgatggccatcatctcgcgtatcgtaacttctttgccctgaaaggattaaccaccagcctgggcgagccggtacagggtgtctacggctttgcaaagtcgctcctgaaagctctgaaagaagacggtgatgtggtgattgttgtctttgatgcgaaagcgccaagttttcgccacgaagcgtacgaagcttacaaagccgggcgtgctccaacgccggaagactttcctcgccaattggcgcttatgaaggaattagtggatttgcttggcctcgaacgcttggaagttcccggtttcgaggcagacgacgtattagcgactctcgcaaagaaagccgaacgtgagggctatgaagtccagatcttgacagcagatcgcgatcttttccagcttttatctccgcgcatctcggtgttacacccggaagggcatcgtatcaccccggaatggctctgggagaaatatggtttgcgtcccgaacaatgggtggattttcgcgccttagcaggcgatccgagcgacaatattccgggagttaaaggtatcggcgagaagacggcgctcaagctccttaaagaatgggggtcgttggagaacttgcttaagaatttagatcaggtcaaaccagagtcagtgcgtgagaagattcttgctcacctcgaagacctcaaattaagccgcgaattgtcccgtgtacgcaccgatttgccgctcgaagttgatttcggtcgccgccgcgaacctgactgggagggtcttaaagcgtttttagagcgtcttgaatttggttcgctcttgcatgaattcggccttttagaaagcccgttactggccgaagaagcaccttggccaccgcccgagggcgcgtttttaggttaccgtttgagtcgcccggaaccgatgtgggccgaattactggctcttgcagcgtctgcccagggacgtgtgtatcgcgcggaagaccctcatggtgcgctccgcggcctcttcgaagtccgtggactccttgccaaagacttagctgttgttgcattgcgcgaaggtcttgatttacctccgactgatgatccaatgcttcttgcgtacctcttggacccgtcaaacacgacgcccgaaggcgtagcccgtcgttacggcggcgagtggaccgaagatgcagcgaaacgcgcgttattggccgaacgtttgcacgccaatttattaggacgtttgcaaggcgaggaacgtctcctctggctttacgaagaagtggagaaaccattgagtcgcgtgctcgcgcatatggaagctaccggtgtcaaattagacagggcgtatttggagaatctcagccttgaagttgctgcccacatgcgccgcttggaggaagaagtattccgtttagcaggccgttcctttcgccttaactctcgcgatcagttagaacgtgtgttgttcgatgaacttggtctccctcctatcggcaagacagagaagaccggtaaacgtagcacttcagcggcggttttagaagctcttcgcgaagtccatcccattgtggacaagatcttgcagtaccgcgaactcgcgaaattgaaaggcacctatattgaccgtcttccggcattagtccacccgaaaacgggacgcctccatacccgcttcaaccaaacagccacggcgaccggtcgtttgtcctcctctgatccaaaccttcagaatattccagtacgtaccccattgggccagaagatccgccgtgcgtttgtagctgaggagggttggcgtttagtggccctcgattatcgtcaaattgaattacgtgtccttgcccatctttctggcgatgagaacctcatccgcgtgtttcaggaaggcaaagacattcacactcaaacggcaagctggatgtttggattatcagctgaagcgatcgatcctttgatgcgtcgtgcagcgaagaccatcaatttcggtgttctctacggtatgagtgcctttcgtttgtcgcaggaattaggcattccctatgaagaagctcaggcgttcattcagaaatactttcaaagctatcccaaagttaaagcatggatcgagaagactctccgtgaaggccgcacacgtggttacgtagagaccttatttggacgtcgccgctatgttcccgatttaaacgctcgcgtgaaaggcaagcgtgaagccgccgaacgcatggcgttcaacatgcctgtacagggcacggcagctgacctcatgaaacttgcaatggtgcgcctttttccacaattgcgtgaagttggtgcccgcatgctcttgcaggtccacgatgaactcttgttagaagcgccaaaagagcgtgcggaagaggtggcagccctcgcgaaagaagttatggaaggcgtgtggcccttagcggtgcctcttgaagtcgaagttggtattggcgaggattggctggctgccaaagga

SEQ ID NO: 4506 - protein, 841 aa, synthetic construct
  REGION 1..841: note = Variant of DNA polymerase I from Thermus sp. strain 2.9
MHHHHHHGGSGVLPVFEPKGRVLLVDGHHLAYRNFFALKGLTTSLGEPVQGVYGFAKSLLKALKEDGDVVIVVFDAKAPSFRHEAYEAYKAGRAPTPEDFPRQLALMKELVDLLGLERLEVPGFEADDVLATLAKKAEREGYEVQILTADRDLFQLLSPRISVLHPEGHRITPEWLWEKYGLRPEQWVDFRALAGDPSDNIPGVKGIGEKTALKLLKEWGSLENLLKNLDQVKPESVREKILAHLEDLKLSRELSRVRTDLPLEVDFGRRREPDWEGLKAFLERLEFGSLLHEFGLLESPLLAEEAPWPPPEGAFLGYRLSRPEPMWAELLALAASAQGRVYRAEDPHGALRGLFEVRGLLAKDLAVVALREGLDLPPTDDPMLLAYLLDPSNTTPEGVARRYGGEWTEDAAKRALLAERLHANLLGRLQGEERLLWLYEEVEKPLSRVLAHMEATGVKLDRAYLENLSLEVAAHMRRLEEEVFRLAGRSFRLNSRDQLERVLFDELGLPPIGKTEKTGKRSTSAAVLEALREVHPIVDKILQYRELAKLKGTYIDRLPALVHPKTGRLHTRFNQTATATGRLSSSDPNLQNIPVRTPLGQKIRRAFVAEEGWRLVALDYRQIELRVLAHLSGDENLIRVFQEGKDIHTQTASWMFGLSAEAIDPLMRRAAKTINFGVLYGMSAFRLSQELGIPYEEAQAFIQKYFQSYPKVKAWIEKTLREGRTRGYVETLFGRRRYVPDLNARVKGKREAAERMAFNMPVQGTAADLMKLAMVRLFPQLREVGARMLLQVHDELLLEAPKERAEEVAALAKEVMEGVWPLAVPLEVEVGIGEDWLAAKG

SEQ ID NO: 4507 - DNA, 2523 bp, synthetic construct
  misc_feature 1..2523: note = Variant of DNA polymerase I from Thermus sp. strain 2.9
  source 1..2523: mol_type = other DNA
atgcaccatcatcatcatcatggcggtagcggcgtgttaccggtgttcgagcctaaaggtcgcgtgcttctggttgatggccatcatctcgcgtatcgtaacttctttgccctgaaaggattaaccaccagcctgggcgagccggtacagggtgtctacggctttgcaaagtcgctcctgaaagctctgaaagaagacggtgatgtggtgattgttgtctttgatgcgaaagcgccaagttttcgccacgaagcgtacgaagcttacaaagccgggcgtgctccaacgccggaagactttcctcgccaattggcgcttatgaaggaattagtggatttgcttggcctcgaacgcttggaagttcccggtttcgaggcagacgacgtattagcgactctcgcaaagaaagccgaacgtgagggctatgaagtccagatcttgacagcagatcgcgatcttttccagcttttatctccgcgcatctcggtgttacacccggaagggcatcgtatcaccccggaatggctctgggagaaatatggtttgcgtcccgaacaatgggtggattttcgcgccttagcaggcgatccgagcgacaatattccgggagttaaaggtatcggcgagaagacggcgctcaagctccttaaagaatgggggtcgttggagaacttgcttaagaatttagatcaggtcaaaccagagtcagtgcgtgagaagattcttgctcacctcgaagacctcaaattaagccgcgaattgtcccgtgtacgcaccgatttgccgctcgaagttgatttcggtcgccgccgcgaacctgactgggagggtcttaaagcgtttttagagcgtcttgaatttggttcgctcttgcatgaattcggccttttagaaagcccgttactggccgaagaagcaccttggccaccgcccgagggcgcgtttttaggttaccgtttgagtcgcccggaaccgatgtgggccgaattactggctcttgcagcgtctgcccagggacgtgtgtatcgcgcggaagaccctcatggtgcgctccgcggcctcttcgaagtccgtggactccttgccaaagacttagctgttgttgcattgcgcgaaggtcttgatttacctccgactgatgatccaatgcttcttgcgtacctcttggacccgtcaaacacgacgcccgaaggcgtagcccgtcgttacggcggcgagtggaccgaagatgcagcgaaacgcgcgttattggccgaacgtttgcacgccaatttattaggacgtttgcaaggcgaggaacgtctcctctggctttacgaagaagtggagaaaccattgagtcgcgtgctcgcgcatatggaagctaccggtgtcaaattagacgtggcgtatttggagaatctcagccttgaagttgctgcccacatgcgccgcttggaggaagaagtattccgtttagcaggccgttcctttcgccttaactctcgcgatcagttagaacgtgtgttgttcgatgaacttggtctccctcctatcggcaagacagagaagaccggtaaacgtagcacttcagcggcggttttagaagctcttcgcgaagtccatcccattgtggacaagatcttgcagtaccgcgaactcgcgaaattgaaaggcacctatattgaccgtcttccggcattagtccacccgaaaacgggacgcctccatacccgcttcaaccaaacatcgacggcgaccggtcgtttgtcctcctctgatccaaaccttcagaatattccagtacgtaccccattgggccagaagatccgccgtgcgtttgtagctgaggagggttggcgtttagtggccctcgattatcgtcaaattgaattacgtgtccttgcccatctttctggcgatgagaacctcatccgcgtgtttcaggaaggcaaagacattcacactcaaacggcaagctggatgtttggattatcagctgaagcgatcgatcctttgatgcgtcgtgcagcgaagaccatcaatttcggtgttctctacggtatgagtgcctttcgtttgtcgcaggaattaggcattccctatgaagaagctcaggcgttcattcagaaatactttcaaagctatcccaaagttaaagcatggatcgagaagactctccgtgaaggccgcacacgtggttacgtagagaccttatttggacgtcgccgctatgttcccgatttaaacgctcgcgtgaaaggcaagcgtgaagccgccgaacgcatggcgttcaacatgcctgtacagggcacggcagctgacctcatgaaacttgcaatggtgcgcctttttccacaattgcgtgaagttggtgcccgcatgctcttgcaggtccacgatgaactcttgttagaagcgccaaaagagcgtgcggaagaggtggcagccctcgcgaaagaagttatggaaggcgtgtggcccttagcggtgcctcttgaagtcgaagttggtattggcgaggattggctggctgccaaagga

SEQ ID NO: 4508 - protein, 841 aa, synthetic construct
  REGION 1..841: note = Variant of DNA polymerase I from Thermus sp. strain 2.9
MHHHHHHGGSGVLPVFEPKGRVLLVDGHHLAYRNFFALKGLTTSLGEPVQGVYGFAKSLLKALKEDGDVVIVVFDAKAPSFRHEAYEAYKAGRAPTPEDFPRQLALMKELVDLLGLERLEVPGFEADDVLATLAKKAEREGYEVQILTADRDLFQLLSPRISVLHPEGHRITPEWLWEKYGLRPEQWVDFRALAGDPSDNIPGVKGIGEKTALKLLKEWGSLENLLKNLDQVKPESVREKILAHLEDLKLSRELSRVRTDLPLEVDFGRRREPDWEGLKAFLERLEFGSLLHEFGLLESPLLAEEAPWPPPEGAFLGYRLSRPEPMWAELLALAASAQGRVYRAEDPHGALRGLFEVRGLLAKDLAVVALREGLDLPPTDDPMLLAYLLDPSNTTPEGVARRYGGEWTEDAAKRALLAERLHANLLGRLQGEERLLWLYEEVEKPLSRVLAHMEATGVKLDVAYLENLSLEVAAHMRRLEEEVFRLAGRSFRLNSRDQLERVLFDELGLPPIGKTEKTGKRSTSAAVLEALREVHPIVDKILQYRELAKLKGTYIDRLPALVHPKTGRLHTRFNQTSTATGRLSSSDPNLQNIPVRTPLGQKIRRAFVAEEGWRLVALDYRQIELRVLAHLSGDENLIRVFQEGKDIHTQTASWMFGLSAEAIDPLMRRAAKTINFGVLYGMSAFRLSQELGIPYEEAQAFIQKYFQSYPKVKAWIEKTLREGRTRGYVETLFGRRRYVPDLNARVKGKREAAERMAFNMPVQGTAADLMKLAMVRLFPQLREVGARMLLQVHDELLLEAPKERAEEVAALAKEVMEGVWPLAVPLEVEVGIGEDWLAAKG

SEQ ID NO: 4509 - DNA, 2523 bp, synthetic construct
  misc_feature 1..2523: note = Variant of DNA polymerase I from Thermus sp. strain 2.9
  source 1..2523: mol_type = other DNA
atgcaccatcatcatcatcatggcggtagcggcgtgttaccggtgttcgagcctaaaggtcgcgtgcttctggttgatggccatcatctcgcgtatcgtaacttctttgccctgaaaggattaaccaccagcctgggcgagccggtacagggtgtctacggctttgcaaagtcgctcctgaaagctctgaaagaagacggtgatgtggtgattgttgtctttgatgcgaaagcgccaagttttcgccacgaagcgtacgaagcttacaaagccgggcgtgctccaacgccggaagactttcctcgccaattggcgcttatgaaggaattagtggatttgcttggcctcgaacgcttggaagttcccggtttcgaggcagacgacgtattagcgactctcgcaaagaaagccgaacgtgagggctatgaagtccagatcttgacagcagatcgcgatcttttccagcttttatctccgcgcatctcggtgttacacccggaagggcatcgtatcaccccggaatggctctgggagaaatatggtttgcgtcccgaacaatgggtggattttcgcgccttagcaggcgatccgagcgacaatattccgggagttaaaggtatcggcgagaagacggcgctcaagctccttaaagaatgggggtcgttggagaacttgcttaagaatttagatcaggtcaaaccagagtcagtgcgtgagaagattcttgctcacctcgaagacctcaaattaagccgcgaattgtcccgtgtacgcaccgatttgccgctcgaagttgatttcggtcgccgccgcgaacctgactgggagggtcttaaagcgtttttagagcgtcttgaatttggttcgctcttgcatgaattcggccttttagaaagcccgttactggccgaagaagcaccttggccaccgcccgagggcgcgtttttaggttaccgtttgagtcgcccggaaccgatgtgggccgaattactggctcttgcagcgtctgcccagggacgtgtgtatcgcgcggaagaccctcatggtgcgctccgcggcctcttcgaagtccgtggactccttgccaaagacttagctgttgttgcattgcgcgaaggtcttgatttacctccgactgatgatccaatgcttcttgcgtacctcttggacccgtcaaacacgacgcccgaaggcgtagcccgtcgttacggcggcgagtggaccgaagatgcagcgaaacgcgcgttattggccgaacgtttgcacgccaatttattaggacgtttgcaaggcgaggaacgtctcctctggctttacgaagaagtggagaaaccattgagtcgcgtgctcgcgcatatggaagctaccggtgtcaaattagacgtggcgtatttggagaatctcagccttgaagttgctgcccacatgcgccgcttggaggaagaagtattccgtttagcaggccgttccttttatcttaactctcgcgatcagttagaacgtgtgttgttcgatgaacttggtctccctcctatcggcaagacagagaagaccggtaaacgtagcacttcagcggcggttttagaagctcttcgcgaagtccatcccattgtggacaagatcttgcagtaccgcgaactcgcgaaattgaaaggcacctatattgaccgtcttccggcattagtccacccgaaaacgggacgcctccatacccgcttcaaccaaacagccacggcgaccggtcgtttgtcctcctctgatccaaaccttcagaatattccagtacgtaccccattgggccagaagatccgccgtgcgtttgtagctgaggagggttggcgtttagtggccctcgattatcgtcaaattgaattacgtgtccttgcccatctttctggcgatgagaacctcatccgcgtgtttcaggaaggcaaagacattcacactcaaacggcaagctggatgtttggattatcagctgaagcgatcgatcctttgatgcgtcgtgcagcgaagaccatcaatttcggtgttctctacggtatgagtgcctttcgtttgtcgcaggaattaggcattccctatgaagaagctcaggcgttcattcagaaatactttcaaagctatcccaaagttaaagcatggatcgagaagactctccgtgaaggccgcacacgtggttacgtagagaccttatttggacgtcgccgctatgttcccgatttaaacgctcgcgtgaaaggcaagcgtgaagccgccgaacgcatggcgttcaacatgcctgtacagggcacggcagctgacctcatgaaacttgcaatggtgcgcctttttccacaattgcgtgaagttggtgcccgcatgctcttgcaggtccacgatgaactcttgttagaagcgccaaaagagcgtgcggaagaggtggcagccctcgcgaaagaagttatggaaggcgtgtggcccttagcggtgcctcttgaagtcgaagttggtattggcgaggattggctggctgccaaagga

SEQ ID NO: 4510 - protein, 841 aa, synthetic construct
  REGION 1..841: note = Variant of DNA polymerase I from Thermus sp. strain 2.9
MHHHHHHGGSGVLPVFEPKGRVLLVDGHHLAYRNFFALKGLTTSLGEPVQGVYGFAKSLLKALKEDGDVVIVVFDAKAPSFRHEAYEAYKAGRAPTPEDFPRQLALMKELVDLLGLERLEVPGFEADDVLATLAKKAEREGYEVQILTADRDLFQLLSPRISVLHPEGHRITPEWLWEKYGLRPEQWVDFRALAGDPSDNIPGVKGIGEKTALKLLKEWGSLENLLKNLDQVKPESVREKILAHLEDLKLSRELSRVRTDLPLEVDFGRRREPDWEGLKAFLERLEFGSLLHEFGLLESPLLAEEAPWPPPEGAFLGYRLSRPEPMWAELLALAASAQGRVYRAEDPHGALRGLFEVRGLLAKDLAVVALREGLDLPPTDDPMLLAYLLDPSNTTPEGVARRYGGEWTEDAAKRALLAERLHANLLGRLQGEERLLWLYEEVEKPLSRVLAHMEATGVKLDVAYLENLSLEVAAHMRRLEEEVFRLAGRSFYLNSRDQLERVLFDELGLPPIGKTEKTGKRSTSAAVLEALREVHPIVDKILQYRELAKLKGTYIDRLPALVHPKTGRLHTRFNQTATATGRLSSSDPNLQNIPVRTPLGQKIRRAFVAEEGWRLVALDYRQIELRVLAHLSGDENLIRVFQEGKDIHTQTASWMFGLSAEAIDPLMRRAAKTINFGVLYGMSAFRLSQELGIPYEEAQAFIQKYFQSYPKVKAWIEKTLREGRTRGYVETLFGRRRYVPDLNARVKGKREAAERMAFNMPVQGTAADLMKLAMVRLFPQLREVGARMLLQVHDELLLEAPKERAEEVAALAKEVMEGVWPLAVPLEVEVGIGEDWLAAKG

SEQ ID NO: 4511 - DNA, 2523 bp, synthetic construct
  misc_feature 1..2523: note = Variant of DNA polymerase I from Thermus sp. strain 2.9
  source 1..2523: mol_type = other DNA
atgcaccatcatcatcatcatggcggtagcggcgtgttaccggtgttcgagcctaaaggtcgcgtgcttctggttgatggccatcatctcgcgtatcgtaacttctttgccctgaaaggattaaccaccagcctgggcgagccggtacagggtgtctacggctttgcaaagtcgctcctgaaagctctgaaagaagacggtgatgtggtgattgttgtctttgatgcgaaagcgccaagttttcgccacgaagcgtacgaagcttacaaagccgggcgtgctccaacgccggaagactttcctcgccaattggcgcttatgaaggaattagtggatttgcttggcctcgaacgcttggaagttcccggtttcgaggcagacgacgtattagcgactctcgcaaagaaagccgaacgtgagggctatgaagtccagatcttgacacctgatcgcgatcttttccagcttttatctccgcgcatctcggtgttacacccggaagggcatcgtatcaccccggaatggctctgggagaaatatggtttgcgtcccgaacaatgggtggattttcgcgccttagcaggcgatccgagcgacaatattccgggagttaaaggtatcggcgagaagacggcgctcaagctccttaaagaatgggggtcgttggagaacttgcttaagaatttagatcaggtcaaaccagagtcagtgcgtgagaagattcttgctcacctcgaagacctcaaattaagccgcgaattgtcccgtgtacgcaccgatttgccgctcgaagttgatttcggtcgccgccgcgaacctgactgggagggtcttaaagcgtttttagagcgtcttgaatttggttcgctcttgcatgaattcggccttttagaaagcccgttactggccgaagaagcaccttggccaccgcccgagggcgcgtttttaggttaccgtttgagtcgcccggaaccgatgtgggccgaattactggctcttgcagcgtctgcccagggacgtgtgtatcgcgcggaagaccctcatggtgcgctccgcggcctcttcgaagtccgtggactccttgccaaagacttagctgttgttgcattgcgcgaaggtcttgatttacctccgactgatgatccaatgcttcttgcgtacctcttggacccgtcaaacacgacgcccgaaggcgtagcccgtcgttacggcggcgagtggaccgaagatgcagcgaaacgcgcgttattggccgaacgtttgcacgccaatttattaggacgtttgcaaggcgaggaacgtctcctctggctttacgaagaagtggagaaaccattgagtcgcgtgctcgcgcatatggaagctaccggtgtcaaattagacgtggcgtatttggagaatctcagccttgaagttgctgcccacatgcgccgcttggaggaagaagtattccgtttagcaggccgttcctttcgccttaactctcgcgatcagttagaacgtgtgttgttcgatgaacttggtctccctcctatcggcaagacagagaagaccggtaaacgtagcacttcagcggcggttttagaagctcttcgcgaagtccatcccattgtggacaagatcttgcagtaccgcgaactcgcgaaattgaaaggcacctatattgaccgtcttccggcattagtccacccgaaaacgggacgcctccatacccgcttcaaccaaacagccacggcgaccggtcgtttgtcctcctctgatccaaaccttcagaatattccagtacgtaccccattgggccagaagatccgccgtgcgtttgtagctgaggagggttggcgtttagtggccctcgattatcgtcaaattgaattacgtgtccttgcccatctttctggcgatgagaacctcatccgcgtgtttcaggaaggcaaagacattcacactcaaacggcaagctggatgtttggattatcagctgaagcgatcgatcctttgatgcgtcgtgcagcgaagaccatcaatttcggtgttctctacggtatgagtgcctttcgtttgtcgcaggaattaggcattccctatgaagaagctcaggcgttcattcagaaatactttcaaagctatcccaaagttaaagcatggatcgagaagactctccgtgaaggccgcacacgtggttacgtagagaccttatttggacgtcgccgctatgttcccgatttaaacgctcgcgtgaaaggcaagcgtgaagccgccgaacgcatggcgttcaacatgcctgtacagggcacggcagctgacctcatgaaacttgcaatggtgcgcctttttccacaattgcgtgaagttggtgcccgcatgctcttgcaggtccacgatgaactcttgttagaagcgccaaaagagcgtgcggaagaggtggcagccctcgcgaaagaagttatggaaggcgtgtggcccttagcggtgcctcttgaagtcgaagttggtattggcgaggattggctggctgccaaagga

SEQ ID NO: 4512 - protein, 841 aa, synthetic construct
  REGION 1..841: note = Variant of DNA polymerase I from Thermus sp. strain 2.9
MHHHHHHGGSGVLPVFEPKGRVLLVDGHHLAYRNFFALKGLTTSLGEPVQGVYGFAKSLLKALKEDGDVVIVVFDAKAPSFRHEAYEAYKAGRAPTPEDFPRQLALMKELVDLLGLERLEVPGFEADDVLATLAKKAEREGYEVQILTPDRDLFQLLSPRISVLHPEGHRITPEWLWEKYGLRPEQWVDFRALAGDPSDNIPGVKGIGEKTALKLLKEWGSLENLLKNLDQVKPESVREKILAHLEDLKLSRELSRVRTDLPLEVDFGRRREPDWEGLKAFLERLEFGSLLHEFGLLESPLLAEEAPWPPPEGAFLGYRLSRPEPMWAELLALAASAQGRVYRAEDPHGALRGLFEVRGLLAKDLAVVALREGLDLPPTDDPMLLAYLLDPSNTTPEGVARRYGGEWTEDAAKRALLAERLHANLLGRLQGEERLLWLYEEVEKPLSRVLAHMEATGVKLDVAYLENLSLEVAAHMRRLEEEVFRLAGRSFRLNSRDQLERVLFDELGLPPIGKTEKTGKRSTSAAVLEALREVHPIVDKILQYRELAKLKGTYIDRLPALVHPKTGRLHTRFNQTATATGRLSSSDPNLQNIPVRTPLGQKIRRAFVAEEGWRLVALDYRQIELRVLAHLSGDENLIRVFQEGKDIHTQTASWMFGLSAEAIDPLMRRAAKTINFGVLYGMSAFRLSQELGIPYEEAQAFIQKYFQSYPKVKAWIEKTLREGRTRGYVETLFGRRRYVPDLNARVKGKREAAERMAFNMPVQGTAADLMKLAMVRLFPQLREVGARMLLQVHDELLLEAPKERAEEVAALAKEVMEGVWPLAVPLEVEVGIGEDWLAAKG

SEQ ID NO: 4513 - DNA, 2523 bp, synthetic construct
  misc_feature 1..2523: note = Variant of DNA polymerase I from Thermus sp. strain 2.9
  source 1..2523: mol_type = other DNA
atgcaccatcatcatcatcatggcggtagcggcgtgttaccggtgttcgagcctaaaggtcgcgtgcttctggttgatggccatcatctcgcgtatcgtaacttctttgccctgaaaggattaaccaccagcctgggcgagccggtacagggtgtctacggctttgcaaagtcgctcctgaaagctctgaaagaagacggtgatgtggtgattgttgtctttgatgcgaaagcgccaagttttcgccacgaagcgtacgaagcttacaaagccgggcgtgctccaacgccggaagactttcctcgccaattggcgcttatgaaggaattagtggatttgcttggcctcgaacgcttggaagttcccggtttcgaggcagacgacgtattagcgactctcgcaaagaaagccgaacgtgagggctatgaagtccagatcttgacagcagatcgcgatcttttccagcttttatctccgcgcatctcggtgttacacccggaagggcatcgtatcaccccggaatggctctgggagaaatatggtttgcgtcccgaacaatgggtggattttcgcgccttagcaggcgatccgagcgacaatattccgggagttaaaggtatcggcgagaagacggcgctcaagctccttaaagaatgggggtcgttggagaacttgcttaagaatttagatcaggtcaaaccagagtcagtgcgtgagaagattcttgctcacctcgaagacctcaaattaagccgcgaattgtcccgtgtacgcaccgatttgccgctcgaagttgatttcggtcgccgccgcgaacctgactgggagggtcttaaagcgtttttagagcgtcttgaatttggttcgctcttgcatgaattcggccttttagaaagcccgttactggccgaagaagcaccttggccaccgcccgagggcgcgtttttaggttaccgtttgagtcgctgggaaccgatgtgggccgaattactggctcttgcagcgtctgcccagggacgtgtgtatcgcgcggaagaccctcatggtgcgctccgcggcctcttcgaagtccgtggactccttgccaaagacttagctgttgttgcattgcgcgaaggtcttgatttacctccgactgatgatccaatgcttcttgcgtacctcttggacccgtcaaacacgacgcccgaaggcgtagcccgtcgttacggcggcgagtggaccgaagatgcagcgaaacgcgcgttattggccgaacgtttgcacgccaatttattaggacgtttgcaaggcgaggaacgtctcctctggctttacgaagaagtggagaaaccattgagtcgcgtgctcgcgcatatggaagctaccggtgtcaaattagacgtggcgtatttggagaatctcagccttgaagttgctgcccacatgcgccgcttggaggaagaagtattccgtttagcaggccgttcctttcgccttaactctcgcgatcagttagaacgtgtgttgttcgatgaacttggtctccctcctatcggcaagacagagaagaccggtaaacgtagcacttcagcggcggttttagaagctcttcgcgaagtccatcccattgtggacaagatcttgcagtaccgcgaactcgcgaaattgaaaggcacctatattgaccgtcttccggcattagtccacccgaaaacgggacgcctccatacccgcttcaaccaaacagccacggcgaccggtcgtttgtcctcctctgatccaaaccttcagaatattccagtacgtaccccattgggccagaagatccgccgtgcgtttgtagctgaggagggttggcgtttagtggccctcgattatcgtcaaattgaattacgtgtccttgcccatctttctggcgatgagaacctcatccgcgtgtttcaggaaggcaaagacattcacactcaaacggcaagctggatgtttggattatcagctgaagcgatcgatcctttgatgcgtcgtgcagcgaagaccatcaatttcggtgttctctacggtatgagtgcctttcgtttgtcgcaggaattaggcattccctatgaagaagctcaggcgttcattcagaaatactttcaaagctatcccaaagttaaagcatggatcgagaagactctccgtgaaggccgcacacgtggttacgtagagaccttatttggacgtcgccgctatgttcccgatttaaacgctcgcgtgaaaggcaagcgtgaagccgccgaacgcatggcgttcaacatgcctgtacagggcacggcagctgacctcatgaaacttgcaatggtgcgcctttttccacaattgcgtgaagttggtgcccgcatgctcttgcaggtccacgatgaactcttgttagaagcgccaaaagagcgtgcggaagaggtggcagccctcgcgaaagaagttatggaaggcgtgtggcccttagcggtgcctcttgaagtcgaagttggtattggcgaggattggctggctgccaaagga

SEQ ID NO: 4514 - protein, 841 aa, synthetic construct
  REGION 1..841: note = Variant of DNA polymerase I from Thermus sp. strain 2.9
MHHHHHHGGSGVLPVFEPKGRVLLVDGHHLAYRNFFALKGLTTSLGEPVQGVYGFAKSLLKALKEDGDVVIVVFDAKAPSFRHEAYEAYKAGRAPTPEDFPRQLALMKELVDLLGLERLEVPGFEADDVLATLAKKAEREGYEVQILTADRDLFQLLSPRISVLHPEGHRITPEWLWEKYGLRPEQWVDFRALAGDPSDNIPGVKGIGEKTALKLLKEWGSLENLLKNLDQVKPESVREKILAHLEDLKLSRELSRVRTDLPLEVDFGRRREPDWEGLKAFLERLEFGSLLHEFGLLESPLLAEEAPWPPPEGAFLGYRLSRWEPMWAELLALAASAQGRVYRAEDPHGALRGLFEVRGLLAKDLAVVALREGLDLPPTDDPMLLAYLLDPSNTTPEGVARRYGGEWTEDAAKRALLAERLHANLLGRLQGEERLLWLYEEVEKPLSRVLAHMEATGVKLDVAYLENLSLEVAAHMRRLEEEVFRLAGRSFRLNSRDQLERVLFDELGLPPIGKTEKTGKRSTSAAVLEALREVHPIVDKILQYRELAKLKGTYIDRLPALVHPKTGRLHTRFNQTATATGRLSSSDPNLQNIPVRTPLGQKIRRAFVAEEGWRLVALDYRQIELRVLAHLSGDENLIRVFQEGKDIHTQTASWMFGLSAEAIDPLMRRAAKTINFGVLYGMSAFRLSQELGIPYEEAQAFIQKYFQSYPKVKAWIEKTLREGRTRGYVETLFGRRRYVPDLNARVKGKREAAERMAFNMPVQGTAADLMKLAMVRLFPQLREVGARMLLQVHDELLLEAPKERAEEVAALAKEVMEGVWPLAVPLEVEVGIGEDWLAAKG

SEQ ID NO: 4515 - DNA, 2523 bp, synthetic construct
  misc_feature 1..2523: note = Variant of DNA polymerase I from Thermus sp. strain 2.9
  source 1..2523: mol_type = other DNA
atgcaccatcatcatcatcatggcggtagcggcgtgttaccggtgttcgagcctaaaggtcgcgtgcttctggttgatggccatcatctcgcgtatcgtaacttctttgccctgaaaggattaaccaccagcctgggcgagccggtacagggtgtctacggctttgcaaagtcgctcctgaaagctctgaaagaagacggtgatgtggtgattgttgtctttgatgcgaaagcgccaagttttcgccacgaagcgtacgaagcttacaaagccgggcgtgctccaacgccggaagactttcctcgccaattggcgcttatgaaggaattagtggatttgcttggcctcgaacgcttggaagttcccggtttcgaggcagacgacgtattagcgactctcgcaaagaaagccgaacgtgagggctatgaagtccagatcttgacagcagatcgcgatcttttccagcttttatctccgcgcatctcggtgttacacccggaagggcatcgtatcaccccggaatggctctgggagaaatatggtttgcgtcccgaacaatgggtggattttcgcgccttagcaggcgatccgagcgacaatattccgggagttaaaggtatcggcgagaagacggcgctcaagctccttaaagaatgggggtcgttggagaacttgcttaagaatttagatcaggtcaaaccagagtcagtgcgtgagaagattcttgctcacctcgaagacctcaaattaagccgcgaattgtcccgtgtacgcaccgatttgccgctcgaagttgatttcggtcgccgccgcgaacctgactgggagggtcttaaagcgtttttagagcgtcttgaatttggttcgctcttgcatgaattcggccttttagaaagcccgttactggccgaagaagcaccttggccaccgcccgagggcgcgtttttaggttaccgtttgagtcgcccggaaccgatgtgggccgaattactggctcttgcagcgtctgcccagggacgtgtgtatcgcgcggaagaccctcatggtgcgctccgcggcctcttcgaagtccgtggactccttgccaaagacttagctgttgttgcattgcgcgaaggtcttgatttacctccgactgatgatccaatgcttcttgcgtacctcttggacccgtcaaacacgacgcccgaaggcgtagcccgtcgttacggcggcgagtggaccgaagatgcagcgaaacgcgcgttattggccgaacgtttgcacgccaatttattaggacgtttgcaaggcgaggaacgtctcctctggctttacgaagaagtggagaaaccattgagtcgcgtgctcgcgcatatggaagctaccggtgtcaaattagacgtggcgtatttggagaatctcagccttgaagttgctgcccacatgcgccgcttggaggaagaagtattccgtttagcaggccgttcctttcgccttaactctcgcgatcagttagaacgtgtgttgttcgatgaacttggtctccctcctatcggcaagacagagaagaccggtaaacgtagcacttcagcggcggttttagaagctcttcgcgaagtccatcccattgtggacaagatcttgcagtaccgcgaactcgcgaaattgaaaggcacctatattgaccgtcttccggcattagtccacccgaaaacgggacgcctccatacccgcttcaaccaaacagccacggcgaccggtcgtttgtcctcctctgatccaaaccttcagaatattccagtacgtaccccattgggccagaagatccgccgtgcgtttgtagctgaggagggttggcgtttagtggccctcgattatcgtcaaattgaattacgtgtccttgcccatctttctggcgatgagaacctcatccgcgtgtttcaggaaggcaaagacattcacactcaaacggcaagctggatgtttggattatcagctgaagcgatcgatcctttgatgcgtcgtgcagcgaagaccatcaatttcggtgttctctacggtatgagtgcctttcgtttgtcgcaggaattaggcattccctatgaagaagctcaggcgttcattcagaaatactttcaaagctatcccaaagttaaagcatggatcgagaagactctccgtgaaggccgcacacgtggttttgtagagaccttatttggacgtcgccgctatgttcccgatttaaacgctcgcgtgaaaggcaagcgtgaagccgccgaacgcatggcgttcaacatgcctgtacagggcacggcagctgacctcatgaaacttgcaatggtgcgcctttttccacaattgcgtgaagttggtgcccgcatgctcttgcaggtccacgatgaactcttgttagaagcgccaaaagagcgtgcggaagaggtggcagccctcgcgaaagaagttatggaaggcgtgtggcccttagcggtgcctcttgaagtcgaagttggtattggcgaggattggctggctgccaaagga

SEQ ID NO: 4516 - protein, 841 aa, synthetic construct
  REGION 1..841: note = Variant of DNA polymerase I from Thermus sp. strain 2.9
MHHHHHHGGSGVLPVFEPKGRVLLVDGHHLAYRNFFALKGLTTSLGEPVQGVYGFAKSLLKALKEDGDVVIVVFDAKAPSFRHEAYEAYKAGRAPTPEDFPRQLALMKELVDLLGLERLEVPGFEADDVLATLAKKAEREGYEVQILTADRDLFQLLSPRISVLHPEGHRITPEWLWEKYGLRPEQWVDFRALAGDPSDNIPGVKGIGEKTALKLLKEWGSLENLLKNLDQVKPESVREKILAHLEDLKLSRELSRVRTDLPLEVDFGRRREPDWEGLKAFLERLEFGSLLHEFGLLESPLLAEEAPWPPPEGAFLGYRLSRPEPMWAELLALAASAQGRVYRAEDPHGALRGLFEVRGLLAKDLAVVALREGLDLPPTDDPMLLAYLLDPSNTTPEGVARRYGGEWTEDAAKRALLAERLHANLLGRLQGEERLLWLYEEVEKPLSRVLAHMEATGVKLDVAYLENLSLEVAAHMRRLEEEVFRLAGRSFRLNSRDQLERVLFDELGLPPIGKTEKTGKRSTSAAVLEALREVHPIVDKILQYRELAKLKGTYIDRLPALVHPKTGRLHTRFNQTATATGRLSSSDPNLQNIPVRTPLGQKIRRAFVAEEGWRLVALDYRQIELRVLAHLSGDENLIRVFQEGKDIHTQTASWMFGLSAEAIDPLMRRAAKTINFGVLYGMSAFRLSQELGIPYEEAQAFIQKYFQSYPKVKAWIEKTLREGRTRGFVETLFGRRRYVPDLNARVKGKREAAERMAFNMPVQGTAADLMKLAMVRLFPQLREVGARMLLQVHDELLLEAPKERAEEVAALAKEVMEGVWPLAVPLEVEVGIGEDWLAAKG

SEQ ID NO: 4517 - DNA, 2523 bp, synthetic construct
  misc_feature 1..2523: note = Variant of DNA polymerase I from Thermus sp. strain 2.9
  source 1..2523: mol_type = other DNA
atgcaccatcatcatcatcatggcggtagcggcgtgttaccggtgttcgagcctaaaggtcgcgtgcttctggttgatggccatcatctcgcgtatcgtaacttctttgccctgaaaggattaaccaccagcctgggcgagccggtacagggtgtctacggctttgcaaagtcgctcctgaaagctctgaaagaagacggtgatgtggtgattgttgtctttgatgcgaaagcgccaagttttcgccacgaagcgtacgaagcttacaaagccgggcgtgctccaacgccggaagactttcctcgccaattggcgcttatgaaggaattagtggatttgcttggcctcgaacgcttggaagttcccggtttcgaggcagacgacgtattagcgactctcgcaaagaaagccgaacgtgagggctatgaagtccagatcttgacagcagatcgcgatcttttccagcttttatctccgcgcatctcggtgttacacccggaagggcatcgtatcaccccggaatggctctgggagaaatatggtttgcgtcccgaacaatgggtggattttcgcgccttagcaggcgatccgagcgacaatattccgggagttaaaggtatcggcgagaagacggcgctcaagctccttaaagaatgggggtcgttggagaacttgcttaagaatttagatcaggtcaaaccagagtcagtgcgtgagaagattcttgctcacctcgaagacctcaaattaagccgcgaattgtcccgtgtacgcaccgatttgccgctcgaagttgatttcggtcgccgccgcgaacctgactgggagggtcttaaagcgtttttagagcgtcttgaatttggttcgctcttgcatgaattcggccttttagaaagcccgttactggccgaagaagcaccttggccaccgcccgagggcgcgtttttaggttaccgtttgagtcgcccggaaccgatgtgggccgaattactggctcttgcagcgtctgcccagggacgtgtgtatcgcgcggaagaccctcatggtgcgctccgcggcctcttcgaagtccgtggactccttgccaaagacttagctgttgttgcattgcgcgaaggtcttgatttacctccgactgatgatccaatgcttcttgcgtacctcttggacccgtcaaacacgacgcccgaaggcgtagcccgtcgttacggcggcgagtggaccgaagatgcagcgaaacgcgcgttattggccgaacgtttgcacgccaatttattaggacgtttgcaaggcgaggaacgtctcctctggctttacgaagaagtggagaaaccattgagtcgcgtgctcgcgcatatggaatcgaccggtgtcaaattagacgtggcgtatttggagaatctcagccttgaagttgctgcccacatgcgccgcttggaggaagaagtattccgtttagcaggccgttcctttcgccttaactctcgcgatcagttagaacgtgtgttgttcgatgaacttggtctccctcctatcggcaagacagagaagaccggtaaacgtagcacttcagcggcggttttagaagctcttcgcgaagtccatcccattgtggacaagatcttgcagtaccgcgaactcgcgaaattgaaaggcacctatattgaccgtcttccggcattagtccacccgaaaacgggacgcctccatacccgcttcaaccaaacagccacggcgaccggtcgtttgtcctcctctgatccaaaccttcagaatattccagtacgtaccccattgggccagaagatccgccgtgcgtttgtagctgaggagggttggcgtttagtggccctcgattatcgtcaaattgaattacgtgtccttgcccatctttctggcgatgagaacctcatccgcgtgtttcaggaaggcaaagacattcacactcaaacggcaagctggatgtttggattatcagctgaagcgatcgatcctttgatgcgtcgtgcagcgaagaccatcaatttcggtgttctctacggtatgagtgcctttcgtttgtcgcaggaattaggcattccctatgaagaagctcaggcgttcattcagaaatactttcaaagctatcccaaagttaaagcatggatcgagaagactctccgtgaaggccgcacacgtggttacgtagagaccttatttggacgtcgccgctatgttcccgatttaaacgctcgcgtgaaaggcaagcgtgaagccgccgaacgcatggcgttcaacatgcctgtacagggcacggcagctgacctcatgaaacttgcaatggtgcgcctttttccacaattgcgtgaagttggtgcccgcatgctcttgcaggtccacgatgaactcttgttagaagcgccaaaagagcgtgcggaagaggtggcagccctcgcgaaagaagttatggaaggcgtgtggcccttagcggtgcctcttgaagtcgaagttggtattggcgaggattggctggctgccaaagga

SEQ ID NO: 4518 - protein, 841 aa, synthetic construct
  REGION 1..841: note = Variant of DNA polymerase I from Thermus sp. strain 2.9
MHHHHHHGGSGVLPVFEPKGRVLLVDGHHLAYRNFFALKGLTTSLGEPVQGVYGFAKSLLKALKEDGDVVIVVFDAKAPSFRHEAYEAYKAGRAPTPEDFPRQLALMKELVDLLGLERLEVPGFEADDVLATLAKKAEREGYEVQILTADRDLFQLLSPRISVLHPEGHRITPEWLWEKYGLRPEQWVDFRALAGDPSDNIPGVKGIGEKTALKLLKEWGSLENLLKNLDQVKPESVREKILAHLEDLKLSRELSRVRTDLPLEVDFGRRREPDWEGLKAFLERLEFGSLLHEFGLLESPLLAEEAPWPPPEGAFLGYRLSRPEPMWAELLALAASAQGRVYRAEDPHGALRGLFEVRGLLAKDLAVVALREGLDLPPTDDPMLLAYLLDPSNTTPEGVARRYGGEWTEDAAKRALLAERLHANLLGRLQGEERLLWLYEEVEKPLSRVLAHMESTGVKLDVAYLENLSLEVAAHMRRLEEEVFRLAGRSFRLNSRDQLERVLFDELGLPPIGKTEKTGKRSTSAAVLEALREVHPIVDKILQYRELAKLKGTYIDRLPALVHPKTGRLHTRFNQTATATGRLSSSDPNLQNIPVRTPLGQKIRRAFVAEEGWRLVALDYRQIELRVLAHLSGDENLIRVFQEGKDIHTQTASWMFGLSAEAIDPLMRRAAKTINFGVLYGMSAFRLSQELGIPYEEAQAFIQKYFQSYPKVKAWIEKTLREGRTRGYVETLFGRRRYVPDLNARVKGKREAAERMAFNMPVQGTAADLMKLAMVRLFPQLREVGARMLLQVHDELLLEAPKERAEEVAALAKEVMEGVWPLAVPLEVEVGIGEDWLAAKG

SEQ ID NO: 4519 - DNA, 2523 bp, synthetic construct
  misc_feature 1..2523: note = Variant of DNA polymerase I from Thermus sp. strain 2.9
  source 1..2523: mol_type = other DNA
atgcaccatcatcatcatcatggcggtagcggcgtgttaccggtgttcgagcctaaaggtcgcgtgcttctggttgatggccatcatctcgcgtatcgtaacttctttgccctgaaaggattaaccaccagcctgggcgagccggtacagggtgtctacggctttgcaaagtcgctcctgaaagctctgaaagaagacggtgatgtggtgattgttgtctttgatgcgaaagcgccaagttttcgccacgaagcgtacgaagcttacaaagccgggcgtgctccaacgccggaagactttcctcgccaattggcgcttatgaaggaattagtggatttgcttggcctcgaacgcttggaagttcccggtttcgaggcagacgacgtattagcgactctcgcaaagaaagccgaacgtgagggctatgaagtccagatcttgacagcagatcgcgatcttttccagcttttatctccgcgcatctcggtgttacacccggaagggcatcgtatcaccccggaatggctctgggagaaatatggtttgcgtcccgaacaatgggtggattttcgcgccttagcaggcgatccgagcgacaatattccgggagttaaaggtatcggcgagaagacggcgctcaagctccttaaagaatgggggtcgttggagaacttgcttaagaatttagatcaggtcaaaccagagtcagtgcgtgagaagattcttgctcacctcgaagacctcaaattaagccgcgaattgtcccgtgtacgcaccgatttgccgctcgaagttgatttcggtcgccgccgcgaacctgactgggagggtcttaaagcgtttttagagcgtcttgaatttggttcgctcttgcatgaattcggccttttagaaagcccgttactggccgaagaagcaccttggccaccgcccgagggcgcgtttttaggttaccgtttgagtcgcccggaaccgatgtgggccgaattactggctcttgcagcgtctgcccagggacgtgtgtatcgcgcggaagaccctcatggtgcgctccgcggcctcttcgaagtccgtggactccttgccaaagacttagctgttgttgcattgcgcgaaggtcttgatttacctccgactgatgatccaatgcttcttgcgtacctcttggacccgtcaaacacgacgcccgaaggcgtagcccgtcgttacggcggcgagtggaccgaagatgcagcgaaacgcgcgttattggccgaacgtttgcacgccaatttattaggacgtttgcaaggcgaggaacgtctcctctggctttacgaagaagtggagaaaccattgagtcgcgtgctcgcgcatatggaagctaccggtgtcaaattagacgtggcgtatttggagaatctcagccttgaaagtgctgcccacatgcgccgcttggaggaagaagtattccgtttagcaggccgttcctttcgccttaactctcgcgatcagttagaacgtgtgttgttcgatgaacttggtctccctcctatcggcaagacagagaagaccggtaaacgtagcacttcagcggcggttttagaagctcttcgcgaagtccatcccattgtggacaagatcttgcagtaccgcgaactcgcgaaattgaaaggcacctatattgaccgtcttccggcattagtccacccgaaaacgggacgcctccatacccgcttcaaccaaacagccacggcgaccggtcgtttgtcctcctctgatccaaaccttcagaatattccagtacgtaccccattgggccagaagatccgccgtgcgtttgtagctgaggagggttggcgtttagtggccctcgattatcgtcaaattgaattacgtgtccttgcccatctttctggcgatgagaacctcatccgcgtgtttcaggaaggcaaagacattcacactcaaacggcaagctggatgtttggattatcagctgaagcgatcgatcctttgatgcgtcgtgcagcgaagaccatcaatttcggtgttctctacggtatgagtgcctttcgtttgtcgcaggaattaggcattccctatgaagaagctcaggcgttcattcagaaatactttcaaagctatcccaaagttaaagcatggatcgagaagactctccgtgaaggccgcacacgtggttacgtagagaccttatttggacgtcgccgctatgttcccgatttaaacgctcgcgtgaaaggcaagcgtgaagccgccgaacgcatggcgttcaacatgcctgtacagggcacggcagctgacctcatgaaacttgcaatggtgcgcctttttccacaattgcgtgaagttggtgcccgcatgctcttgcaggtccacgatgaactcttgttagaagcgccaaaagagcgtgcggaagaggtggcagccctcgcgaaagaagttatggaaggcgtgtggcccttagcggtgcctcttgaagtcgaagttggtattggcgaggattggctggctgccaaagga

SEQ ID NO: 4520 - protein, 841 aa, synthetic construct
  REGION 1..841: note = Variant of DNA polymerase I from Thermus sp. strain 2.9
MHHHHHHGGSGVLPVFEPKGRVLLVDGHHLAYRNFFALKGLTTSLGEPVQGVYGFAKSLLKALKEDGDVVIVVFDAKAPSFRHEAYEAYKAGRAPTPEDFPRQLALMKELVDLLGLERLEVPGFEADDVLATLAKKAEREGYEVQILTADRDLFQLLSPRISVLHPEGHRITPEWLWEKYGLRPEQWVDFRALAGDPSDNIPGVKGIGEKTALKLLKEWGSLENLLKNLDQVKPESVREKILAHLEDLKLSRELSRVRTDLPLEVDFGRRREPDWEGLKAFLERLEFGSLLHEFGLLESPLLAEEAPWPPPEGAFLGYRLSRPEPMWAELLALAASAQGRVYRAEDPHGALRGLFEVRGLLAKDLAVVALREGLDLPPTDDPMLLAYLLDPSNTTPEGVARRYGGEWTEDAAKRALLAERLHANLLGRLQGEERLLWLYEEVEKPLSRVLAHMEATGVKLDVAYLENLSLESAAHMRRLEEEVFRLAGRSFRLNSRDQLERVLFDELGLPPIGKTEKTGKRSTSAAVLEALREVHPIVDKILQYRELAKLKGTYIDRLPALVHPKTGRLHTRFNQTATATGRLSSSDPNLQNIPVRTPLGQKIRRAFVAEEGWRLVALDYRQIELRVLAHLSGDENLIRVFQEGKDIHTQTASWMFGLSAEAIDPLMRRAAKTINFGVLYGMSAFRLSQELGIPYEEAQAFIQKYFQSYPKVKAWIEKTLREGRTRGYVETLFGRRRYVPDLNARVKGKREAAERMAFNMPVQGTAADLMKLAMVRLFPQLREVGARMLLQVHDELLLEAPKERAEEVAALAKEVMEGVWPLAVPLEVEVGIGEDWLAAKG

SEQ ID NO: 4521 - DNA, 2523 bp, synthetic construct
  misc_feature 1..2523: note = Variant of DNA polymerase I from Thermus sp. strain 2.9
  source 1..2523: mol_type = other DNA
atgcaccatcatcatcatcatggcggtagcggcgtgttaccggtgttcgagcctaaaggtcgcgtgcttctggttgatggccatcatctcgcgtatcgtaacttctttgccctgaaaggattaaccaccagcctgggcgagccggtacagggtgtctacggctttgcaaagtcgctcctgaaagctctgaaagaagacggtgatgtggtgattgttgtctttgatgcgaaagcgccaagttttcgccacgaagcgtacgaagcttacaaagccgggcgtgctccaacgccggaagactttcctcgccaattggcgcttatgaaggaattagtggatttgcttggcctcgaacgcttggaagttcccggtttcgaggcagacgacgtattagcgactctcgcaaagaaagccgaacgtgagggctatgaagtccagatcttgacagcagatcgcgatcttttccagcttttatctccgcgcatctcggtgttacacccggaagggcatcgtatcaccccggaatggctctgggagaaatatggtttgcgtcccgaacaatgggtggattttcgcgccttagcaggcgatccgagcgacaatattccgggagttaaaggtatcggcgagaagacggcgctcaagctccttaaagaatgggggtcgttggagaacttgcttaagaatttagatcaggtcaaaccagagtcagtgcgtgagaagattcttgctcacctcgaagacctcaaattaagccgcgaattgtcccgtgtacgcaccgatttgccgctcgaagttgatttcggtcgccgccgcgaacctgactgggagggtcttaaagcgtttttagagcgtcttgaatttggttcgctcttgcatgaattcggccttttagaaagcccgttactggccgaagaagcaccttggccaccgcccgagggcgcgtttttaggttaccgtttgagtcgcccggaaccgatgtgggccgaattactggctcttgcagcgtctgcccagggacgtgtgtatcgcgcggaagaccctcatggtgcgctccgcggcctcttcgaagtccgtggactccttgccaaagacttagctgttgttgcattgcgcgaaggtcttgatttacctccgactgatgatccaatgcttcttgcgtacctcttggacccgtcaaacacgacgcccgaaggcgtagcccgtcgttacggcggcgagtggaccgaagatgcagcgaaacgcgcgttattggccgaacgtttgcacgccaatttattaggacgtttgaggggcgaggaacgtctcctctggctttacgaagaagtggagaaaccattgagtcgcgtgctcgcgcatatggaagctaccggtgtcaaattagacgtggcgtatttggagaatctcagccttgaagttgctgcccacatgcgccgcttggaggaagaagtattccgtttagcaggccgttcctttcgccttaactctcgcgatcagttagaacgtgtgttgttcgatgaacttggtctccctcctatcggcaagacagagaagaccggtaaacgtagcacttcagcggcggttttagaagctcttcgcgaagtccatcccattgtggacaagatcttgcagtaccgcgaactcgcgaaattgaaaggcacctatattgaccgtcttccggcattagtccacccgaaaacgggacgcctccatacccgcttcaaccaaacagccacggcgaccggtcgtttgtcctcctctgatccaaaccttcagaatattccagtacgtaccccattgggccagaagatccgccgtgcgtttgtagctgaggagggttggcgtttagtggccctcgattatcgtcaaattgaattacgtgtccttgcccatctttctggcgatgagaacctcatccgcgtgtttcaggaaggcaaagacattcacactcaaacggcaagctggatgtttggattatcagctgaagcgatcgatcctttgatgcgtcgtgcagcgaagaccatcaatttcggtgttctctacggtatgagtgcctttcgtttgtcgcaggaattaggcattccctatgaagaagctcaggcgttcattcagaaatactttcaaagctatcccaaagttaaagcatggatcgagaagactctccgtgaaggccgcacacgtggttacgtagagaccttatttggacgtcgccgctatgttcccgatttaaacgctcgcgtgaaaggcaagcgtgaagccgccgaacgcatggcgttcaacatgcctgtacagggcacggcagctgacctcatgaaacttgcaatggtgcgcctttttccacaattgcgtgaagttggtgcccgcatgctcttgcaggtccacgatgaactcttgttagaagcgccaaaagagcgtgcggaagaggtggcagccctcgcgaaagaagttatggaaggcgtgtggcccttagcggtgcctcttgaagtcgaagttggtattggcgaggattggctggctgccaaagga

SEQ ID NO: 4522 - protein, 841 aa, synthetic construct
  REGION 1..841: note = Variant of DNA polymerase I from Thermus sp. strain 2.9
MHHHHHHGGSGVLPVFEPKGRVLLVDGHHLAYRNFFALKGLTTSLGEPVQGVYGFAKSLLKALKEDGDVVIVVFDAKAPSFRHEAYEAYKAGRAPTPEDFPRQLALMKELVDLLGLERLEVPGFEADDVLATLAKKAEREGYEVQILTADRDLFQLLSPRISVLHPEGHRITPEWLWEKYGLRPEQWVDFRALAGDPSDNIPGVKGIGEKTALKLLKEWGSLENLLKNLDQVKPESVREKILAHLEDLKLSRELSRVRTDLPLEVDFGRRREPDWEGLKAFLERLEFGSLLHEFGLLESPLLAEEAPWPPPEGAFLGYRLSRPEPMWAELLALAASAQGRVYRAEDPHGALRGLFEVRGLLAKDLAVVALREGLDLPPTDDPMLLAYLLDPSNTTPEGVARRYGGEWTEDAAKRALLAERLHANLLGRLRGEERLLWLYEEVEKPLSRVLAHMEATGVKLDVAYLENLSLEVAAHMRRLEEEVFRLAGRSFRLNSRDQLERVLFDELGLPPIGKTEKTGKRSTSAAVLEALREVHPIVDKILQYRELAKLKGTYIDRLPALVHPKTGRLHTRFNQTATATGRLSSSDPNLQNIPVRTPLGQKIRRAFVAEEGWRLVALDYRQIELRVLAHLSGDENLIRVFQEGKDIHTQTASWMFGLSAEAIDPLMRRAAKTINFGVLYGMSAFRLSQELGIPYEEAQAFIQKYFQSYPKVKAWIEKTLREGRTRGYVETLFGRRRYVPDLNARVKGKREAAERMAFNMPVQGTAADLMKLAMVRLFPQLREVGARMLLQVHDELLLEAPKERAEEVAALAKEVMEGVWPLAVPLEVEVGIGEDWLAAKG

SEQ ID NO: 4523 - DNA, 2523 bp, synthetic construct
  misc_feature 1..2523: note = Variant of DNA polymerase I from Thermus sp. strain 2.9
  source 1..2523: mol_type = other DNA
atgcaccatcatcatcatcatggcggtagcggcgtgttaccggtgttcgagcctaaaggtcgcgtgcttctggttgatggccatcatctcgcgtatcgtaacttctttgccctgaaaggattaaccaccagcctgggcgagccggtacagggtgtctacggctttgcaaagtcgctcctgaaagctctgaaagaagacggtgatgtggtgattgttgtctttgatgcgaaagcgccaagttttcgccacgaagcgtacgaagcttacaaagccgggcgtgctccaacgccggaagactttcctcgccaattggcgcttatgaaggaattagtggatttgcttggcctcgaacgcttggaagttcccggtttcgaggcagacgacgtattagcgactctcgcaaagaaagccgaacgtgagggctatgaagtccagatcttgacagcagatcgcgatcttttccagcttttatctccgcgcatctcggtgttacacccggaagggcatcgtatcaccccggaatggctctgggagaaatatggtttgcgtcccgaacaatgggtggattttcgcgccttagcaggcgatccgagcgacaatattccgggagttaaaggtatcggcgagaagacggcgctcaagctccttaaagaatgggggtcgttggagaacttgcttaagaatttagatcaggtcaaaccagagtcagtgcgtgagaagattcttgctcacctcgaagacctcaaattaagccgcgaattgtcccgtgtacgcaccgatttgccgctcgaagttgatttcggtcgccgccgcgaacctgactgggagggtcttaaagcgtttttagagcgtcttgaatttggttcgctcttgcatgaattcggccttttagaaagcccgttactggccgaagaagcaccttggccaccgcccgagggcgcgtttttaggttaccgtttgagtcgcccggaaccgatgtgggccgaattactggctcttgcagcgtctgcccagggacgtgtgtatcgcgcggaagaccctcatggtgcgctccgcggcctcttcgaagtccgtggactccttgccaaagacttagctgttgttgcattgcgcgaaggtcttgatttacctccgactgatgatccaatgcttcttgcgtacctcttggacccgtcaaacacgacgcccgaaggcgtagcccgtcgttacggcggcgagtggaccgaagatgcagcgaaacgcgcgttattggccgaacgtttgcacgccaatttattaggacgtttgcaaggcgaggaacgtctcctctggctttacgaagaagtggagaaaccattgagtcgcgtgctcgcgcatatggaagctaccggtgtcaaattagacgtggcgtatttggagaatctcagccttgaagttgctgcccacatgcgccgcttggaggaagaagtattccgtttagcaggccgttcctttcgccttaactctcgcgatcagttagaacgtgtgttgttcgatgaacttggtctccctcctatcggcaagacagagaagaccggtaaacgtagcacttcagcggcggttttagaagctcttcgcgaagtccatcccattgtggacaagatcttgcagtaccgcgaactcgcgaaattgaaaggcacctatattgaccgtcttccggcattagtccacccgaaaacgggacgcctccatacccgcttcaaccaaacagccacggcgaccggtcgtttgtcctcctctgatccaaaccttcagaatattccagtacgtaccccattgggccagaagatccgccgtgcgtttgtagctgaggagggttggcgtttagtggccctcgattatcgtcaaattgaattacgtgtccttgcccatctttctggcgatgagaacctcatccgcgtgtttcaggaaggcaaagacattcacactcaaacggcaagctggatgtttggattatcagctgaagcgatcgatcctttgatgcgtcgtgcagcgaagaccatcaatttcggtgttctctacggtatgagtgcctttcgtttgtcgcaggaattaggcattccctatgaagaagctcaggcgttcattcagaaatactttcaaagctatcccaaagttaaagcatggatcgagaagactctccgtgaaggccgcacacgtggttacgtagagaccttatttggacgtcgccgctatgttcccgatttaaacgctcgcgtgaaaggcaagcgtgaagccgccgaacgcatggcgttcaacatgcctgtacagggcacggcagctgacctcatgaaacttgcaatggtgcgcctttttccacaattgcgtgaagttggtgcccgcatgctcttgcaggtccacgatgaactcttgttagaagcgccaaaagagcgtcaggaagaggtggcagccctcgcgaaagaagttatggaaggcgtgtggcccttagcggtgcctcttgaagtcgaagttggtattggcgaggattggctggctgccaaagga

SEQ ID NO: 4524 - protein, 841 aa, synthetic construct
  REGION 1..841: note = Variant of DNA polymerase I from Thermus sp. strain 2.9
MHHHHHHGGSGVLPVFEPKGRVLLVDGHHLAYRNFFALKGLTTSLGEPVQGVYGFAKSLLKALKEDGDVVIVVFDAKAPSFRHEAYEAYKAGRAPTPEDFPRQLALMKELVDLLGLERLEVPGFEADDVLATLAKKAEREGYEVQILTADRDLFQLLSPRISVLHPEGHRITPEWLWEKYGLRPEQWVDFRALAGDPSDNIPGVKGIGEKTALKLLKEWGSLENLLKNLDQVKPESVREKILAHLEDLKLSRELSRVRTDLPLEVDFGRRREPDWEGLKAFLERLEFGSLLHEFGLLESPLLAEEAPWPPPEGAFLGYRLSRPEPMWAELLALAASAQGRVYRAEDPHGALRGLFEVRGLLAKDLAVVALREGLDLPPTDDPMLLAYLLDPSNTTPEGVARRYGGEWTEDAAKRALLAERLHANLLGRLQGEERLLWLYEEVEKPLSRVLAHMEATGVKLDVAYLENLSLEVAAHMRRLEEEVFRLAGRSFRLNSRDQLERVLFDELGLPPIGKTEKTGKRSTSAAVLEALREVHPIVDKILQYRELAKLKGTYIDRLPALVHPKTGRLHTRFNQTATATGRLSSSDPNLQNIPVRTPLGQKIRRAFVAEEGWRLVALDYRQIELRVLAHLSGDENLIRVFQEGKDIHTQTASWMFGLSAEAIDPLMRRAAKTINFGVLYGMSAFRLSQELGIPYEEAQAFIQKYFQSYPKVKAWIEKTLREGRTRGYVETLFGRRRYVPDLNARVKGKREAAERMAFNMPVQGTAADLMKLAMVRLFPQLREVGARMLLQVHDELLLEAPKERQEEVAALAKEVMEGVWPLAVPLEVEVGIGEDWLAAKG

SEQ ID NO: 4525 - DNA, 2523 bp, synthetic construct
  misc_feature 1..2523: note = Variant of DNA polymerase I from Thermus sp. strain 2.9
  source 1..2523: mol_type = other DNA
atgcaccatcatcatcatcatggcggtagcggcgtgttaccggtgttcgagcctaaaggtcgcgtgcttctggttgatggccatcatctcgcgtatcgtaacttctttgccctgaaaggattaaccaccagcctgggcgagccggtacagggtgtctacggctttgcaaagtcgctcctgaaagctctgaaagaagacggtgatgtggtgattgttgtctttgatgcgaaagcgccaagttttcgccacgaagcgtacgaagcttacaaagccgggcgtgctccaacgccggaagactttcctcgccaattggcgcttatgaaggaattagtggatttgcttggcctcgaacgcttggaagttcccggtttcgaggcagacgacgtattagcgactctcgcaaagaaagccgaacgtgagggctatgaagtccagatcttgacagcagatcgcgatcttttccagcttttatctccgcgcatctcggtgttacacccggaagggcatcgtatcaccccggaatggctctgggagaaatatggtttgcgtcccgaacaatgggtggattttcgcgccttagcaggcgatccgagcgacaatattccgggagttaaaggtatcggcgagaagacggcgctcaagctccttaaagaatgggggtcgttggagaacttgcttaagaatttagatcaggtcaaaccagagtcagtgcgtgagaagattcttgctcacctcgaagacctcaaattaagccgcgaattgtcccgtgtacgcaccgatttgccgctcgaagttgatttcggtcgccgccgcgaacctgactgggagggtcttaaagcgtttttagagcgtcttgaatttggttcgctcttgcatgaattcggccttttagaaagcccgttactggccgaagaagcaccttggccaccgcccgagggcgcgtttttaggttaccgtttgagtcgcccggaaccgatgtgggccgaattactggctcttgcagcgtctgcccagggacgtgtgtatcgcgcggaagaccctcatggtgcgctccgcggcctcttcgaagtccgtggactccttgccaaagacttagctgttgttgcattgcgcgaaggtcttgatttacctccgactgatgatccaatgcttcttgcgtacctcttggacccgtcaaacacgacgcccgaaggcgtagcccgtcgttacggcggcgagtggaccgaagatgcagcgaaacgcgcgttattggccgaacgtttgcacgccaatttattaggacgtttgcaaggcgaggaacgtctcctctggctttacgaagaagtggagaaaccattgagtcgcgtgctcgcgcatatggaagctaccggtgtcaaattagacgtggcgtatttggagaatctcagccttgaagttgctgcccacatgcgccgcttggaggaagaagtattccgtttagcaggccgttcctttcgccttaactctcgcgatcagttagaacgtgtgttgttcgatgaacttggtctccctcctatcggcaagacagagaagaccggtaaacgtagcacttcagcggcggttttagaagctcttcgcagggtccatcccattgtggacaagatcttgcagtaccgcgaactcgcgaaattgaaaggcacctatattgaccgtcttccggcattagtccacccgaaaacgggacgcctccatacccgcttcaaccaaacagccacggcgaccggtcgtttgtcctcctctgatccaaaccttcagaatattccagtacgtaccccattgggccagaagatccgccgtgcgtttgtagctgaggagggttggcgtttagtggccctcgattatcgtcaaattgaattacgtgtccttgcccatctttctggcgatgagaacctcatccgcgtgtttcaggaaggcaaagacattcacactcaaacggcaagctggatgtttggattatcagctgaagcgatcgatcctttgatgcgtcgtgcagcgaagaccatcaatttcggtgttctctacggtatgagtgcctttcgtttgtcgcaggaattaggcattccctatgaagaagctcaggcgttcattcagaaatactttcaaagctatcccaaagttaaagcatggatcgagaagactctccgtgaaggccgcacacgtggttacgtagagaccttatttggacgtcgccgctatgttcccgatttaaacgctcgcgtgaaaggcaagcgtgaagccgccgaacgcatggcgttcaacatgcctgtacagggcacggcagctgacctcatgaaacttgcaatggtgcgcctttttccacaattgcgtgaagttggtgcccgcatgctcttgcaggtccacgatgaactcttgttagaagcgccaaaagagcgtgcggaagaggtggcagccctcgcgaaagaagttatggaaggcgtgtggcccttagcggtgcctcttgaagtcgaagttggtattggcgaggattggctggctgccaaagga

SEQ ID NO: 4526 - protein, 841 aa, synthetic construct
  REGION 1..841: note = Variant of DNA polymerase I from Thermus sp. strain 2.9
MHHHHHHGGSGVLPVFEPKGRVLLVDGHHLAYRNFFALKGLTTSLGEPVQGVYGFAKSLLKALKEDGDVVIVVFDAKAPSFRHEAYEAYKAGRAPTPEDFPRQLALMKELVDLLGLERLEVPGFEADDVLATLAKKAEREGYEVQILTADRDLFQLLSPRISVLHPEGHRITPEWLWEKYGLRPEQWVDFRALAGDPSDNIPGVKGIGEKTALKLLKEWGSLENLLKNLDQVKPESVREKILAHLEDLKLSRELSRVRTDLPLEVDFGRRREPDWEGLKAFLERLEFGSLLHEFGLLESPLLAEEAPWPPPEGAFLGYRLSRPEPMWAELLALAASAQGRVYRAEDPHGALRGLFEVRGLLAKDLAVVALREGLDLPPTDDPMLLAYLLDPSNTTPEGVARRYGGEWTEDAAKRALLAERLHANLLGRLQGEERLLWLYEEVEKPLSRVLAHMEATGVKLDVAYLENLSLEVAAHMRRLEEEVFRLAGRSFRLNSRDQLERVLFDELGLPPIGKTEKTGKRSTSAAVLEALRRVHPIVDKILQYRELAKLKGTYIDRLPALVHPKTGRLHTRFNQTATATGRLSSSDPNLQNIPVRTPLGQKIRRAFVAEEGWRLVALDYRQIELRVLAHLSGDENLIRVFQEGKDIHTQTASWMFGLSAEAIDPLMRRAAKTINFGVLYGMSAFRLSQELGIPYEEAQAFIQKYFQSYPKVKAWIEKTLREGRTRGYVETLFGRRRYVPDLNARVKGKREAAERMAFNMPVQGTAADLMKLAMVRLFPQLREVGARMLLQVHDELLLEAPKERAEEVAALAKEVMEGVWPLAVPLEVEVGIGEDWLAAKG

SEQ ID NO: 4527 - DNA, 2523 bp, synthetic construct
  misc_feature 1..2523: note = Variant of DNA polymerase I from Thermus sp. strain 2.9
  source 1..2523: mol_type = other DNA
atgcaccatcatcatcatcatggcggtagcggcgtgttaccggtgttcgagcctaaaggtcgcgtgcttctggttgatggccatcatctcgcgtatcgtaacttctttgccctgaaaggattaaccaccagcctgggcgagccggtacagggtgtctacggctttgcaaagtcgctcctgaaagctctgaaagaagacggtgatgtggtgattgttgtctttgatgcgaaagcgccaagttttcgccacgaagcgtacgaagcttacaaagccgggcgtgctccaacgccggaagactttcctcgccaattggcgcttatgaaggaattagtggatttgcttggcctcgaacgcttggaagttcccggtttcgaggcagacgacgtattagcgactctcgcaaagaaagccgaacgtgagggctatgaagtccagatcttgacagcagatcgcgatcttttccagcttttatctccgcgcatctcggtgttacacccggaagggcatcgtatcaccccggaatggctctgggagaaatatggtttgcgtcccgaacaatgggtggattttcgcgccttagcaggcgatccgagcgacaatattccgggagttaaaggtatcggcgagaagacggcgctcaagctccttaaagaatgggggtcgttggagaacttgcttaagaatttagatcaggtcaaaccagagtcagtgcgtgagaagattcttgctcacctcgaagacctcaaattaagccgcgaattgtcccgtgtacgcaccgatttgccgctcgaagttgatttcggtcgccgccgcgaacctgactgggagggtcttaaagcgtttttagagcgtcttgaatttggttcgctcttgcatgaattcggccttttagaaagcccgttactggccgaagaagcaccttggccaccgcccgagggcgcgtttttaggttaccgtttgagtcgcccggaaccgatgtgggccgaattactggctcttgcagcgtctgcccagggacgtgtgtatcgcgcggaagaccctcatggtgcgctccgcggcctcttcgaagtcgagggactccttgccaaagacttagctgttgttgcattgcgcgaaggtcttgatttacctccgactgatgatccaatgcttcttgcgtacctcttggacccgtcaaacacgacgcccgaaggcgtagcccgtcgttacggcggcgagtggaccgaagatgcagcgaaacgcgcgttattggccgaacgtttgcacgccaatttattaggacgtttgcaaggcgaggaacgtctcctctggctttacgaagaagtggagaaaccattgagtcgcgtgctcgcgcatatggaagctaccggtgtcaaattagacgtggcgtatttggagaatctcagccttgaagttgctgcccacatgcgccgcttggaggaagaagtattccgtttagcaggccgttcctttcgccttaactctcgcgatcagttagaacgtgtgttgttcgatgaacttggtctccctcctatcggcaagacagagaagaccggtaaacgtagcacttcagcggcggttttagaagctcttcgcgaagtccatcccattgtggacaagatcttgcagtaccgcgaactcgcgaaattgaaaggcacctatattgaccgtcttccggcattagtccacccgaaaacgggacgcctccatacccgcttcaaccaaacagccacggcgaccggtcgtttgtcctcctctgatccaaaccttcagaatattccagtacgtaccccattgggccagaagatccgccgtgcgtttgtagctgaggagggttggcgtttagtggccctcgattatcgtcaaattgaattacgtgtccttgcccatctttctggcgatgagaacctcatccgcgtgtttcaggaaggcaaagacattcacactcaaacggcaagctggatgtttggattatcagctgaagcgatcgatcctttgatgcgtcgtgcagcgaagaccatcaatttcggtgttctctacggtatgagtgcctttcgtttgtcgcaggaattaggcattccctatgaagaagctcaggcgttcattcagaaatactttcaaagctatcccaaagttaaagcatggatcgagaagactctccgtgaaggccgcacacgtggttacgtagagaccttatttggacgtcgccgctatgttcccgatttaaacgctcgcgtgaaaggcaagcgtgaagccgccgaacgcatggcgttcaacatgcctgtacagggcacggcagctgacctcatgaaacttgcaatggtgcgcctttttccacaattgcgtgaagttggtgcccgcatgctcttgcaggtccacgatgaactcttgttagaagcgccaaaagagcgtgcggaagaggtggcagccctcgcgaaagaagttatggaaggcgtgtggcccttagcggtgcctcttgaagtcgaagttggtattggcgaggattggctggctgccaaagga

SEQ ID NO: 4528 - protein, 841 aa, synthetic construct
  REGION 1..841: note = Variant of DNA polymerase I from Thermus sp. strain 2.9
MHHHHHHGGSGVLPVFEPKGRVLLVDGHHLAYRNFFALKGLTTSLGEPVQGVYGFAKSLLKALKEDGDVVIVVFDAKAPSFRHEAYEAYKAGRAPTPEDFPRQLALMKELVDLLGLERLEVPGFEADDVLATLAKKAEREGYEVQILTADRDLFQLLSPRISVLHPEGHRITPEWLWEKYGLRPEQWVDFRALAGDPSDNIPGVKGIGEKTALKLLKEWGSLENLLKNLDQVKPESVREKILAHLEDLKLSRELSRVRTDLPLEVDFGRRREPDWEGLKAFLERLEFGSLLHEFGLLESPLLAEEAPWPPPEGAFLGYRLSRPEPMWAELLALAASAQGRVYRAEDPHGALRGLFEVEGLLAKDLAVVALREGLDLPPTDDPMLLAYLLDPSNTTPEGVARRYGGEWTEDAAKRALLAERLHANLLGRLQGEERLLWLYEEVEKPLSRVLAHMEATGVKLDVAYLENLSLEVAAHMRRLEEEVFRLAGRSFRLNSRDQLERVLFDELGLPPIGKTEKTGKRSTSAAVLEALREVHPIVDKILQYRELAKLKGTYIDRLPALVHPKTGRLHTRFNQTATATGRLSSSDPNLQNIPVRTPLGQKIRRAFVAEEGWRLVALDYRQIELRVLAHLSGDENLIRVFQEGKDIHTQTASWMFGLSAEAIDPLMRRAAKTINFGVLYGMSAFRLSQELGIPYEEAQAFIQKYFQSYPKVKAWIEKTLREGRTRGYVETLFGRRRYVPDLNARVKGKREAAERMAFNMPVQGTAADLMKLAMVRLFPQLREVGARMLLQVHDELLLEAPKERAEEVAALAKEVMEGVWPLAVPLEVEVGIGEDWLAAKG

SEQ ID NO: 4529 - DNA, 2523 bp, synthetic construct
  misc_feature 1..2523: note = Variant of DNA polymerase I from Thermus sp. strain 2.9
  source 1..2523: mol_type = other DNA
atgcaccatcatcatcatcatggcggtagcggcgtgttaccggtgttcgagcctaaaggtcgcgtgcttctggttgatggccatcatctcgcgtatcgtaacttctttgccctgaaaggattaaccaccagcctgggcgagccggtacagggtgtctacggctttgcaaagtcgctcctgaaagctctgaaagaagacggtgatgtggtgattgttgtctttgatgcgaaagcgccaagttttcgccacgaagcgtacgaagcttacaaagccgggcgtgctccaacgccggaagactttcctcgccaattggcgcttatgaaggaattagtggatttgcttggcctcgaacgcttggaagttcccggtttcgaggcagacgacgtattagcgactctcgcaaagaaagccgaacgtgagggctatgaagtccagatcttgacagcagatcgcgatcttttccagcttttatctccgcgcatctcggtgttacacccggaagggcatcgtatcaccccggaatggctctgggagaaatatggtttgcgtcccgaacaatgggtggattttcgcgccttagcaggcgatccgagcgacaatattccgggagttaaaggtatcggcgagaagacggcgctcaagctccttaaagaatgggggtcgttggagaacttgcttaagaatttagatcaggtcaaaccagagtcagtgcgtgagaagattcttgctcacctcgaagacctcaaattaagccgcgaattgtcccgtgtacgcaccgatttgccgctcgaagttgatttcggtcgccgccgcgaacctgactgggagggtcttaaagcgtttttagagcgtcttgaatttggttcgctcttgcatgaattcggccttttagaaagcccgttactggccgaagaagcaccttggccaccgcccgagggcgcgtttttaggttaccgtttgagtcgcccggaaccgatgtgggccgaattactggctcttgcagcgtctgcccagggacgtgtgtatcgcgcggaagaccctcatggtgcgctccgcggcctcttcgaagtccgtggactccttgccaaagacttagctgttgttgcattgcgcgaaggtcttgatttacctccgactgatgatccaatgcttcttgcgtacctcttggacccgtcaaacacgacgcccgaaggcgtagcccgtcgttacggcggcgagtggaccgaagatgcagcgaaacgcgcgttattggccgaacgtttgcacgccaatttattaggacgtttgcaaggcgaggaacgtctcctctggctttacgaagaagtggagaaaccattgagtcgcgtgctcgcgcatatggaagctaccggtgtcaaattagacgtggcgtatttggagaatctcagccttgaagttgctgcccacatgcgccgcttggaggaagaagtattccgtttagcaggccgttcctttcgccttaactctcgcgatcagttagaacgtgtgttgttcgatgaacttggtctccctcctatcggcaagacagagaagaccggtaaacgtagcacttcagcggcggttttagaagctcttcgcgaagtccatcccattgtggacaagatcttgcagtaccgcgaactcgcgaaattgaaaggcacctatattgaccgtcttccggcattagtccacccgaaaacgggacgcctccatacccgcttcaaccaaacagccacggcgaccggtcgtttgtcctcctctgatccaaaccttcagaatattccagtacgtaccccattgggccagaagatccgccgtgcgtttgtagctgaggagggttggcgtttagtggccctcgattatcgtcaaattgaattacgtgtccttgcccatctttctggcgatgagaacctcatccgcgtgtttcaggaaggcaaagacattcacactcaaacggcaagctggatgtttggattatcagctgaagcgatcgatcctttgatgcgtcgtgcagcgaagaccatcaatttcggtgttctctacggtatgagtgcctttcgtttgtcgcaggaattaggcattccctatgaagaagctcaggcgttcattcagaaatactttcaaagctatcccaaagttaaagcatggatcgagaagactctccgtgaaggccgcacacgtggttacgtagagaccttatttggacgtcgccgctatgttcccgatttaaacgctcgcgtgaaaggcaagcgtgaagccggtgaacgcatggcgttcaacatgcctgtacagggcacggcagctgacctcatgaaacttgcaatggtgcgcctttttccacaattgcgtgaagttggtgcccgcatgctcttgcaggtccacgatgaactcttgttagaagcgccaaaagagcgtgcggaagaggtggcagccctcgcgaaagaagttatggaaggcgtgtggcccttagcggtgcctcttgaagtcgaagttggtattggcgaggattggctggctgccaaagga

SEQ ID NO: 4530 - protein, 841 aa, synthetic construct
  REGION 1..841: note = Variant of DNA polymerase I from Thermus sp. strain 2.9
MHHHHHHGGSGVLPVFEPKGRVLLVDGHHLAYRNFFALKGLTTSLGEPVQGVYGFAKSLLKALKEDGDVVIVVFDAKAPSFRHEAYEAYKAGRAPTPEDFPRQLALMKELVDLLGLERLEVPGFEADDVLATLAKKAEREGYEVQILTADRDLFQLLSPRISVLHPEGHRITPEWLWEKYGLRPEQWVDFRALAGDPSDNIPGVKGIGEKTALKLLKEWGSLENLLKNLDQVKPESVREKILAHLEDLKLSRELSRVRTDLPLEVDFGRRREPDWEGLKAFLERLEFGSLLHEFGLLESPLLAEEAPWPPPEGAFLGYRLSRPEPMWAELLALAASAQGRVYRAEDPHGALRGLFEVRGLLAKDLAVVALREGLDLPPTDDPMLLAYLLDPSNTTPEGVARRYGGEWTEDAAKRALLAERLHANLLGRLQGEERLLWLYEEVEKPLSRVLAHMEATGVKLDVAYLENLSLEVAAHMRRLEEEVFRLAGRSFRLNSRDQLERVLFDELGLPPIGKTEKTGKRSTSAAVLEALREVHPIVDKILQYRELAKLKGTYIDRLPALVHPKTGRLHTRFNQTATATGRLSSSDPNLQNIPVRTPLGQKIRRAFVAEEGWRLVALDYRQIELRVLAHLSGDENLIRVFQEGKDIHTQTASWMFGLSAEAIDPLMRRAAKTINFGVLYGMSAFRLSQELGIPYEEAQAFIQKYFQSYPKVKAWIEKTLREGRTRGYVETLFGRRRYVPDLNARVKGKREAGERMAFNMPVQGTAADLMKLAMVRLFPQLREVGARMLLQVHDELLLEAPKERAEEVAALAKEVMEGVWPLAVPLEVEVGIGEDWLAAKG

SEQ ID NO: 4531 - DNA, 2523 bp, synthetic construct
  misc_feature 1..2523: note = Variant of DNA polymerase I from Thermus sp. strain 2.9
  source 1..2523: mol_type = other DNA
atgcaccatcatcatcatcatggcggtagcggcgtgttaccggtgttcgagcctaaaggtcgcgtgcttctggttgatggccatcatctcgcgtatcgtaacttctttgccctgaaaggattaaccaccagcctgggcgagccggtacagggtgtctacggctttgcaaagtcgctcctgaaagctctgaaagaagacggtgatgtggtgattgttgtctttgatgcgaaagcgccaagttttcgccacgaagcgtacgaagcttacaaagccgggcgtgctccaacgccggaagactttcctcgccaattggcgcttatgaaggaattagtggatttgcttggcctcgaacgcttggaagttcccggtttcgaggcagacgacgtattagcgactctcgcaaagaaagccgaacgtgagggctatgaagtccagatcttgacagcagatcgcgatcttttccagcttttatctccgcgcatctcggtgttacacccggaagggcatcgtatcaccccggaatggctctgggagaaatatggtttgcgtcccgaacaatgggtggattttcgcgccttagcaggcgatccgagcgacaatattccgggagttaaaggtatcggcgagaagacggcgctcaagctccttaaagaatgggggtcgttggagaacttgcttaagaatttagatcaggtcaaaccagagtcagtgcgtgagaagattcttgctcacctcgaagacctcaaattaagccgcgaattgtcccgtgtacgcaccgatttgccgctcgaagttgatttcggtcgccgccgcgaacctgactgggagggtcttaaagcgtttttagagcgtcttgaatttggttcgctcttgcatgaattcggccttttagaaagcccgttactggccgaagaagcaccttggccaccgcccgagggcgcgtttttaggttaccgtttgagtcgcccggaaccgatgtgggccgaattactggctcttgcagcgtctgcccagggacgtgtgtatcgcgcggaagaccctcatggtgcgctccgcggcctcttcgaagtccgtggactccttgccaaagacttagctgttgttgcattgcgcgaaggtcttgatttacctccgactgatgatccaatgcttcttgcgtacctcggggacccgtcaaacacgacgcccgaaggcgtagcccgtcgttacggcggcgagtggaccgaagatgcagcgaaacgcgcgttattggccgaacgtttgcacgccaatttattaggacgtttgcaaggcgaggaacgtctcctctggctttacgaagaagtggagaaaccattgagtcgcgtgctcgcgcatatggaagctaccggtgtcaaattagacgtggcgtatttggagaatctcagccttgaagttgctgcccacatgcgccgcttggaggaagaagtattccgtttagcaggccgttcctttcgccttaactctcgcgatcagttagaacgtgtgttgttcgatgaacttggtctccctcctatcggcaagacagagaagaccggtaaacgtagcacttcagcggcggttttagaagctcttcgcgaagtccatcccattgtggacaagatcttgcagtaccgcgaactcgcgaaattgaaaggcacctatattgaccgtcttccggcattagtccacccgaaaacgggacgcctccatacccgcttcaaccaaacagccacggcgaccggtcgtttgtcctcctctgatccaaaccttcagaatattccagtacgtaccccattgggccagaagatccgccgtgcgtttgtagctgaggagggttggcgtttagtggccctcgattatcgtcaaattgaattacgtgtccttgcccatctttctggcgatgagaacctcatccgcgtgtttcaggaaggcaaagacattcacactcaaacggcaagctggatgtttggattatcagctgaagcgatcgatcctttgatgcgtcgtgcagcgaagaccatcaatttcggtgttctctacggtatgagtgcctttcgtttgtcgcaggaattaggcattccctatgaagaagctcaggcgttcattcagaaatactttcaaagctatcccaaagttaaagcatggatcgagaagactctccgtgaaggccgcacacgtggttacgtagagaccttatttggacgtcgccgctatgttcccgatttaaacgctcgcgtgaaaggcaagcgtgaagccgccgaacgcatggcgttcaacatgcctgtacagggcacggcagctgacctcatgaaacttgcaatggtgcgcctttttccacaattgcgtgaagttggtgcccgcatgctcttgcaggtccacgatgaactcttgttagaagcgccaaaagagcgtgcggaagaggtggcagccctcgcgaaagaagttatggaaggcgtgtggcccttagcggtgcctcttgaagtcgaagttggtattggcgaggattggctggctgccaaagga

SEQ ID NO: 4532 - protein, 841 aa, synthetic construct
  REGION 1..841: note = Variant of DNA polymerase I from Thermus sp. strain 2.9
MHHHHHHGGSGVLPVFEPKGRVLLVDGHHLAYRNFFALKGLTTSLGEPVQGVYGFAKSLLKALKEDGDVVIVVFDAKAPSFRHEAYEAYKAGRAPTPEDFPRQLALMKELVDLLGLERLEVPGFEADDVLATLAKKAEREGYEVQILTADRDLFQLLSPRISVLHPEGHRITPEWLWEKYGLRPEQWVDFRALAGDPSDNIPGVKGIGEKTALKLLKEWGSLENLLKNLDQVKPESVREKILAHLEDLKLSRELSRVRTDLPLEVDFGRRREPDWEGLKAFLERLEFGSLLHEFGLLESPLLAEEAPWPPPEGAFLGYRLSRPEPMWAELLALAASAQGRVYRAEDPHGALRGLFEVRGLLAKDLAVVALREGLDLPPTDDPMLLAYLGDPSNTTPEGVARRYGGEWTEDAAKRALLAERLHANLLGRLQGEERLLWLYEEVEKPLSRVLAHMEATGVKLDVAYLENLSLEVAAHMRRLEEEVFRLAGRSFRLNSRDQLERVLFDELGLPPIGKTEKTGKRSTSAAVLEALREVHPIVDKILQYRELAKLKGTYIDRLPALVHPKTGRLHTRFNQTATATGRLSSSDPNLQNIPVRTPLGQKIRRAFVAEEGWRLVALDYRQIELRVLAHLSGDENLIRVFQEGKDIHTQTASWMFGLSAEAIDPLMRRAAKTINFGVLYGMSAFRLSQELGIPYEEAQAFIQKYFQSYPKVKAWIEKTLREGRTRGYVETLFGRRRYVPDLNARVKGKREAAERMAFNMPVQGTAADLMKLAMVRLFPQLREVGARMLLQVHDELLLEAPKERAEEVAALAKEVMEGVWPLAVPLEVEVGIGEDWLAAKG

SEQ ID NO: 4533 - DNA, 2523 bp, synthetic construct
  misc_feature 1..2523: note = Variant of DNA polymerase I from Thermus sp. strain 2.9
  source 1..2523: mol_type = other DNA
atgcaccatcatcatcatcatggcggtagcggcgtgttaccggtgttcgagcctaaaggtcgcgtgcttctggttgatggccatcatctcgcgtatcgtaacttctttgccctgaaaggattaaccaccagcctgggcgagccggtacagggtgtctacggctttgcaaagtcgctcctgaaagctctgaaagaagacggtgatgtggtgattgttgtctttgatgcgaaagcgccaagttttcgccacgaagcgtacgaagcttacaaagccgggcgtgctccaacgccggaagactttcctcgccaattggcgcttatgaaggaattagtggatttgcttggcctcgaacgcttggaagttcccggtttcgaggcagacgacgtattagcgactctcgcaaagaaagccgaacgtgagggctatgaagtccagatcttgacagcagatcgcgatcttttccagcttttatctccgcgcatctcggtgttacacccggaagggcatcgtatcaccccggaatggctctgggagaaatatggtttgcgtcccgaacaatgggtggattttcgcgccttagcaggcgatccgagcgacaatattccgggagttaaaggtatcggcgagaagacggcgctcaagctccttaaagaatgggggtcgttggagaacttgcttaagaatttagatcaggtcaaaccagagtcagtgcgtgagaagattcttgctcacctcgaagacctcaaattaagccgcgaattgtcccgtgtacgcaccgatttgccgctcgaagttgatttcggtcgccgccgcgaacctgactgggagggtcttaaagcgtttttagagcgtcttgaatttggttcgctcttgcatgaattcggccttttagaaagcccgttactggccgaagaagcaccttggccaccgcccgagggcgcgtttttaggttaccgtttgagtcgcccggaaccgatgtgggccgaattactggctcttgcagcgtctgcccagggacgtgtgtatcgcgcggaagaccctcatggtgcgctccgcggcctcttcgaagtccgtggactccttgccaaagacttagctgttgttgcattgcgcgaaggtcttgatttacctccgactgatgatccaatgcttcttgcgtacctcttggacccgtcaaacacgacgcccgaaggcgtagcccgtcgttacggcggcgagtggaccgaagatgcagcgaaacgcgcgttattggccgaacgtttgcacgccaatttattaggacgtttgcaaggcgaggaacgtctcctctggctttacgaagaagtggagaaaccattgagtcgcgtgctcgcgcatatggaagctaccggtgtcaaattagacgtggcgtatttggagaatctcagccttgaagttgctgcccacatgcgccgcttggaggaagaagtattccgtttagcaggccgttcctttcgccttaactctcgcgatcagttagaacgtgtgttgttcgatgaacttggtctccctcctatcggcaagacagagaagaccggtaaacgtagcacttcagcggcggttttagaagctcttcgcttggtccatcccattgtggacaagatcttgcagtaccgcgaactcgcgaaattgaaaggcacctatattgaccgtcttccggcattagtccacccgaaaacgggacgcctccatacccgcttcaaccaaacagccacggcgaccggtcgtttgtcctcctctgatccaaaccttcagaatattccagtacgtaccccattgggccagaagatccgccgtgcgtttgtagctgaggagggttggcgtttagtggccctcgattatcgtcaaattgaattacgtgtccttgcccatctttctggcgatgagaacctcatccgcgtgtttcaggaaggcaaagacattcacactcaaacggcaagctggatgtttggattatcagctgaagcgatcgatcctttgatgcgtcgtgcagcgaagaccatcaatttcggtgttctctacggtatgagtgcctttcgtttgtcgcaggaattaggcattccctatgaagaagctcaggcgttcattcagaaatactttcaaagctatcccaaagttaaagcatggatcgagaagactctccgtgaaggccgcacacgtggttacgtagagaccttatttggacgtcgccgctatgttcccgatttaaacgctcgcgtgaaaggcaagcgtgaagccgccgaacgcatggcgttcaacatgcctgtacagggcacggcagctgacctcatgaaacttgcaatggtgcgcctttttccacaattgcgtgaagttggtgcccgcatgctcttgcaggtccacgatgaactcttgttagaagcgccaaaagagcgtgcggaagaggtggcagccctcgcgaaagaagttatggaaggcgtgtggcccttagcggtgcctcttgaagtcgaagttggtattggcgaggattggctggctgccaaagga

SEQ ID NO: 4534 - protein, 841 aa, synthetic construct
  REGION 1..841: note = Variant of DNA polymerase I from Thermus sp. strain 2.9
MHHHHHHGGSGVLPVFEPKGRVLLVDGHHLAYRNFFALKGLTTSLGEPVQGVYGFAKSLLKALKEDGDVVIVVFDAKAPSFRHEAYEAYKAGRAPTPEDFPRQLALMKELVDLLGLERLEVPGFEADDVLATLAKKAEREGYEVQILTADRDLFQLLSPRISVLHPEGHRITPEWLWEKYGLRPEQWVDFRALAGDPSDNIPGVKGIGEKTALKLLKEWGSLENLLKNLDQVKPESVREKILAHLEDLKLSRELSRVRTDLPLEVDFGRRREPDWEGLKAFLERLEFGSLLHEFGLLESPLLAEEAPWPPPEGAFLGYRLSRPEPMWAELLALAASAQGRVYRAEDPHGALRGLFEVRGLLAKDLAVVALREGLDLPPTDDPMLLAYLLDPSNTTPEGVARRYGGEWTEDAAKRALLAERLHANLLGRLQGEERLLWLYEEVEKPLSRVLAHMEATGVKLDVAYLENLSLEVAAHMRRLEEEVFRLAGRSFRLNSRDQLERVLFDELGLPPIGKTEKTGKRSTSAAVLEALRLVHPIVDKILQYRELAKLKGTYIDRLPALVHPKTGRLHTRFNQTATATGRLSSSDPNLQNIPVRTPLGQKIRRAFVAEEGWRLVALDYRQIELRVLAHLSGDENLIRVFQEGKDIHTQTASWMFGLSAEAIDPLMRRAAKTINFGVLYGMSAFRLSQELGIPYEEAQAFIQKYFQSYPKVKAWIEKTLREGRTRGYVETLFGRRRYVPDLNARVKGKREAAERMAFNMPVQGTAADLMKLAMVRLFPQLREVGARMLLQVHDELLLEAPKERAEEVAALAKEVMEGVWPLAVPLEVEVGIGEDWLAAKG

SEQ ID NO: 4535 - DNA, 2523 bp, synthetic construct
  misc_feature 1..2523: note = Variant of DNA polymerase I from Thermus sp. strain 2.9
  source 1..2523: mol_type = other DNA
atgcaccatcatcatcatcatggcggtagcggcgtgttaccggtgttcgagcctaaaggtcgcgtgcttctggttgatggccatcatctcgcgtatcgtaacttctttgccctgaaaggattaaccaccagcctgggcgagccggtacagggtgtctacggctttgcaaagtcgctcctgaaagctctgaaagaagacggtgatgtggtgattgttgtctttgatgcgaaagcgccaagttttcgccacgaagcgtacgaagcttacaaagccgggcgtgctccaacgccggaagactttcctcgccaattggcgcttatgaaggaattagtggatttgcttggcctcgaacgcttggaagttcccggtttcgaggcagacgacgtattagcgactctcgcaaagaaagccgaacgtgagggctatgaagtccagatcttgacagcagatcgcgatcttttccagcttttatctccgcgcatctcggtgttacacccggaagggcatcgtatcaccccggaatggctctgggagaaatatggtttgcgtcccgaacaatgggtggattttcgcgccttagcaggcgatccgagcgacaatattccgggagttaaaggtatcggcgagaagacggcgctcaagctccttaaagaatgggggtcgttggagaacttgcttaagaatttagatcaggtcaaaccagagtcagtgcgtgagaagattcttgctcacctcgaagacctcaaattaagccgcgaattgtcccgtgtacgcaccgatttgccgctcgaagttgatttcggtcgccgccgcgaacctgactgggagggtcttaaagcgtttttagagcgtcttgaatttggttcgctcttgcatgaattcggccttttagaaagcccgttactggccgaagaagcaccttggccaccgcccgagggcgcgtttttaggttaccgtttgagtcgcccggaaccgatgtgggccgaattactggctcttgcagcgtctgcccagggacgtgtgtatcgcgcggaagaccctcatggtgcgctccgcggcctcttcgaagtccgtggactccttgccaaagacttagctgttgttgcattgcgcgaaggtcttgatttacctccgactgatgatccaatgcttcttgcgtacctcttggacccgtcaaacacgacgcccgaaggcgtagcccgtcgttacggcggcgagtggaccgaagatgcagcgaaacgcgcgttattggccgaacgtttgcacgccaatttattaggacgtttgcaaggcgaggaacgtctcctctggctttacgaagaagtggagaaaccattgagtcgcgtgctcgcgcatatggaagctaccggtgtcaaattagacgtggcgtatttggagaatctcagccttgaagttgctgcccacatgcgccgcttggaggaagaagtattccgtttagcaggccgttcctttcgccttaactctcgcgatcagttagaacgtgtgttgttcgatgaacttggtctccctcctatcggcaagacagagaagaccggtaaacgtagcacttcagcggcggttttagaagctcttcgcgaagtccatcccattgtggacaagatcttgcagtaccgcgaactcgcgaaattgaaaggcacctatattgaccgtcttccggcattagtccacccgaaaacgggacgcctccatacccgcttcaaccaaacagccacggcgaccggtcgtttgtcctcctctgatccaaaccttcagaatattccagtacgtaccccattgggccagaagatccgccgtgcgtttgtagctgaggagggttggcgtttagtggccctcgattatcgtcaaattgaattacgtgtccttgcccatctttctggcgatgagaacctcatccgcgtgtttcaggaaggcaaagacattcacactcaaacggcaagctggatgtttggattatcagctgaagcgatcgatcctttgatgcgtcgtgcagcgaagaccatcaatttcggtgttctctacggtatgagtgcctttcgtttgtcgcaggaattaggcattccctatgaagaagctcaggcgttcattcagaaatactttcaaagctatcccaaagttaaagcatggatcgagaagactctccgtgaaggccgcacacgtggttacgtagagaccttatttggacgtcgccgctatgttcccgatttaaacgctcgcgtgaaaggcaagcgtgaagccgccgaacgcactgcgttcaacatgcctgtacagggcacggcagctgacctcatgaaacttgcaatggtgcgcctttttccacaattgcgtgaagttggtgcccgcatgctcttgcaggtccacgatgaactcttgttagaagcgccaaaagagcgtgcggaagaggtggcagccctcgcgaaagaagttatggaaggcgtgtggcccttagcggtgcctcttgaagtcgaagttggtattggcgaggattggctggctgccaaagga

SEQ ID NO: 4536 - protein, 841 aa, synthetic construct
  REGION 1..841: note = Variant of DNA polymerase I from Thermus sp. strain 2.9
MHHHHHHGGSGVLPVFEPKGRVLLVDGHHLAYRNFFALKGLTTSLGEPVQGVYGFAKSLLKALKEDGDVVIVVFDAKAPSFRHEAYEAYKAGRAPTPEDFPRQLALMKELVDLLGLERLEVPGFEADDVLATLAKKAEREGYEVQILTADRDLFQLLSPRISVLHPEGHRITPEWLWEKYGLRPEQWVDFRALAGDPSDNIPGVKGIGEKTALKLLKEWGSLENLLKNLDQVKPESVREKILAHLEDLKLSRELSRVRTDLPLEVDFGRRREPDWEGLKAFLERLEFGSLLHEFGLLESPLLAEEAPWPPPEGAFLGYRLSRPEPMWAELLALAASAQGRVYRAEDPHGALRGLFEVRGLLAKDLAVVALREGLDLPPTDDPMLLAYLLDPSNTTPEGVARRYGGEWTEDAAKRALLAERLHANLLGRLQGEERLLWLYEEVEKPLSRVLAHMEATGVKLDVAYLENLSLEVAAHMRRLEEEVFRLAGRSFRLNSRDQLERVLFDELGLPPIGKTEKTGKRSTSAAVLEALREVHPIVDKILQYRELAKLKGTYIDRLPALVHPKTGRLHTRFNQTATATGRLSSSDPNLQNIPVRTPLGQKIRRAFVAEEGWRLVALDYRQIELRVLAHLSGDENLIRVFQEGKDIHTQTASWMFGLSAEAIDPLMRRAAKTINFGVLYGMSAFRLSQELGIPYEEAQAFIQKYFQSYPKVKAWIEKTLREGRTRGYVETLFGRRRYVPDLNARVKGKREAAERTAFNMPVQGTAADLMKLAMVRLFPQLREVGARMLLQVHDELLLEAPKERAEEVAALAKEVMEGVWPLAVPLEVEVGIGEDWLAAKG

SEQ ID NO: 4537 - DNA, 2523 bp, synthetic construct
  misc_feature 1..2523: note = Variant of DNA polymerase I from Thermus sp. strain 2.9
  source 1..2523: mol_type = other DNA
atgcaccatcatcatcatcatggcggtagcggcgtgttaccggtgttcgagcctaaaggtcgcgtgcttctggttgatggccatcatctcgcgtatcgtaacttctttgccctgaaaggattaaccaccagcctgggcgagccggtacagggtgtctacggctttgcaaagtcgctcctgaaagctctgaaagaagacggtgatgtggtgattgttgtctttgatgcgaaagcgccaagttttcgccacgaagcgtacgaagcttacaaagccgggcgtgctccaacgccggaagactttcctcgccaattggcgcttatgaaggaattagtggatttgcttggcctcgaacgcttggaagttcccggtttcgaggcagacgacgtattagcgactctcgcaaagaaagccgaacgtgagggctatgaagtccagatcttgacagcagatcgcgatcttttccagcttttatctccgcgcatctcggtgttacacccggaagggcatcgtatcaccccggaatggctctgggagaaatatggtttgcgtcccgaacaatgggtggattttcgcgccttagcaggcgatccgagcgacaatattccgggagttaaaggtatcggcgagaagacggcgctcaagctccttaaagaatgggggtcgttggagaacttgcttaagaatttagatcaggtcaaaccagagtcagtgcgtgagaagattcttgctcacctcgaagacctcaaattaagccgcgaattgtcccgtgtacgcaccgatttgccgctcgaagttgatttcggtcgccgccgcgaacctgactgggagggtcttaaagcgtttttagagcgtcttgaatttggttcgctcttgcatgaattcggccttttagaaagcccgttactggccgaagaagcaccttggccaccgcccgagggcgcgtttttaggttaccgtttgagtcgcccggaaccgatgtgggccgaattactggctcttgcagcgtctgcccagggacgtgtgtatcgcgcggaagaccctcatggtgcgctccgcggcctcttcgaagtccgtggactccttgccaaagacttagctgttgttgcattgcgcgaaggtcttgatttacctccgactgatgatccaatgcttcttgcgtacctcttggacccgtcaaacacgacgcccgaaggcgtagcccgtcgttacggcggcgagtggaccgaagatgcagcgaaacgcgcgttattggccgaacgtttgcacgccaatttattaggacgtttgcaaggcgaggaacgtctcctctggctttacgaagaagtggagaaaccattgagtcgcgtgctcgcgcatatggaagctaccggtgtcaaattagacgtggcgtatttggagaatctcagccttgaagttgctgcccacatgcgccgcttggaggaagaagtattccgtttagcaggccgttcctttcgccttaactctcgcgatcagttagaacgtgtgttgttcgatgaacttggtctccctcctatcggcaagacagagaagaccggtaaacgtagcacttcagcggcggttttagaagctcttcgcgaagtccatcccattgtggacaagatcttgcagtaccgcgaactcgcgaaattgaaaggcacctatattgaccgtcttccggcattagtccacccgaaaacgggacgcctccatacccgcttcaaccaaacagccacggcgaccggtcgtttgtcctcctctgatccaaaccttcagaatattccagtacgtaccccattgggccagaagatccgccgtgcgtttgtagctgaggagggttggcgtttagtggccctcgattatcgtcaaattgaattacgtgtccttgcccatctttctggcgatgagaacctcatccgcgtgtttcaggaaggcaaagacattcacactcaaacggcaagctggatgtttggattatcagctgaagcgatcgatcctttgatgcgtcgtgcagcgaagaccatcaatttcggtgttctctacggtatgagtgcctttcgtttgtcgcaggaattaggcattccctatgaagaagctcaggcgttcattcagaaatactttcaaagctatcccaaagttaaagcatggatcgagaagactctccgtgaaggccgcacacgtggttacgtagagaccttatttggacgtcgccgctatgttcccgatttaaacgctcgcgtgaaaggcaagcgtgaagccaaggaacgcatggcgttcaacatgcctgtacagggcacggcagctgacctcatgaaacttgcaatggtgcgcctttttccacaattgcgtgaagttggtgcccgcatgctcttgcaggtccacgatgaactcttgttagaagcgccaaaagagcgtgcggaagaggtggcagccctcgcgaaagaagttatggaaggcgtgtggcccttagcggtgcctcttgaagtcgaagttggtattggcgaggattggctggctgccaaagga

SEQ ID NO: 4538 - protein, 841 aa, synthetic construct
  REGION 1..841: note = Variant of DNA polymerase I from Thermus sp. strain 2.9
MHHHHHHGGSGVLPVFEPKGRVLLVDGHHLAYRNFFALKGLTTSLGEPVQGVYGFAKSLLKALKEDGDVVIVVFDAKAPSFRHEAYEAYKAGRAPTPEDFPRQLALMKELVDLLGLERLEVPGFEADDVLATLAKKAEREGYEVQILTADRDLFQLLSPRISVLHPEGHRITPEWLWEKYGLRPEQWVDFRALAGDPSDNIPGVKGIGEKTALKLLKEWGSLENLLKNLDQVKPESVREKILAHLEDLKLSRELSRVRTDLPLEVDFGRRREPDWEGLKAFLERLEFGSLLHEFGLLESPLLAEEAPWPPPEGAFLGYRLSRPEPMWAELLALAASAQGRVYRAEDPHGALRGLFEVRGLLAKDLAVVALREGLDLPPTDDPMLLAYLLDPSNTTPEGVARRYGGEWTEDAAKRALLAERLHANLLGRLQGEERLLWLYEEVEKPLSRVLAHMEATGVKLDVAYLENLSLEVAAHMRRLEEEVFRLAGRSFRLNSRDQLERVLFDELGLPPIGKTEKTGKRSTSAAVLEALREVHPIVDKILQYRELAKLKGTYIDRLPALVHPKTGRLHTRFNQTATATGRLSSSDPNLQNIPVRTPLGQKIRRAFVAEEGWRLVALDYRQIELRVLAHLSGDENLIRVFQEGKDIHTQTASWMFGLSAEAIDPLMRRAAKTINFGVLYGMSAFRLSQELGIPYEEAQAFIQKYFQSYPKVKAWIEKTLREGRTRGYVETLFGRRRYVPDLNARVKGKREAKERMAFNMPVQGTAADLMKLAMVRLFPQLREVGARMLLQVHDELLLEAPKERAEEVAALAKEVMEGVWPLAVPLEVEVGIGEDWLAAKG

SEQ ID NO: 4539 - DNA, 2523 bp, synthetic construct
  misc_feature 1..2523: note = Variant of DNA polymerase I from Thermus sp. strain 2.9
  source 1..2523: mol_type = other DNA
atgcaccatcatcatcatcatggcggtagcggcgtgttaccggtgttcgagcctaaaggtcgcgtgcttctggttgatggccatcatctcgcgtatcgtaacttctttgccctgaaaggattaaccaccagcctgggcgagccggtacagggtgtctacggctttgcaaagtcgctcctgaaagctctgaaagaagacggtgatgtggtgattgttgtctttgatgcgaaagcgccaagttttcgccacgaagcgtacgaagcttacaaagccgggcgtgctccaacgccggaagactttcctcgccaattggcgcttatgaaggaattagtggatttgcttggcctcgaacgcttggaagttcccggtttcgaggcagacgacgtattagcgactctcgcaaagaaagccgaacgtgagggctatgaagtccagatcttgacagcagatcgcgatcttttccagcttttatctccgcgcatctcggtgttacacccggaagggcatcgtatcaccccggaatggctctgggagaaatatggtttgcgtcccgaacaatgggtggattttcgcgccttagcaggcgatccgagcgacaatattccgggagttaaaggtatcggcgagaagacggcgctcaagctccttaaagaatgggggtcgttggagaacttgcttaagaatttagatcaggtcaaaccagagtcagtgcgtgagaagattcttgctcacctcgaagacctcaaattaagccgcgaattgtcccgtgtacgcaccgatttgccgctcgaagttgatttcggtcgccgccgcgaacctgactgggagggtcttaaagcgtttttagagcgtcttgaatttggttcgctcttgcatgaattcggccttttagaaagcccgttactggccgaagaagcaccttggccaccgcccgagggcgcgtttttaggttaccgtttgagtcgcccggaaccgatgtgggccgaattactggctcttgcagcgtctgcccagggacgtgtgtatcgcgcggaagaccctcatggtgcgctccgcggcctcttcgaagtccgtggactccttgccaaagacttagctgttgttgcattgcgcgaaggtcttgatttacctccgactgatgatccaatgcttcttgcgtacctcttggacccgtcaaacacgacgcccgaaggcgtagcccgtcgttacggcggcgagtggaccgaagatgcagcgaaacgcgcgttattggccgaacgtttgcacgccaatttattaggacgtttgcaaggcgaggaacgtctcctctggctttacgaagaagtggagaaaccattgagtcgcgtgctcgcgcatatggaagctaccggtgtcaaattagacgtggcgtatttggagaatctcagccttgaagttgctgcccacatgcgccgcttggaggaagaagtattccgtttagcaggccgttcctttcgccttaactctcgcgatcagttagaacgtgtgttgttcgatgaacttggtctccctcctatcggcaagacagagaagaccggtaaacgtagcacttcagcggcggttttagaagctcttcgcgaagtccatcccattgtggacaagatcttgcagtaccgcgaactcgcgaaattgaaaggcacctatattgaccgtcttccggcattagtccacccgaaaacgggacgcctccatacccgcttcaaccaaacagccacggcgaccggtcgtttgtcctcctctgatccaaaccttcagaatattccagtacgtaccccattgggccagaagatccgccgtgcgtttgtagctgaggagggttggcgtttagtggccctcgattatcgtcaaattgaattacgtgtccttgcccatctttctggcgatgagaacctcatccgcgtgtttcaggaaggcaaagacattcacactcaaacggcaagctggatgtttggattatcagctgaagcgatcgatcctttgatgcgtcgtgcagcgaagaccatcaatttcggtgttctctacggtatgagtgcctttcgtttgtcgcaggaattaggcattccctatgaagaagctcaggcgttcattcagaaatactttcaaagctatcccaaagttaaagcatggatcgagaagactctccgtgaaggccgcacacgtggttacgtagagaccttatttggacgtcgccgctatgttcccgatttaaacgctcgcgtgaaaggcaagcgtgaagccgccgaacgcatggcgttcaacatgcctgtacagggcacgggggctgacctcatgaaacttgcaatggtgcgcctttttccacaattgcgtgaagttggtgcccgcatgctcttgcaggtccacgatgaactcttgttagaagcgccaaaagagcgtgcggaagaggtggcagccctcgcgaaagaagttatggaaggcgtgtggcccttagcggtgcctcttgaagtcgaagttggtattggcgaggattggctggctgccaaagga

SEQ ID NO: 4540 - protein, 841 aa, synthetic construct
  REGION 1..841: note = Variant of DNA polymerase I from Thermus sp. strain 2.9
MHHHHHHGGSGVLPVFEPKGRVLLVDGHHLAYRNFFALKGLTTSLGEPVQGVYGFAKSLLKALKEDGDVVIVVFDAKAPSFRHEAYEAYKAGRAPTPEDFPRQLALMKELVDLLGLERLEVPGFEADDVLATLAKKAEREGYEVQILTADRDLFQLLSPRISVLHPEGHRITPEWLWEKYGLRPEQWVDFRALAGDPSDNIPGVKGIGEKTALKLLKEWGSLENLLKNLDQVKPESVREKILAHLEDLKLSRELSRVRTDLPLEVDFGRRREPDWEGLKAFLERLEFGSLLHEFGLLESPLLAEEAPWPPPEGAFLGYRLSRPEPMWAELLALAASAQGRVYRAEDPHGALRGLFEVRGLLAKDLAVVALREGLDLPPTDDPMLLAYLLDPSNTTPEGVARRYGGEWTEDAAKRALLAERLHANLLGRLQGEERLLWLYEEVEKPLSRVLAHMEATGVKLDVAYLENLSLEVAAHMRRLEEEVFRLAGRSFRLNSRDQLERVLFDELGLPPIGKTEKTGKRSTSAAVLEALREVHPIVDKILQYRELAKLKGTYIDRLPALVHPKTGRLHTRFNQTATATGRLSSSDPNLQNIPVRTPLGQKIRRAFVAEEGWRLVALDYRQIELRVLAHLSGDENLIRVFQEGKDIHTQTASWMFGLSAEAIDPLMRRAAKTINFGVLYGMSAFRLSQELGIPYEEAQAFIQKYFQSYPKVKAWIEKTLREGRTRGYVETLFGRRRYVPDLNARVKGKREAAERMAFNMPVQGTGADLMKLAMVRLFPQLREVGARMLLQVHDELLLEAPKERAEEVAALAKEVMEGVWPLAVPLEVEVGIGEDWLAAKG

SEQ ID NO: 4541 - DNA, 2523 bp, synthetic construct
  misc_feature 1..2523: note = Variant of DNA polymerase I from Thermus sp. strain 2.9
  source 1..2523: mol_type = other DNA
atgcaccatcatcatcatcatggcggtagcggcgtgttaccggtgttcgagcctaaaggtcgcgtgcttctggttgatggccatcatctcgcgtatcgtaacttctttgccctgaaaggattaaccaccagcctgggcgagccggtacagggtgtctacggctttgcaaagtcgctcctgaaagctctgaaagaagacggtgatgtggtgattgttgtctttgatgcgaaagcgccaagttttcgccacgaagcgtacgaagcttacaaagccgggcgtgctccaacgccggaagactttcctcgccaattggcgcttatgaaggaattagtggatttgcttggcctcgaacgcttggaagttcccggtttcgaggcagacgacgtattagcgactctcgcaaagaaagccgaacgtgagggctatgaagtccagatcttgacagcagatcgcgatcttttccagcttttatctccgcgcatctcggtgttacacccggaagggcatcgtatcaccccggaatggctctgggagaaatatggtttgcgtcccgaacaatgggtggattttcgcgccttagcaggcgatccgagcgacaatattccgggagttaaaggtatcggcgagaagacggcgctcaagctccttaaagaatgggggtcgttggagaacttgcttaagaatttagatcaggtcaaaccagagtcagtgcgtgagaagattcttgctcacctcgaagacctcaaattaagccgcgaattgtcccgtgtacgcaccgatttgccgctcgaagttgatttcggtcgccgccgcgaacctgactgggagggtcttaaagcgtttttagagcgtcttgaatttggttcgctcttgcatgaattcggccttttagaaagcccgttactggccgaagaagcaccttggccaccgcccgagggcgcgtttttaggttaccgtttgagtcgcccggaaccgatgtgggccgaattactggctcttgcagcgtctgcccagggacgtgtgtatcgcgcggaagaccctcatggtgcgctccgcggcatgttcgaagtccgtggactccttgccaaagacttagctgttgttgcattgcgcgaaggtcttgatttacctccgactgatgatccaatgcttcttgcgtacctcttggacccgtcaaacacgacgcccgaaggcgtagcccgtcgttacggcggcgagtggaccgaagatgcagcgaaacgcgcgttattggccgaacgtttgcacgccaatttattaggacgtttgcaaggcgaggaacgtctcctctggctttacgaagaagtggagaaaccattgagtcgcgtgctcgcgcatatggaagctaccggtgtcaaattagacgtggcgtatttggagaatctcagccttgaagttgctgcccacatgcgccgcttggaggaagaagtattccgtttagcaggccgttcctttcgccttaactctcgcgatcagttagaacgtgtgttgttcgatgaacttggtctccctcctatcggcaagacagagaagaccggtaaacgtagcacttcagcggcggttttagaagctcttcgcgaagtccatcccattgtggacaagatcttgcagtaccgcgaactcgcgaaattgaaaggcacctatattgaccgtcttccggcattagtccacccgaaaacgggacgcctccatacccgcttcaaccaaacagccacggcgaccggtcgtttgtcctcctctgatccaaaccttcagaatattccagtacgtaccccattgggccagaagatccgccgtgcgtttgtagctgaggagggttggcgtttagtggccctcgattatcgtcaaattgaattacgtgtccttgcccatctttctggcgatgagaacctcatccgcgtgtttcaggaaggcaaagacattcacactcaaacggcaagctggatgtttggattatcagctgaagcgatcgatcctttgatgcgtcgtgcagcgaagaccatcaatttcggtgttctctacggtatgagtgcctttcgtttgtcgcaggaattaggcattccctatgaagaagctcaggcgttcattcagaaatactttcaaagctatcccaaagttaaagcatggatcgagaagactctccgtgaaggccgcacacgtggttacgtagagaccttatttggacgtcgccgctatgttcccgatttaaacgctcgcgtgaaaggcaagcgtgaagccgccgaacgcatggcgttcaacatgcctgtacagggcacggcagctgacctcatgaaacttgcaatggtgcgcctttttccacaattgcgtgaagttggtgcccgcatgctcttgcaggtccacgatgaactcttgttagaagcgccaaaagagcgtgcggaagaggtggcagccctcgcgaaagaagttatggaaggcgtgtggcccttagcggtgcctcttgaagtcgaagttggtattggcgaggattggctggctgccaaagga

SEQ ID NO: 4542 - protein, 841 aa, synthetic construct
  REGION 1..841: note = Variant of DNA polymerase I from Thermus sp. strain 2.9
MHHHHHHGGSGVLPVFEPKGRVLLVDGHHLAYRNFFALKGLTTSLGEPVQGVYGFAKSLLKALKEDGDVVIVVFDAKAPSFRHEAYEAYKAGRAPTPEDFPRQLALMKELVDLLGLERLEVPGFEADDVLATLAKKAEREGYEVQILTADRDLFQLLSPRISVLHPEGHRITPEWLWEKYGLRPEQWVDFRALAGDPSDNIPGVKGIGEKTALKLLKEWGSLENLLKNLDQVKPESVREKILAHLEDLKLSRELSRVRTDLPLEVDFGRRREPDWEGLKAFLERLEFGSLLHEFGLLESPLLAEEAPWPPPEGAFLGYRLSRPEPMWAELLALAASAQGRVYRAEDPHGALRGMFEVRGLLAKDLAVVALREGLDLPPTDDPMLLAYLLDPSNTTPEGVARRYGGEWTEDAAKRALLAERLHANLLGRLQGEERLLWLYEEVEKPLSRVLAHMEATGVKLDVAYLENLSLEVAAHMRRLEEEVFRLAGRSFRLNSRDQLERVLFDELGLPPIGKTEKTGKRSTSAAVLEALREVHPIVDKILQYRELAKLKGTYIDRLPALVHPKTGRLHTRFNQTATATGRLSSSDPNLQNIPVRTPLGQKIRRAFVAEEGWRLVALDYRQIELRVLAHLSGDENLIRVFQEGKDIHTQTASWMFGLSAEAIDPLMRRAAKTINFGVLYGMSAFRLSQELGIPYEEAQAFIQKYFQSYPKVKAWIEKTLREGRTRGYVETLFGRRRYVPDLNARVKGKREAAERMAFNMPVQGTAADLMKLAMVRLFPQLREVGARMLLQVHDELLLEAPKERAEEVAALAKEVMEGVWPLAVPLEVEVGIGEDWLAAKG

SEQ ID NO: 4543 - DNA, 2523 bp, synthetic construct
  misc_feature 1..2523: note = Variant of DNA polymerase I from Thermus sp. strain 2.9
  source 1..2523: mol_type = other DNA
atgcaccatcatcatcatcatggcggtagcggcgtgttaccggtgttcgagcctaaaggtcgcgtgcttctggttgatggccatcatctcgcgtatcgtaacttctttgccctgaaaggattaaccaccagcctgggcgagccggtacagggtgtctacggctttgcaaagtcgctcctgaaagctctgaaagaagacggtgatgtggtgattgttgtctttgatgcgaaagcgccaagttttcgccacgaagcgtacgaagcttacaaagccgggcgtgctccaacgccggaagactttcctcgccaattggcgcttatgaaggaattagtggatttgcttggcctcgaacgcttggaagttcccggtttcgaggcagacgacgtattagcgactctcgcaaagaaagccgaacgtgagggctatgaagtccagatcttgacagcagatcgcgatcttttccagcttttatctccgcgcatctcggtgttacacccggaagggcatcgtatcaccccggaatggctctgggagaaatatggtttgcgtcccgaacaatgggtggattttcgcgccttagcaggcgatccgagcgacaatattccgggagttaaaggtatcggcgagaagacggcgctcaagctccttaaagaatgggggtcgttggagaacttgcttaagaatttagatcaggtcaaaccagagtcagtgcgtgagaagattcttgctcacctcgaagacctcaaattaagccgcgaattgtcccgtgtacgcaccgatttgccgctcgaagttgatttcggtcgccgccgcgaacctgactgggagggtcttaaagcgtttttagagcgtcttgaatttggttcgctcttgcatgaattcggccttttagaaagcccgttactggccgaagaagcaccttggccaccgcccgagggcgcgtttttaggttaccgtttgagtcgcccggaaccgatgtgggccgaattactggctcttgcagcgtctgcccagggacgtgtgtatcgcgcggaagaccctcatggtgcgctccgcggcctcttcgaagtccgtggactccttgccaaagacttagctgttgttgcattgcgcgaaggtcttgatttacctccgactgatgatccaatgcttcttgcgtacctcttggacccgtcaaacacgacgcccgaaggcgtagcccgtcgttacggcggcgagtggaccgaagatgcagcgaaacgcgcgttattggccgaacgtttgcacgccaatttattaggacgtttgcaaggcgaggaacgtctcctctggctttacgaagaagtggagaaaccattgagtcgcgtgctcgcgcatatggaagctaccggtgtcaaattagacgtggcgtatttggagaatctcagccttgaagttgctgcccacatgcgccgcttggaggaagaagtattccgtttagcaggccgttcctttcgccttaactctcgcgatcagttagaacgtgtgttgttcgatgaacttggtctccctcctatcggcaagacagagaagaccggtaaacgtagcacttcagcggcggttttagaagctcttcgcgaagtccatcccattgtggacaagatcttgcagtaccgcgaactcgcgaaattgaaaggcacctatattgaccgtcttccggcattagtccacccgaaaacgggacgcctccatacccgcttcaaccaaacagccacggcgaccggtcgtttgtcctcctctgatccaaaccttcagaatattccagtacgtaccccattgggccagaagatccgccgtgcgtttgtagctgaggagggttggcgtttagtggccctcgattatcgtcaaattgaattacgtgtccttgcccatctttctggcgatgagaacctcatccgcgtgtttcaggaaggcaaagacattcacactcaaacggcaagctggatgtttggattatcagctgaagcgatcgatcctttgatgcgtcgtgcagcgaagaccatcaatttcggtgttctctacggtatgagtgcctttcgtttgtcgcaggaattaggcattccctatgaagaagctcaggcgttcattcagaaatactttcaaagctatcccaaagttaaagcatggatcgagaagactctccgtgaaggccgcacacgtggttacgtagagaccttatttggacgtcgccgctatgttcccgatttaaacgctcgcgtgaaaggcaagcgtgaagccgccgaacgcatggcgttcaacatgcctgtacagggcacggcagctgacctcatgaaacttgcaatggtgcgcctttttccacaattgcgtgaagttggtgcccgcatgctcttgcaggtccacgatgaactcttgttagaagcgccaggggagcgtgcggaagaggtggcagccctcgcgaaagaagttatggaaggcgtgtggcccttagcggtgcctcttgaagtcgaagttggtattggcgaggattggctggctgccaaagga

SEQ ID NO: 4544 - protein, 841 aa, synthetic construct
  REGION 1..841: note = Variant of DNA polymerase I from Thermus sp. strain 2.9
MHHHHHHGGSGVLPVFEPKGRVLLVDGHHLAYRNFFALKGLTTSLGEPVQGVYGFAKSLLKALKEDGDVVIVVFDAKAPSFRHEAYEAYKAGRAPTPEDFPRQLALMKELVDLLGLERLEVPGFEADDVLATLAKKAEREGYEVQILTADRDLFQLLSPRISVLHPEGHRITPEWLWEKYGLRPEQWVDFRALAGDPSDNIPGVKGIGEKTALKLLKEWGSLENLLKNLDQVKPESVREKILAHLEDLKLSRELSRVRTDLPLEVDFGRRREPDWEGLKAFLERLEFGSLLHEFGLLESPLLAEEAPWPPPEGAFLGYRLSRPEPMWAELLALAASAQGRVYRAEDPHGALRGLFEVRGLLAKDLAVVALREGLDLPPTDDPMLLAYLLDPSNTTPEGVARRYGGEWTEDAAKRALLAERLHANLLGRLQGEERLLWLYEEVEKPLSRVLAHMEATGVKLDVAYLENLSLEVAAHMRRLEEEVFRLAGRSFRLNSRDQLERVLFDELGLPPIGKTEKTGKRSTSAAVLEALREVHPIVDKILQYRELAKLKGTYIDRLPALVHPKTGRLHTRFNQTATATGRLSSSDPNLQNIPVRTPLGQKIRRAFVAEEGWRLVALDYRQIELRVLAHLSGDENLIRVFQEGKDIHTQTASWMFGLSAEAIDPLMRRAAKTINFGVLYGMSAFRLSQELGIPYEEAQAFIQKYFQSYPKVKAWIEKTLREGRTRGYVETLFGRRRYVPDLNARVKGKREAAERMAFNMPVQGTAADLMKLAMVRLFPQLREVGARMLLQVHDELLLEAPGERAEEVAALAKEVMEGVWPLAVPLEVEVGIGEDWLAAKG

SEQ ID NO: 4545 - DNA, 2523 bp, synthetic construct
  misc_feature 1..2523: note = Variant of DNA polymerase I from Thermus sp. strain 2.9
  source 1..2523: mol_type = other DNA
atgcaccatcatcatcatcatggcggtagcggcgtgttaccggtgttcgagcctaaaggtcgcgtgcttctggttgatggccatcatctcgcgtatcgtaacttctttgccctgaaaggattaaccaccagcctgggcgagccggtacagggtgtctacggctttgcaaagtcgctcctgaaagctctgaaagaagacggtgatgtggtgattgttgtctttgatgcgaaagcgccaagttttcgccacgaagcgtacgaagcttacaaagccgggcgtgctccaacgccggaagactttcctcgccaattggcgcttatgaaggaattagtggatttgcttggcctcgaacgcttggaagttcccggtttcgaggcagacgacgtattagcgactctcgcaaagaaagccgaacgtgagggctatgaagtccagatcttgacagcagatcgcgatcttttccagcttttatctccgcgcatctcggtgttacacccggaagggcatcgtatcaccccggaatggctctgggagaaatatggtttgcgtcccgaacaatgggtggattttcgcgccttagcaggcgatccgagcgacaatattccgggagttaaaggtatcggcgagaagacggcgctcaagctccttaaagaatgggggtcgttggagaacttgcttaagaatttagatcaggtcaaaccagagtcagtgcgtgagaagattcttgctcacctcgaagacctcaaattaagccgcgaattgtcccgtgtacgcaccgatttgccgctcgaagttgatttcggtcgccgccgcgaacctgactgggagggtcttaaagcgtttttagagcgtcttgaatttggttcgctcttgcatgaattcggccttttagaaagcccgttactggccgaagaagcaccttggccaccgcccgagggcgcgtttttaggttaccgtttgagtcgcccggaaccgatgtgggccgaattactggctcttgcagcgtctgcccagggacgtgtgtatcgcgcggaagaccctcatggtgcgctccgcggcctcttcgaagtccgtggactccttgccaaagacttagctgttgttgcattgcgcgaaggtcttgatttacctccgactgatgatccaatgcttcttgcgtacctcttggacccgtcaaacacgacgcccgaaggcgtagcccgtcgttacggcggcgagtggaccgaagatgcagcgaaacgcgcgttattggccgaacgtttgcacgccaatttattaggacgtttgcaaggcgaggaacgtctcctctggctttacgaagaagtggagaaaccattgagtcgcgtgctcgcgcatatggaagctaccggtgtcaaattagacgtggcgtatttggagaatctcagccttgaagttgctgcccacatgcgccgcttggaggaagaagtattccgtttagcaggccgttcctttcgccttaactctcgcgatcagttagaacgtgtgttgttcgatgaacttggtctccctcctatcggcaagacagagaagaccggtaaacgtagcacttcagcggcggttttagaagctcttcgcgaagtccatcccattgtggacaagatcttgcagtaccgcgaactcgcgaaatataaaggcacctatattgaccgtcttccggcattagtccacccgaaaacgggacgcctccatacccgcttcaaccaaacagccacggcgaccggtcgtttgtcctcctctgatccaaaccttcagaatattccagtacgtaccccattgggccagaagatccgccgtgcgtttgtagctgaggagggttggcgtttagtggccctcgattatcgtcaaattgaattacgtgtccttgcccatctttctggcgatgagaacctcatccgcgtgtttcaggaaggcaaagacattcacactcaaacggcaagctggatgtttggattatcagctgaagcgatcgatcctttgatgcgtcgtgcagcgaagaccatcaatttcggtgttctctacggtatgagtgcctttcgtttgtcgcaggaattaggcattccctatgaagaagctcaggcgttcattcagaaatactttcaaagctatcccaaagttaaagcatggatcgagaagactctccgtgaaggccgcacacgtggttacgtagagaccttatttggacgtcgccgctatgttcccgatttaaacgctcgcgtgaaaggcaagcgtgaagccgccgaacgcatggcgttcaacatgcctgtacagggcacggcagctgacctcatgaaacttgcaatggtgcgcctttttccacaattgcgtgaagttggtgcccgcatgctcttgcaggtccacgatgaactcttgttagaagcgccaaaagagcgtgcggaagaggtggcagccctcgcgaaagaagttatggaaggcgtgtggcccttagcggtgcctcttgaagtcgaagttggtattggcgaggattggctggctgccaaagga

SEQ ID NO: 4546 - protein, 841 aa, synthetic construct
  REGION 1..841: note = Variant of DNA polymerase I from Thermus sp. strain 2.9
MHHHHHHGGSGVLPVFEPKGRVLLVDGHHLAYRNFFALKGLTTSLGEPVQGVYGFAKSLLKALKEDGDVVIVVFDAKAPSFRHEAYEAYKAGRAPTPEDFPRQLALMKELVDLLGLERLEVPGFEADDVLATLAKKAEREGYEVQILTADRDLFQLLSPRISVLHPEGHRITPEWLWEKYGLRPEQWVDFRALAGDPSDNIPGVKGIGEKTALKLLKEWGSLENLLKNLDQVKPESVREKILAHLEDLKLSRELSRVRTDLPLEVDFGRRREPDWEGLKAFLERLEFGSLLHEFGLLESPLLAEEAPWPPPEGAFLGYRLSRPEPMWAELLALAASAQGRVYRAEDPHGALRGLFEVRGLLAKDLAVVALREGLDLPPTDDPMLLAYLLDPSNTTPEGVARRYGGEWTEDAAKRALLAERLHANLLGRLQGEERLLWLYEEVEKPLSRVLAHMEATGVKLDVAYLENLSLEVAAHMRRLEEEVFRLAGRSFRLNSRDQLERVLFDELGLPPIGKTEKTGKRSTSAAVLEALREVHPIVDKILQYRELAKYKGTYIDRLPALVHPKTGRLHTRFNQTATATGRLSSSDPNLQNIPVRTPLGQKIRRAFVAEEGWRLVALDYRQIELRVLAHLSGDENLIRVFQEGKDIHTQTASWMFGLSAEAIDPLMRRAAKTINFGVLYGMSAFRLSQELGIPYEEAQAFIQKYFQSYPKVKAWIEKTLREGRTRGYVETLFGRRRYVPDLNARVKGKREAAERMAFNMPVQGTAADLMKLAMVRLFPQLREVGARMLLQVHDELLLEAPKERAEEVAALAKEVMEGVWPLAVPLEVEVGIGEDWLAAKG

SEQ ID NO: 4547 - DNA, 2523 bp, synthetic construct
  misc_feature 1..2523: note = Variant of DNA polymerase I from Thermus sp. strain 2.9
  source 1..2523: mol_type = other DNA
atgcaccatcatcatcatcatggcggtagcggcgtgttaccggtgttcgagcctaaaggtcgcgtgcttctggttgatggccatcatctcgcgtatcgtaacttctttgccctgaaaggattaaccaccagcctgggcgagccggtacagggtgtctacggctttgcaaagtcgctcctgaaagctctgaaagaagacggtgatgtggtgattgttgtctttgatgcgaaagcgccaagttttcgccacgaagcgtacgaagcttacaaagccgggcgtgctccaacgccggaagactttcctcgccaattggcgcttatgaaggaattagtggatttgcttggcctcgaacgcttggaagttcccggtttcgaggcagacgacgtattagcgactctcgcaaagaaagccgaacgtgagggctatgaagtccagatcttgacagcagatcgcgatcttttccagcttttatctccgcgcatctcggtgttacacccggaagggcatcgtatcaccccggaatggctctgggagaaatatggtttgcgtcccgaacaatgggtggattttcgcgccttagcaggcgatccgagcgacaatattccgggagttaaaggtatcggcgagaagacggcgctcaagctccttaaagaatgggggtcgttggagaacttgcttaagaatttagatcaggtcaaaccagagtcagtgcgtgagaagattcttgctcacctcgaagacctcaaattaagccgcgaattgtcccgtgtacgcaccgatttgccgctcgaagttgatttcggtcgccgccgcgaacctgactgggagggtcttaaagcgtttttagagcgtcttgaatttggttcgctcttgcatgaattcggccttttagaaagcccgttactggccgaagaagcaccttggccaccgcccgagggcgcgtttttaggttaccgtttgagtcgcccggaaccgatgtgggccgaattactggctcttgcagcgtctgcccagggacgtgtgtatcgcgcggaagaccctcatggtgcgctccgcggcctcttcgaagtccgtggactccttgccaaagacttagctgttgttgcattgcgcgaaggtcttgatttacctccgactgatgatccaatgcttcttgcgtacctcttggacccgtcaaacacgacgcccgaaggcgtagcccgtcgttacggcggcgagtggaccgaagatgcagcgaaacgcgcgttattggccgaacgtttgcacgccaatttattaggacgtttgcaaggcgaggaacgtctcctctggctttacgaagaagtggagaaaccattgagtcgcgtgctcgcgcatatggaagctaccggtgtcaaattagacgtggcgtatttggagaatctcagccttgaagttgctgcccacatgcgccgctgggaggaagaagtattccgtttagcaggccgttcctttcgccttaactctcgcgatcagttagaacgtgtgttgttcgatgaacttggtctccctcctatcggcaagacagagaagaccggtaaacgtagcacttcagcggcggttttagaagctcttcgcgaagtccatcccattgtggacaagatcttgcagtaccgcgaactcgcgaaattgaaaggcacctatattgaccgtcttccggcattagtccacccgaaaacgggacgcctccatacccgcttcaaccaaacagccacggcgaccggtcgtttgtcctcctctgatccaaaccttcagaatattccagtacgtaccccattgggccagaagatccgccgtgcgtttgtagctgaggagggttggcgtttagtggccctcgattatcgtcaaattgaattacgtgtccttgcccatctttctggcgatgagaacctcatccgcgtgtttcaggaaggcaaagacattcacactcaaacggcaagctggatgtttggattatcagctgaagcgatcgatcctttgatgcgtcgtgcagcgaagaccatcaatttcggtgttctctacggtatgagtgcctttcgtttgtcgcaggaattaggcattccctatgaagaagctcaggcgttcattcagaaatactttcaaagctatcccaaagttaaagcatggatcgagaagactctccgtgaaggccgcacacgtggttacgtagagaccttatttggacgtcgccgctatgttcccgatttaaacgctcgcgtgaaaggcaagcgtgaagccgccgaacgcatggcgttcaacatgcctgtacagggcacggcagctgacctcatgaaacttgcaatggtgcgcctttttccacaattgcgtgaagttggtgcccgcatgctcttgcaggtccacgatgaactcttgttagaagcgccaaaagagcgtgcggaagaggtggcagccctcgcgaaagaagttatggaaggcgtgtggcccttagcggtgcctcttgaagtcgaagttggtattggcgaggattggctggctgccaaagga

SEQ ID NO: 4548 - protein, 841 aa, synthetic construct
  REGION 1..841: note = Variant of DNA polymerase I from Thermus sp. strain 2.9
MHHHHHHGGSGVLPVFEPKGRVLLVDGHHLAYRNFFALKGLTTSLGEPVQGVYGFAKSLLKALKEDGDVVIVVFDAKAPSFRHEAYEAYKAGRAPTPEDFPRQLALMKELVDLLGLERLEVPGFEADDVLATLAKKAEREGYEVQILTADRDLFQLLSPRISVLHPEGHRITPEWLWEKYGLRPEQWVDFRALAGDPSDNIPGVKGIGEKTALKLLKEWGSLENLLKNLDQVKPESVREKILAHLEDLKLSRELSRVRTDLPLEVDFGRRREPDWEGLKAFLERLEFGSLLHEFGLLESPLLAEEAPWPPPEGAFLGYRLSRPEPMWAELLALAASAQGRVYRAEDPHGALRGLFEVRGLLAKDLAVVALREGLDLPPTDDPMLLAYLLDPSNTTPEGVARRYGGEWTEDAAKRALLAERLHANLLGRLQGEERLLWLYEEVEKPLSRVLAHMEATGVKLDVAYLENLSLEVAAHMRRWEEEVFRLAGRSFRLNSRDQLERVLFDELGLPPIGKTEKTGKRSTSAAVLEALREVHPIVDKILQYRELAKLKGTYIDRLPALVHPKTGRLHTRFNQTATATGRLSSSDPNLQNIPVRTPLGQKIRRAFVAEEGWRLVALDYRQIELRVLAHLSGDENLIRVFQEGKDIHTQTASWMFGLSAEAIDPLMRRAAKTINFGVLYGMSAFRLSQELGIPYEEAQAFIQKYFQSYPKVKAWIEKTLREGRTRGYVETLFGRRRYVPDLNARVKGKREAAERMAFNMPVQGTAADLMKLAMVRLFPQLREVGARMLLQVHDELLLEAPKERAEEVAALAKEVMEGVWPLAVPLEVEVGIGEDWLAAKG

SEQ ID NO: 4549 - DNA, 2523 bp, synthetic construct
  misc_feature 1..2523: note = Variant of DNA polymerase I from Thermus sp. strain 2.9
  source 1..2523: mol_type = other DNA
atgcaccatcatcatcatcatggcggtagcggcgtgttaccggtgttcgagcctaaaggtcgcgtgcttctggttgatggccatcatctcgcgtatcgtaacttctttgccctgaaaggattaaccaccagcctgggcgagccggtacagggtgtctacggctttgcaaagtcgctcctgaaagctctgaaagaagacggtgatgtggtgattgttgtctttgatgcgaaagcgccaagttttcgccacgaagcgtacgaagcttacaaagccgggcgtgctccaacgccggaagactttcctcgccaattggcgcttatgaaggaattagtggatttgcttggcctcgaacgcttggaagttcccggtttcgaggcagacgacgtattagcgactctcgcaaagaaagccgaacgtgagggctatgaagtccagatcttgacagcagatcgcgatcttttccagcttttatctccgcgcatctcggtgttacacccggaagggcatcgtatcaccccggaatggctctgggagaaatatggtttgcgtcccgaacaatgggtggattttcgcgccttagcaggcgatccgagcgacaatattccgggagttaaaggtatcggcgagaagacggcgctcaagctccttaaagaatgggggtcgttggagaacttgcttaagaatttagatcaggtcaaaccagagtcagtgcgtgagaagattcttgctcacctcgaagacctcaaattaagccgcgaattgtcccgtgtacgcaccgatttgccgctcgaagttgatttcggtcgccgccgcgaacctgactgggagggtcttaaagcgtttttagagcgtcttgaatttggttcgctcttgcatgaattcggccttttagaaagcccgttactggccgaagaagcaccttggccaccgcccgagggcgcgtttttaggttaccgtttgagtcgcccggaaccgatgtgggccgaattactggctcttgcagcgtctgcccagggacgtgtgtatcgcgcggaagaccctcatggtgcgctccgcggcctcttcgaagtccgtggactccttgccaaagacttagctgttgttgcattgcgcgaaggtcttgatttacctccgactgatgatccaatgcttcttgcgtacctcttggacccgtcaaacacgacgcccgaaggcgtagcccgtcgttacggcggcgagtggaccgaagatgcagcgaaacgcgcgttattggccgaacgtttgcacgccaatttattaggacgtttgcaaggcgaggaacgtctcctctggctttacgaagaagtggagaaaccattgagtcgcgtgctcgcgcatatggaagctaccggtgtcaaattagacttggcgtatttggagaatctcagccttgaagttgctgcccacatgcgccgcttggaggaagaagtattccgtttagcaggccgttcctttcgccttaactctcgcgatcagttagaacgtgtgttgttcgatgaacttggtctccctcctatcggcaagacagagaagaccggtaaacgtagcacttcagcggcggttttagaagctcttcgcgaagtccatcccattgtggacaagatcttgcagtaccgcgaactcgcgaaattgaaaggcacctatattgaccgtcttccggcattagtccacccgaaaacgggacgcctccatacccgcttcaaccaaacagccacggcgaccggtcgtttgtcctcctctgatccaaaccttcagaatattccagtacgtaccccattgggccagaagatccgccgtgcgtttgtagctgaggagggttggcgtttagtggccctcgattatcgtcaaattgaattacgtgtccttgcccatctttctggcgatgagaacctcatccgcgtgtttcaggaaggcaaagacattcacactcaaacggcaagctggatgtttggattatcagctgaagcgatcgatcctttgatgcgtcgtgcagcgaagaccatcaatttcggtgttctctacggtatgagtgcctttcgtttgtcgcaggaattaggcattccctatgaagaagctcaggcgttcattcagaaatactttcaaagctatcccaaagttaaagcatggatcgagaagactctccgtgaaggccgcacacgtggttacgtagagaccttatttggacgtcgccgctatgttcccgatttaaacgctcgcgtgaaaggcaagcgtgaagccgccgaacgcatggcgttcaacatgcctgtacagggcacggcagctgacctcatgaaacttgcaatggtgcgcctttttccacaattgcgtgaagttggtgcccgcatgctcttgcaggtccacgatgaactcttgttagaagcgccaaaagagcgtgcggaagaggtggcagccctcgcgaaagaagttatggaaggcgtgtggcccttagcggtgcctcttgaagtcgaagttggtattggcgaggattggctggctgccaaagga

SEQ ID NO: 4550 - protein, 841 aa, synthetic construct
  REGION 1..841: note = Variant of DNA polymerase I from Thermus sp. strain 2.9
MHHHHHHGGSGVLPVFEPKGRVLLVDGHHLAYRNFFALKGLTTSLGEPVQGVYGFAKSLLKALKEDGDVVIVVFDAKAPSFRHEAYEAYKAGRAPTPEDFPRQLALMKELVDLLGLERLEVPGFEADDVLATLAKKAEREGYEVQILTADRDLFQLLSPRISVLHPEGHRITPEWLWEKYGLRPEQWVDFRALAGDPSDNIPGVKGIGEKTALKLLKEWGSLENLLKNLDQVKPESVREKILAHLEDLKLSRELSRVRTDLPLEVDFGRRREPDWEGLKAFLERLEFGSLLHEFGLLESPLLAEEAPWPPPEGAFLGYRLSRPEPMWAELLALAASAQGRVYRAEDPHGALRGLFEVRGLLAKDLAVVALREGLDLPPTDDPMLLAYLLDPSNTTPEGVARRYGGEWTEDAAKRALLAERLHANLLGRLQGEERLLWLYEEVEKPLSRVLAHMEATGVKLDLAYLENLSLEVAAHMRRLEEEVFRLAGRSFRLNSRDQLERVLFDELGLPPIGKTEKTGKRSTSAAVLEALREVHPIVDKILQYRELAKLKGTYIDRLPALVHPKTGRLHTRFNQTATATGRLSSSDPNLQNIPVRTPLGQKIRRAFVAEEGWRLVALDYRQIELRVLAHLSGDENLIRVFQEGKDIHTQTASWMFGLSAEAIDPLMRRAAKTINFGVLYGMSAFRLSQELGIPYEEAQAFIQKYFQSYPKVKAWIEKTLREGRTRGYVETLFGRRRYVPDLNARVKGKREAAERMAFNMPVQGTAADLMKLAMVRLFPQLREVGARMLLQVHDELLLEAPKERAEEVAALAKEVMEGVWPLAVPLEVEVGIGEDWLAAKG

SEQ ID NO: 4551 - DNA, 2523 bp, synthetic construct
  misc_feature 1..2523: note = Variant of DNA polymerase I from Thermus sp. strain 2.9
  source 1..2523: mol_type = other DNA
atgcaccatcatcatcatcatggcggtagcggcgtgttaccggtgttcgagcctaaaggtcgcgtgcttctggttgatggccatcatctcgcgtatcgtaacttctttgccctgaaaggattaaccaccagcctgggcgagccggtacagggtgtctacggctttgcaaagtcgctcctgaaagctctgaaagaagacggtgatgtggtgattgttgtctttgatgcgaaagcgccaagttttcgccacgaagcgtacgaagcttacaaagccgggcgtgctccaacgccggaagactttcctcgccaattggcgcttatgaaggaattagtggatttgcttggcctcgaacgcttggaagttcccggtttcgaggcagacgacgtattagcgactctcgcaaagaaagccgaacgtgagggctatgaagtccagatcttgacagcagatcgcgatcttttccagcttttatctccgcgcatctcggtgttacacccggaagggcatcgtatcaccccggaatggctctgggagaaatatggtttgcgtcccgaacaatgggtggattttcgcgccttagcaggcgatccgagcgacaatattccgggagttaaaggtatcggcgagaagacggcgctcaagctccttaaagaatgggggtcgttggagaacttgcttaagaatttagatcaggtcaaaccagagtcagtgcgtgagaagattcttgctcacctcgaagacctcaaattaagccgcgaattgtcccgtgtacgcaccgatttgccgctcgaagttgatttcggtcgccgccgcgaacctgactgggagggtcttaaagcgtttttagagcgtcttgaatttggttcgctcttgcatgaattcggccttttagaaagcccgttactggccgaagaagcaccttggccaccgcccgagggcgcgtttttaggttaccgtttgagtcgcccggaaccgatgtgggccgaattactggctcttgcagcgtctgcccagggacgtgtgtatcgcgcggaagaccctcatggtgcgctccgcggcctcttcgaagtccgtggactccttgccaaagacttagctgttgttgcattgcgcgaaggtcttgatttacctccgactgatgatccaatgcttcttgcgtacctcttggacccgtcaaacacgacgcccgaaggcgtagcccgtcgttacggcggcgagtggaccgaagatgcagcgaaacgcgcgttattggccgaacgtttgcacgccaatttattaggacgtttgcaatctgaggaacgtctcctctggctttacgaagaagtggagaaaccattgagtcgcgtgctcgcgcatatggaagctaccggtgtcaaattagacgtggcgtatttggagaatctcagccttgaagttgctgcccacatgcgccgcttggaggaagaagtattccgtttagcaggccgttcctttcgccttaactctcgcgatcagttagaacgtgtgttgttcgatgaacttggtctccctcctatcggcaagacagagaagaccggtaaacgtagcacttcagcggcggttttagaagctcttcgcgaagtccatcccattgtggacaagatcttgcagtaccgcgaactcgcgaaattgaaaggcacctatattgaccgtcttccggcattagtccacccgaaaacgggacgcctccatacccgcttcaaccaaacagccacggcgaccggtcgtttgtcctcctctgatccaaaccttcagaatattccagtacgtaccccattgggccagaagatccgccgtgcgtttgtagctgaggagggttggcgtttagtggccctcgattatcgtcaaattgaattacgtgtccttgcccatctttctggcgatgagaacctcatccgcgtgtttcaggaaggcaaagacattcacactcaaacggcaagctggatgtttggattatcagctgaagcgatcgatcctttgatgcgtcgtgcagcgaagaccatcaatttcggtgttctctacggtatgagtgcctttcgtttgtcgcaggaattaggcattccctatgaagaagctcaggcgttcattcagaaatactttcaaagctatcccaaagttaaagcatggatcgagaagactctccgtgaaggccgcacacgtggttacgtagagaccttatttggacgtcgccgctatgttcccgatttaaacgctcgcgtgaaaggcaagcgtgaagccgccgaacgcatggcgttcaacatgcctgtacagggcacggcagctgacctcatgaaacttgcaatggtgcgcctttttccacaattgcgtgaagttggtgcccgcatgctcttgcaggtccacgatgaactcttgttagaagcgccaaaagagcgtgcggaagaggtggcagccctcgcgaaagaagttatggaaggcgtgtggcccttagcggtgcctcttgaagtcgaagttggtattggcgaggattggctggctgccaaagga

SEQ ID NO: 4552 - protein, 841 aa, synthetic construct
  REGION 1..841: note = Variant of DNA polymerase I from Thermus sp. strain 2.9
MHHHHHHGGSGVLPVFEPKGRVLLVDGHHLAYRNFFALKGLTTSLGEPVQGVYGFAKSLLKALKEDGDVVIVVFDAKAPSFRHEAYEAYKAGRAPTPEDFPRQLALMKELVDLLGLERLEVPGFEADDVLATLAKKAEREGYEVQILTADRDLFQLLSPRISVLHPEGHRITPEWLWEKYGLRPEQWVDFRALAGDPSDNIPGVKGIGEKTALKLLKEWGSLENLLKNLDQVKPESVREKILAHLEDLKLSRELSRVRTDLPLEVDFGRRREPDWEGLKAFLERLEFGSLLHEFGLLESPLLAEEAPWPPPEGAFLGYRLSRPEPMWAELLALAASAQGRVYRAEDPHGALRGLFEVRGLLAKDLAVVALREGLDLPPTDDPMLLAYLLDPSNTTPEGVARRYGGEWTEDAAKRALLAERLHANLLGRLQSEERLLWLYEEVEKPLSRVLAHMEATGVKLDVAYLENLSLEVAAHMRRLEEEVFRLAGRSFRLNSRDQLERVLFDELGLPPIGKTEKTGKRSTSAAVLEALREVHPIVDKILQYRELAKLKGTYIDRLPALVHPKTGRLHTRFNQTATATGRLSSSDPNLQNIPVRTPLGQKIRRAFVAEEGWRLVALDYRQIELRVLAHLSGDENLIRVFQEGKDIHTQTASWMFGLSAEAIDPLMRRAAKTINFGVLYGMSAFRLSQELGIPYEEAQAFIQKYFQSYPKVKAWIEKTLREGRTRGYVETLFGRRRYVPDLNARVKGKREAAERMAFNMPVQGTAADLMKLAMVRLFPQLREVGARMLLQVHDELLLEAPKERAEEVAALAKEVMEGVWPLAVPLEVEVGIGEDWLAAKG

SEQ ID NO: 4553 - DNA, 2523 bp, synthetic construct
  misc_feature 1..2523: note = Variant of DNA polymerase I from Thermus sp. strain 2.9
  source 1..2523: mol_type = other DNA
atgcaccatcatcatcatcatggcggtagcggcgtgttaccggtgttcgagcctaaaggtcgcgtgcttctggttgatggccatcatctcgcgtatcgtaacttctttgccctgaaaggattaaccaccagcctgggcgagccggtacagggtgtctacggctttgcaaagtcgctcctgaaagctctgaaagaagacggtgatgtggtgattgttgtctttgatgcgaaagcgccaagttttcgccacgaagcgtacgaagcttacaaagccgggcgtgctccaacgccggaagactttcctcgccaattggcgcttatgaaggaattagtggatttgcttggcctcgaacgcttggaagttcccggtttcgaggcagacgacgtattagcgactctcgcaaagaaagccgaacgtgagggctatgaagtccagatcttgacagcagatcgcgatcttttccagcttttatctccgcgcatctcggtgttacacccggaagggcatcgtatcaccccggaatggctctgggagaaatatggtttgcgtcccgaacaatgggtggattttcgcgccttagcaggcgatccgagcgacaatattccgggagttaaaggtatcggcgagaagacggcgctcaagctccttaaagaatgggggtcgttggagaacttgcttaagaatttagatcaggtcaaaccagagtcagtgcgtgagaagattcttgctcacctcgaagacctcgagttaagccgcgaattgtcccgtgtacgcaccgatttgccgctcgaagttgatttcggtcgccgccgcgaacctgactgggagggtcttaaagcgtttttagagcgtcttgaatttggttcgctcttgcatgaattcggccttttagaaagcccgttactggccgaagaagcaccttggccaccgcccgagggcgcgtttttaggttaccgtttgagccgcccggaaccgatgtgggccgaattactggctcttgcagcgtctgcccagggacgtgtgtatcgcgcggaagaccctcatggtgcgctccgcggcctcttcgaagtccgtggactccttgccaaagacttagctgttgttgcattgcgcgaaggtcttgatttacctccgactgatgatccaatgcttcttgcgtacctcttggacccgtcaaacacgacgcccgaaggcgtagcccgtcgttacggcggcgagtggaccgaagatgcagcgaaacgcgcgttattggccgaacgtttgcacgagaatttacgtggacgtttgcaaggcgaggaacgtctcctctggctttacgaagaagtggagaaaccattgagtcgcgtgctcgcgcatatggaagctaccggtgtcaaattagacgtggcgtatttggagaatctcagccttgaagttgctgcccacatgcgccgcttggaggaagaagtattccgtttagcaggccgttcctttcgccttaactctcgcgatcagttagaacgtgtgttgttcgatgaacttggtctccctcctatcggcaagacagagaagaccggtaaacgtagcacttcagcggcggttttagaagctcttcgcgaagtccatcccattgtggacaagatcttgcagtaccgcgaactcgcgaaattgaaaggcacctatattgaccgtcttccggcattagtccacccgaaaacgggacgcctccatacccgcttcaaccaaacagccacggcgaccggtcgtttgtcctcctctgatccaaaccttcagaatattccagtacgtaccccattgggccagaagatccgccgtgcgtttgtagctgaggagggttggcgtttagtggccctcgattatcgtcaaattgaattacgtgtccttgcccatctttctggcgatgagaacctcatccgcgtgtttcaggaaggcaaagacattcacactcaaacggcaagctggatgtttggattatcagctgaagcgatcgatcctttgatgcgtcgtgcagcgaagaagatcaatttcggtgttctctacggtatgagtgcctttcgtttgtcgcaggaattaggcattccctatgaagaagctcaggcgttcattcagaaatactttcaaagctatcccaaagttaaagcatggatcgagaagactctccgtgaaggccgcacccgtggttacgtagagaccttatttggacgtcgccgctatgttcccgatttaaacgctcgcgtgaaaggcaagcgtgaagccgccgaacgcatggcgttcaacatgcctgtacagggcacggcagctgacctcatgaaacttgcaatggtgcgcctttttccacaattgcgtgaagttggtgcccgcatgctcttgcaggtccacgatgaactcttgttagaagcgccaaaagagcgtgcggaagaggtggcagccctcgcgaaagaagttatggaaggcgtgtggcccttagcggtgcctcttgaagtcgaagttggtattggcgaggattggctggctgccaaagga

SEQ ID NO: 4554 - protein, 841 aa, synthetic construct
  REGION 1..841: note = Variant of DNA polymerase I from Thermus sp. strain 2.9
MHHHHHHGGSGVLPVFEPKGRVLLVDGHHLAYRNFFALKGLTTSLGEPVQGVYGFAKSLLKALKEDGDVVIVVFDAKAPSFRHEAYEAYKAGRAPTPEDFPRQLALMKELVDLLGLERLEVPGFEADDVLATLAKKAEREGYEVQILTADRDLFQLLSPRISVLHPEGHRITPEWLWEKYGLRPEQWVDFRALAGDPSDNIPGVKGIGEKTALKLLKEWGSLENLLKNLDQVKPESVREKILAHLEDLELSRELSRVRTDLPLEVDFGRRREPDWEGLKAFLERLEFGSLLHEFGLLESPLLAEEAPWPPPEGAFLGYRLSRPEPMWAELLALAASAQGRVYRAEDPHGALRGLFEVRGLLAKDLAVVALREGLDLPPTDDPMLLAYLLDPSNTTPEGVARRYGGEWTEDAAKRALLAERLHENLRGRLQGEERLLWLYEEVEKPLSRVLAHMEATGVKLDVAYLENLSLEVAAHMRRLEEEVFRLAGRSFRLNSRDQLERVLFDELGLPPIGKTEKTGKRSTSAAVLEALREVHPIVDKILQYRELAKLKGTYIDRLPALVHPKTGRLHTRFNQTATATGRLSSSDPNLQNIPVRTPLGQKIRRAFVAEEGWRLVALDYRQIELRVLAHLSGDENLIRVFQEGKDIHTQTASWMFGLSAEAIDPLMRRAAKKINFGVLYGMSAFRLSQELGIPYEEAQAFIQKYFQSYPKVKAWIEKTLREGRTRGYVETLFGRRRYVPDLNARVKGKREAAERMAFNMPVQGTAADLMKLAMVRLFPQLREVGARMLLQVHDELLLEAPKERAEEVAALAKEVMEGVWPLAVPLEVEVGIGEDWLAAKG

SEQ ID NO: 4555 - DNA, 2523 bp, synthetic construct
  misc_feature 1..2523: note = Variant of DNA polymerase I from Thermus sp. strain 2.9
  source 1..2523: mol_type = other DNA
atgcaccatcatcatcatcatggcggtagcggcgtgttaccggtgttcgagcctaaaggtcgcgtgcttctggttgatggccatcatctcgcgtatcgtaacttctttgccctgaaaggattaaccaccagcctgggcgagccggtacagggtgtctacggctttgcaaagtcgctcctgaaagctctgaaagaagacggtgatgtggtgattgttgtctttgatgcgaaagcgccaagttttcgccacgaagcgtacgaagcttacaaagccgggcgtgctccaacgccggaagactttcctcgccaattggcgcttatgaaggaattagtggatttgcttggcctcgaacgcttggaagttcccggtttcgaggcagacgacgtattagcgactctcgcaaagaaagccgaacgtgagggctatgaagtccagatcttgacagcagatcgcgatcttttccagcttttatctccgcgcatctcggtgttacacccggaagggcatcgtatcaccccggaatggctctgggagaaatatggtttgcgtcccgaacaatgggtggattttcgcgccttagcaggcgatccgagcgacaatattccgggagttaaaggtatcggcgagaagacggcgctcaagctccttaaagaatgggggtcgttggagaacttgcttaagaatttagatcaggtcaaaccagagtcagtgcgtgagaagattcttgctcacctcgaagacctcaaattaagccgcgaattgtcccgtgtacgcaccgatttgccgctcgaagttgatttcggtcgccgccgcgaacctgactgggagggtcttaaagcgtttttagagcgtcttgaatttggttcgctcttgcatgaattcggccttttagaaagcccgttactggccgaagaagcaccttggccaccgcccgagggcgcgtttttaggttaccgtttgagtcgcccggaaccgatgtgggccgaattactggctcttgcagcgtctgcccagggacgtgtgtatcgcgcggaagaccctcatggtgcgctccgcggcctcttcgaagtccgtggactccttgccaaagacttagctgttgttgcattgcgcgaaggtcttgatttacctccgactgatgatccaatgcttcttgcgtacctcttggacccgtcaaacacgacgcccgaaggcgtagcccgtcgttacggcggcgagtggaccgaagatgcagcgaaacgcgcgttattggccgaacgtttgcacgccaatttattaggacgtttgcaaggcgaggaacgtctcctctggctttacgaagaagtggagaaaccattgagtcgcgtgctcgcgcatatggaagctaccggtgtcaaattagacgtggcgtatttggagaatctcagccttgaagttgctgcccacatgcgccgcttggaggaagaagtattccgtttagcaggccgttcctttcgccttaactctcgcgatcagttagaacgtgtgttgttcgatgaacttggtctccctcctatcggcaagacagagaagaccggtaaacgtagcacttcagcggcggttttagaagctcttcgcgaagtccatcccattgtggacaagatcttgcagtaccgcgaactcgcgaaattgaaaggcacctatattgaccgtcttccggcattagtccacccgaaaacgggacgcctccatacccgcttcaaccaaacagccacggcgaccggtcgtttgtcctcctctgatccaaaccttcagaatattccagtacgtaccccattgggccagaagatccgccgtgcgtttgtagctgaggagggttggcgtttagtggccctcgattatcgtcaaattgaattacgtgtccttgcccatctttctggcgatgagaacctcatccgcgtgtttcaggaaggcaaagacattcacactcaaacggcaagctggatgtttggattatcagctgaagcgatcgatcctttgatgcgtcgtgcagcgaagaccatcaatttcggtgttctctacggtatgagtgcctttcgtttgtcgcaggaattaggcattccctatgaagaagctcaggcgttcattcagaaatactttcaaagctatcccaaagttaaagcatggatcgagaagactctccgtgaaggccgcacacgtggttacgtagagaccttatttggacgtcgccgctatgttcccgatttaaacgctcgcgtgaaaggcaagcgtgaagccgccgaacgccgggcgttcaacatgcctgtacagggcacggcagctgacctcatgaaacttgcaatggtgcgcctttttccacaattgcgtgaagttggtgcccgcatgctcttgcaggtccacgatgaactcttgttagaagcgccaaaagagcgtgcggaagaggtggcagccctcgcgaaagaagttatggaaggcgtgtggcccttagcggtgcctcttgaagtcgaagttggtattggcgaggattggctggctgccaaagga

SEQ ID NO: 4556 - protein, 841 aa, synthetic construct
  REGION 1..841: note = Variant of DNA polymerase I from Thermus sp. strain 2.9
MHHHHHHGGSGVLPVFEPKGRVLLVDGHHLAYRNFFALKGLTTSLGEPVQGVYGFAKSLLKALKEDGDVVIVVFDAKAPSFRHEAYEAYKAGRAPTPEDFPRQLALMKELVDLLGLERLEVPGFEADDVLATLAKKAEREGYEVQILTADRDLFQLLSPRISVLHPEGHRITPEWLWEKYGLRPEQWVDFRALAGDPSDNIPGVKGIGEKTALKLLKEWGSLENLLKNLDQVKPESVREKILAHLEDLKLSRELSRVRTDLPLEVDFGRRREPDWEGLKAFLERLEFGSLLHEFGLLESPLLAEEAPWPPPEGAFLGYRLSRPEPMWAELLALAASAQGRVYRAEDPHGALRGLFEVRGLLAKDLAVVALREGLDLPPTDDPMLLAYLLDPSNTTPEGVARRYGGEWTEDAAKRALLAERLHANLLGRLQGEERLLWLYEEVEKPLSRVLAHMEATGVKLDVAYLENLSLEVAAHMRRLEEEVFRLAGRSFRLNSRDQLERVLFDELGLPPIGKTEKTGKRSTSAAVLEALREVHPIVDKILQYRELAKLKGTYIDRLPALVHPKTGRLHTRFNQTATATGRLSSSDPNLQNIPVRTPLGQKIRRAFVAEEGWRLVALDYRQIELRVLAHLSGDENLIRVFQEGKDIHTQTASWMFGLSAEAIDPLMRRAAKTINFGVLYGMSAFRLSQELGIPYEEAQAFIQKYFQSYPKVKAWIEKTLREGRTRGYVETLFGRRRYVPDLNARVKGKREAAERRAFNMPVQGTAADLMKLAMVRLFPQLREVGARMLLQVHDELLLEAPKERAEEVAALAKEVMEGVWPLAVPLEVEVGIGEDWLAAKG

SEQ ID NO: 4557 - DNA, 2523 bp, synthetic construct
  misc_feature 1..2523: note = Variant of DNA polymerase I from Thermus sp. strain 2.9
  source 1..2523: mol_type = other DNA
atgcaccatcatcatcatcatggcggtagcggcgtgttaccggtgttcgagcctaaaggtcgcgtgcttctggttgatggccatcatctcgcgtatcgtaacttctttgccctgaaaggattaaccaccagcctgggcgagccggtacagggtgtctacggctttgcaaagtcgctcctgaaagctctgaaagaagacggtgatgtggtgattgttgtctttgatgcgaaagcgccaagttttcgccacgaagcgtacgaagcttacaaagccgggcgtgctccaacgccggaagactttcctcgccaattggcgcttatgaaggaattagtggatttgcttggcctcgaacgcttggaagttcccggtttcgaggcagacgacgtattagcgactctcgcaaagaaagccgaacgtgagggctatgaagtccagatcttgacagcagatcgcgatcttttccagcttttatctccgcgcatctcggtgttacacccggaagggcatcgtatcaccccggaatggctctgggagaaatatggtttgcgtcccgaacaatgggtggattttcgcgccttagcaggcgatccgagcgacaatattccgggagttaaaggtatcggcgagaagacggcgctcaagctccttaaagaatgggggtcgttggagaacttgcttaagaatttagatcaggtcaaaccagagtcagtgcgtgagaagattcttgctcacctcgaagacctcaaattaagccgcgaattgtcccgtgtacgcaccgatttgccgctcgaagttgatttcggtcgccgccgcgaacctgactgggagggtcttaaagcgtttttagagcgtcttgaatttggttcgctcttgcatgaattcggccttttagaaagcccgttactggccgaagaagcaccttggccaccgcccgagggcgcgtttttaggttaccgtttgagtcgcccggaaccgatgtgggccgaattactggctcttgcagcgtctgcccagggacgtgtgtatcgcgcggaagaccctcatggtgcgctccgcggcctcttcgaagtccgtggactccttgccaaagacttagctgttgttgcattgcgcgaaggtcttgatttacctccgactgatgatccaatgcttcttgcgtacctcttggacccgtcaaacacgacgcccgaaggcgtagcccgtcgttacggcggcgagtggaccgaagatgcagcgaaacgcgcgttattggccgaacgtttgcacgccaatttattaggacgtttgcaaggcgaggaacgtctcctctggctttacgaagaagtggagaaaccattgagtcgcgtgctcgcgcatatggaagctaccggtgtcaaattagacgtggcgtatttggagaatctcagccttgaagttgctgcccacatgcgccgcttggaggaagaagtattccgtttagcaggccgttcctttcgccttaactctcgcgatcagttagaacgtgtgttgttcgatgaacttggtctccctcctatcggcaagacagagaagaccggtaaacgtagcacttcagcggcggttttagaagctcttcgcgaagtccatcccattgtggacaagatcttgcagtaccgcgaactcgcgaaattgaaaggcacctatattgaccgtcttccggcattagtccacccgaaaacgggacgcctccatacccgcttcaaccaaacagccacggcgaccggtcgtttgtcctcctctgatccaaaccttcagaatattccagtacgtaccccattgggccagaagatccgccgtgcgtttgtagctgaggagggttggcgtttagtggccctcgattatcgtcaaattgaattacgtgtccttgcccatctttctggcgatgagaacctcatccgcgtgtttcaggaaggcaaagacattcacactcaaacggcaagctggatgtttggattatcagctgaagcgatcgatcctttgatgcgtcgtgcagcgaagaccatcaatttcggtgttctctacggtatgagtgcctttcgtttgtcgcaggaattaggcattccctatgaagaagctcaggcgttcattcagaaatactttcaaagctatcccaaagttaaagcatggatcgagaagactctccgtgaaggccgcacacgtggttacgtagagaccttatttggacgtcgccgctatgttcccgatttaaacgctcgcgtgaaaggcaagcgtgaagccgccgaacgcatggcgttcaacatgcctgtacagggcacggcagctgacctcatgaaacttgcaatggtgcgcctttttccacaattgcgtgaagttggtgcccgcatgctcttgcaggtccacgatgaactcttgttagaagcgccaaaagagcgttttgaagaggtggcagccctcgcgaaagaagttatggaaggcgtgtggcccttagcggtgcctcttgaagtcgaagttggtattggcgaggattggctggctgccaaagga

SEQ ID NO: 4558 - protein, 841 aa, synthetic construct
  REGION 1..841: note = Variant of DNA polymerase I from Thermus sp. strain 2.9
MHHHHHHGGSGVLPVFEPKGRVLLVDGHHLAYRNFFALKGLTTSLGEPVQGVYGFAKSLLKALKEDGDVVIVVFDAKAPSFRHEAYEAYKAGRAPTPEDFPRQLALMKELVDLLGLERLEVPGFEADDVLATLAKKAEREGYEVQILTADRDLFQLLSPRISVLHPEGHRITPEWLWEKYGLRPEQWVDFRALAGDPSDNIPGVKGIGEKTALKLLKEWGSLENLLKNLDQVKPESVREKILAHLEDLKLSRELSRVRTDLPLEVDFGRRREPDWEGLKAFLERLEFGSLLHEFGLLESPLLAEEAPWPPPEGAFLGYRLSRPEPMWAELLALAASAQGRVYRAEDPHGALRGLFEVRGLLAKDLAVVALREGLDLPPTDDPMLLAYLLDPSNTTPEGVARRYGGEWTEDAAKRALLAERLHANLLGRLQGEERLLWLYEEVEKPLSRVLAHMEATGVKLDVAYLENLSLEVAAHMRRLEEEVFRLAGRSFRLNSRDQLERVLFDELGLPPIGKTEKTGKRSTSAAVLEALREVHPIVDKILQYRELAKLKGTYIDRLPALVHPKTGRLHTRFNQTATATGRLSSSDPNLQNIPVRTPLGQKIRRAFVAEEGWRLVALDYRQIELRVLAHLSGDENLIRVFQEGKDIHTQTASWMFGLSAEAIDPLMRRAAKTINFGVLYGMSAFRLSQELGIPYEEAQAFIQKYFQSYPKVKAWIEKTLREGRTRGYVETLFGRRRYVPDLNARVKGKREAAERMAFNMPVQGTAADLMKLAMVRLFPQLREVGARMLLQVHDELLLEAPKERFEEVAALAKEVMEGVWPLAVPLEVEVGIGEDWLAAKG

SEQ ID NO: 4559 - DNA, 2523 bp, synthetic construct
  misc_feature 1..2523: note = Variant of DNA polymerase I from Thermus sp. strain 2.9
  source 1..2523: mol_type = other DNA
atgcaccatcatcatcatcatggcggtagcggcgtgttaccggtgttcgagcctaaaggtcgcgtgcttctggttgatggccatcatctcgcgtatcgtaacttctttgccctgaaaggattaaccaccagcctgggcgagccggtacagggtgtctacggctttgcaaagtcgctcctgaaagctctgaaagaagacggtgatgtggtgattgttgtctttgatgcgaaagcgccaagttttcgccacgaagcgtacgaagcttacaaagccgggcgtgctccaacgccggaagactttcctcgccaattggcgcttatgaaggaattagtggatttgcttggcctcgaacgcttggaagttcccggtttcgaggcagacgacgtattagcgactctcgcaaagaaagccgaacgtgagggctatgaagtccagatcttgacagcagatcgcgatcttttccagcttttatctccgcgcatctcggtgttacacccggaagggcatcgtatcaccccggaatggctctgggagaaatatggtttgcgtcccgaacaatgggtggattttcgcgccttagcaggcgatccgagcgacaatattccgggagttaaaggtatcggcgagaagacggcgctcaagctccttaaagaatgggggtcgttggagaacttgcttaagaatttagatcaggtcaaaccagagtcagtgcgtgagaagattcttgctcacctcgaagacctcaagttaagccgcgaattgtcccgtgtacgcaccgatttgccgctcgaagttgatttcggtcgccgccgcgaacctgactgggagggtcttaaagcgtttttagagcgtcttgaatttggttcgctcttgcatgaattcggccttttagaaagcccgttactggccgaagaagcaccttggccaccgcccgagggcgcgtttttaggttaccgtttgagtcgcccggaaccgatgtgggccgaattactggctcttgcagcgtctgcccagggacgtgtgtatcgcgcggaagaccctcatggtgcgctccgcggcctcttcgaagtccgtggactccttgccaaagacttagctgttgttgcattgcgcgaaggtcttgatttacctccgactgatgatccaatgcttcttgcgtacctcttggacccgtcaaacacgacgcccgaaggcgtagcccgtcgttacggcggcgagtggaccgaagatgcagcgaaacgcgcgttattggccgaacgtttgcacgccaatttattaggacgtttgcaaggcgaggaacgtctcctctggctttacgaagaagtggagaaaccattgagtcgcgtgctcgcgcatatggaagctaccggtgtcaaattagacgtggcgtatttggagaatctcagccttgaagttgctgcccacatgcgccgcttggaggaagaagtattccgtttagcaggccgttcctttcgccttaactctcgcgatcagttagaacgtgtgttgttcgatgaacttggtctccctcctatcggcaagacagagaagaccggtaaacgtagcacttcacgtgcggttttagaggctcttcgctgtgtccatcccattgtggacaagatcttgcagtaccgcgaactcgcgaaattgaaaggcacctatattgaccgtcttccggcattagtccacccgaaaacgggacgcctccatacccgcttcaaccaaacagccacggcgaccggtcgtttgtcctcctctgatccaaaccttcagaatattccagtacgtaccccattgggccagaagatccgccgtgcgtttgtagctgaggagggttggcgtttagtggccctcgattatcgtcaaattgaattacgtgtccttgcccatctttctggcgatgagaacctcatccgcgtgtttcaagaaggcaaagacattcacactcaaacggcaagctggatgtttggattatcagctgaagcgatcgatcctttgatgcgtcgtgcagcgaagaccatcaatttcggtgttctctacggtatgagtgcctttcgtttgtcgcaggaattaggcattccctatgaagaagctcaggcgttcattcagaaatactttcaaagctatcccaaagttaaagcatggatcgagaagactctccgtgaaggccgcacacgtggttacgtagagaccttatttggacgtcgccgctatgttcccgatttaaacgctcgcgtgaaaggcaagcgtgaagccgccgaacgcatggcgttcaacatgcctgtacagggcacggcagctgacctcatgaaacttgcaatggtgcgcctttttccacaattgcgtgaagttggtgcccgcatgctcttgcaggtccacgatgaactcttgttagaagcgccaaaagagcgtgcggaagaggtggcagccctcgcgaaagaagttatggaaggcgtgtggcccttagcggtgcctcttgaagtcgaagttggtattggcgaggattggctggctgccaaagga

SEQ ID NO: 4560 - protein, 841 aa, synthetic construct
  REGION 1..841: note = Variant of DNA polymerase I from Thermus sp. strain 2.9
MHHHHHHGGSGVLPVFEPKGRVLLVDGHHLAYRNFFALKGLTTSLGEPVQGVYGFAKSLLKALKEDGDVVIVVFDAKAPSFRHEAYEAYKAGRAPTPEDFPRQLALMKELVDLLGLERLEVPGFEADDVLATLAKKAEREGYEVQILTADRDLFQLLSPRISVLHPEGHRITPEWLWEKYGLRPEQWVDFRALAGDPSDNIPGVKGIGEKTALKLLKEWGSLENLLKNLDQVKPESVREKILAHLEDLKLSRELSRVRTDLPLEVDFGRRREPDWEGLKAFLERLEFGSLLHEFGLLESPLLAEEAPWPPPEGAFLGYRLSRPEPMWAELLALAASAQGRVYRAEDPHGALRGLFEVRGLLAKDLAVVALREGLDLPPTDDPMLLAYLLDPSNTTPEGVARRYGGEWTEDAAKRALLAERLHANLLGRLQGEERLLWLYEEVEKPLSRVLAHMEATGVKLDVAYLENLSLEVAAHMRRLEEEVFRLAGRSFRLNSRDQLERVLFDELGLPPIGKTEKTGKRSTSRAVLEALRCVHPIVDKILQYRELAKLKGTYIDRLPALVHPKTGRLHTRFNQTATATGRLSSSDPNLQNIPVRTPLGQKIRRAFVAEEGWRLVALDYRQIELRVLAHLSGDENLIRVFQEGKDIHTQTASWMFGLSAEAIDPLMRRAAKTINFGVLYGMSAFRLSQELGIPYEEAQAFIQKYFQSYPKVKAWIEKTLREGRTRGYVETLFGRRRYVPDLNARVKGKREAAERMAFNMPVQGTAADLMKLAMVRLFPQLREVGARMLLQVHDELLLEAPKERAEEVAALAKEVMEGVWPLAVPLEVEVGIGEDWLAAKG

SEQ ID NO: 4561 - DNA, 2523 bp, synthetic construct
  misc_feature 1..2523: note = Variant of DNA polymerase I from Thermus sp. strain 2.9
  source 1..2523: mol_type = other DNA
atgcaccatcatcatcatcatggcggtagcggcgtgttaccggtgttcgagcctaaaggtcgcgtgcttctggttgatggccatcatctcgcgtatcgtaacttctttgccctgaaaggattaaccaccagcctgggcgagccggtacagggtgtctacggctttgcaaagtcgctcctgaaagctctgaaagaagacggtgatgtggtgattgttgtctttgatgcgaaagcgccaagttttcgccacgaagcgtacgaagcttacaaagccgggcgtgctccaacgccggaagactttcctcgccaattggctcttatgaaggaattagtggatttgcttggcctcgaacgcttggaagttcccggtttcgaggcagacgacgtattagcgactctcgcaaagaaagccgaagatgagggctatgaagtccagatcttgacagcagatcgcgatcttttccagcttttatctccgcgcatctcggtgttacacccggaagggcatcgtatcaccccggaatggctctgggagaaatatggtttgcgtcccgaacaatgggtggattttcgcgccttagcaggcgatccgagcgacaatattccgggagttaaaggtatcggcgagaagacggcgctcaagctccttaaagaatgggggtcgttggagaacttgcttaagaatttagatcaggtcaaaccagagtcagtgcgtgagaagattcttgctcacctcgaagacctcgagttaagccgcgaattgtcccgtgtacgcaccgatttgccgctcgaagttgatttcggtcgccgccgcgaacctgactgggagggtcttaaagcgtttttagagcgtcttgaatttggttcgctccagcatgaattcggccttttagaaagcccgttactggccgaagaagcaccttggccaccgcccgagggcgcgtttttaggttaccgtttgagccgcccggaaccgatgtgggccgaattactggctcttgcagcgtctgcccagggacgtgtgtatcgcgcggaagaccctcatggtgcgctccgcggcctcttcgaagtccgtggactccttgccaaagacttagctgttgttgcattgcgcgaaggtcttgatttacctccgactgatgatccaatgcttcttgcgtacctcttggacccgtcaaacacgacgcccgaaggcgtagcccgtcgttacggcggcgagtggaccgaagatgcagcgaaacgcgcgttattggccgaacgtttgcacgccaatttattaggacgtttgcaaggcgaggaacgtctcctctggctttacgaagaagtggagaaaccattgagtcgtgtgctcggtcatatggaagctaccggtgtcaaattagacgtggcgtatttggagaatctcagccttgaagttgctgcccacatgcgccgcttggaggaagaagtattccgtttagcaggccgttcctttcgccttaactctcgcgatcagttagaacgtgtgttgttcgatgaacttggtctccctcctatcggcaagacagagaagaccggtaaacgtagcacttcagcggcggttttagaagctcttcgcgaagtccatcccattgtggacaagatcttgcagtaccgcgaactggcgaaattgaaaggcacctatattgaccgtcttccggcattagtccacccgaaaacgggacgcctccatacccgcttcaaccaaacagccacggcgaccggtcgtttgtcctcctctgatccaaaccttcagaatattccagtacgtacccctttgggccagaagatccgccgtgcgtttgtagctgaggagggttggcgtttagtggccctcgattatcgtcaaattgaattacgtgtccttgcccatctttctggcgatgagaacctcatccgcgtgtttcaagaaggcaaagacattcacactcaaacggcaagctggatgtttggattatcagctgaagcgatcgatcctttgatgcgtcgtgcagcgaagaccatcaatttcggtgttctctacggtatgagtgcctttcgtttgtcgcaggaattaggcattccctatgaagaagctcaggcgttcattcagaaatactttcaaagctatcccaaagttaaagcatggatcgagaagactctccgtgaaggccgcacacgtggttacgtagagaccttatttggacgtcgccgctatgttcccgatttaaacggccgcgtgaaaggcaagcgtgaagccgccgaacgcatggcgttcaacatgcctgtacagggcacggcagctgacctcatgaaacttgcaatggtgcgcctttttccacaattgcgtgaagttggtgcccgcatgctcttgcaggtccacgatgaactcttgttagaagcgccaaaagagcgtgcggaagaggtggcagccctcgcgaaagaagttatggaaggcgtgtggcccttagcggtgcctcttgaagtcgaagttggtattggcgaggattggctggctgccaaagga

SEQ ID NO: 4562 - protein, 841 aa, synthetic construct
  REGION 1..841: note = Variant of DNA polymerase I from Thermus sp. strain 2.9
MHHHHHHGGSGVLPVFEPKGRVLLVDGHHLAYRNFFALKGLTTSLGEPVQGVYGFAKSLLKALKEDGDVVIVVFDAKAPSFRHEAYEAYKAGRAPTPEDFPRQLALMKELVDLLGLERLEVPGFEADDVLATLAKKAEDEGYEVQILTADRDLFQLLSPRISVLHPEGHRITPEWLWEKYGLRPEQWVDFRALAGDPSDNIPGVKGIGEKTALKLLKEWGSLENLLKNLDQVKPESVREKILAHLEDLELSRELSRVRTDLPLEVDFGRRREPDWEGLKAFLERLEFGSLQHEFGLLESPLLAEEAPWPPPEGAFLGYRLSRPEPMWAELLALAASAQGRVYRAEDPHGALRGLFEVRGLLAKDLAVVALREGLDLPPTDDPMLLAYLLDPSNTTPEGVARRYGGEWTEDAAKRALLAERLHANLLGRLQGEERLLWLYEEVEKPLSRVLGHMEATGVKLDVAYLENLSLEVAAHMRRLEEEVFRLAGRSFRLNSRDQLERVLFDELGLPPIGKTEKTGKRSTSAAVLEALREVHPIVDKILQYRELAKLKGTYIDRLPALVHPKTGRLHTRFNQTATATGRLSSSDPNLQNIPVRTPLGQKIRRAFVAEEGWRLVALDYRQIELRVLAHLSGDENLIRVFQEGKDIHTQTASWMFGLSAEAIDPLMRRAAKTINFGVLYGMSAFRLSQELGIPYEEAQAFIQKYFQSYPKVKAWIEKTLREGRTRGYVETLFGRRRYVPDLNGRVKGKREAAERMAFNMPVQGTAADLMKLAMVRLFPQLREVGARMLLQVHDELLLEAPKERAEEVAALAKEVMEGVWPLAVPLEVEVGIGEDWLAAKG

SEQ ID NO: 4563 - DNA, 2523 bp, synthetic construct
  misc_feature 1..2523: note = Variant of DNA polymerase I from Thermus sp. strain 2.9
  source 1..2523: mol_type = other DNA
atgcaccatcatcatcatcatggcggtagcggcgtgttaccggtgttcgagcctaaaggtcgcgtgcttctggttgatggccatcatctcgcgtatcgtaacttctttgccctgaaaggattaaccaccagcctgggcgagccggtacagggtgtctacggctttgcaaagtcgctcctgaaagctctgaaagaagacggtgatgtggtgattgttgtctttgatgcgaaagcgccaagttttcgccacgaagcgtacgaagcttacaaagccgggcgtgctccaacgccggaagactttcctcgccaattggcgcttatgaaggaattagtggatttgcttggcctcgaacgcttggaagttcccggtttcgaggcagacgacgtattagcgactctcgcaaagaaagccgaacgtgagggctatgaagtccagatcttgacagcagatcgcgatcttttccagcttttatctccgcgcatctcggtgttacacccggaagggcatcgtatcaccccggaatggctctgggagaaatatggtttgcgtcccgaacaatgggtggattttcgcgccttagcaggcgatccgagcgacaatattccgggagttaaaggtatcggcgagaagacggcgctcaagctccttaaagaatgggggtcgttggagaacttgcttaagaatttagatcaggtcaaaccagagtcagtgcgtgagaagattcttgctcacctcgaagacctcaaattaagccgcgaattgtcccgtgtacgcaccgatttgccgctcgaagttgatttcggtcgccgccgcgaacctgactgggagggtcttaaagcgtttttagagcgtcttgaatttggttcgctcttgcatgaattcggccttttagaaagcccgttactggccgaagaagcaccttggccaccgcccgagggcgcgtttttaggttaccgtttgagtcgcccggaaccgatgtgggccgaattactggctcttgcagcgtctgcccagggacgtgtgtatcgcgcggaagaccctcatggtgcgctccgcggcctcttcgaagtccgtggactccttgccaaagacttagctgttgttgcattgcgcgaaggtcttgatttacctccgactgatgatccaatgcttcttgcgtacctcttggacccgtcaaacacgacgcccgaaggcgtagcccgtcgttacggcggcgagtggaccgaagatgcagcgaaatcggcgttattggccgaacgtttgcacgccaatttattaggacgtttgcaaggcgaggaacgtctcctctggctttacgaagaagtggagaaaccattgagtcgcgtgctcgcgcatatggaagctaccggtgtcaaattagacgtggcgtatttggagaatctcagccttgaagttgctgcccacatgcgccgcttggaggaagaagtattccgtttagcaggccgttcctttcgccttaactctcgcgatcagttagaacgtgtgttgttcgatgaacttggtctccctcctatcggcaagacagagaagaccggtaaacgtagcacttcagcggcggttttagaagctcttcgcgaagtccatcccattgtggacaagatcttgcagtaccgcgaactcgcgaaattgaaaggcacctatattgaccgtcttccggcattagtccacccgaaaacgggacgcctccatacccgcttcaaccaaacagccacggcgaccggtcgtttgtcctcctctgatccaaaccttcagaatattccagtacgtaccccattgggccagaagatccgccgtgcgtttgtagctgaggagggttggcgtttagtggccctcgattatcgtcaaattgaattacgtgtccttgcccatctttctggcgatgagaacctcatccgcgtgtttcaggaaggcaaagacattcacactcaaacggcaagctggatgtttggattatcagctgaagcgatcgatcctttgatgcgtcgtgcagcgaagaccatcaatttcggtgttctctacggtatgagtgcctttcgtttgtcgcaggaattaggcattccctatgaagaagctcaggcgttcattcagaaatactttcaaagctatcccaaagttaaagcatggatcgagaagactctccgtgaaggccgcacacgtggttacgtagagaccttatttggacgtcgccgctatgttcccgatttaaacgctcgcgtgaaaggcaagcgtgaagccgccgaacgcatggcgttcaacatgcctgtacagggcacggcagctgacctcatgaaacttgcaatggtgcgcctttttccacaattgcgtgaagttggtgcccgcatgctcttgcaggtccacgatgaactcttgttagaagcgccaaaagagcgtgcggaagaggtggcagccctcgcgaaagaagttatggaaggcgtgtggcccttagcggtgcctcttgaagtcgaagttggtattggcgaggattggctggctgccaaagga

SEQ ID NO: 4564 - protein, 841 aa, synthetic construct
  REGION 1..841: note = Variant of DNA polymerase I from Thermus sp. strain 2.9
MHHHHHHGGSGVLPVFEPKGRVLLVDGHHLAYRNFFALKGLTTSLGEPVQGVYGFAKSLLKALKEDGDVVIVVFDAKAPSFRHEAYEAYKAGRAPTPEDFPRQLALMKELVDLLGLERLEVPGFEADDVLATLAKKAEREGYEVQILTADRDLFQLLSPRISVLHPEGHRITPEWLWEKYGLRPEQWVDFRALAGDPSDNIPGVKGIGEKTALKLLKEWGSLENLLKNLDQVKPESVREKILAHLEDLKLSRELSRVRTDLPLEVDFGRRREPDWEGLKAFLERLEFGSLLHEFGLLESPLLAEEAPWPPPEGAFLGYRLSRPEPMWAELLALAASAQGRVYRAEDPHGALRGLFEVRGLLAKDLAVVALREGLDLPPTDDPMLLAYLLDPSNTTPEGVARRYGGEWTEDAAKSALLAERLHANLLGRLQGEERLLWLYEEVEKPLSRVLAHMEATGVKLDVAYLENLSLEVAAHMRRLEEEVFRLAGRSFRLNSRDQLERVLFDELGLPPIGKTEKTGKRSTSAAVLEALREVHPIVDKILQYRELAKLKGTYIDRLPALVHPKTGRLHTRFNQTATATGRLSSSDPNLQNIPVRTPLGQKIRRAFVAEEGWRLVALDYRQIELRVLAHLSGDENLIRVFQEGKDIHTQTASWMFGLSAEAIDPLMRRAAKTINFGVLYGMSAFRLSQELGIPYEEAQAFIQKYFQSYPKVKAWIEKTLREGRTRGYVETLFGRRRYVPDLNARVKGKREAAERMAFNMPVQGTAADLMKLAMVRLFPQLREVGARMLLQVHDELLLEAPKERAEEVAALAKEVMEGVWPLAVPLEVEVGIGEDWLAAKG

SEQ ID NO: 4565 - DNA, 2523 bp, synthetic construct
  misc_feature 1..2523: note = Variant of DNA polymerase I from Thermus sp. strain 2.9
  source 1..2523: mol_type = other DNA
atgcaccatcatcatcatcatggcggtagcggcgtgttaccggtgttcgagcctaaaggtcgcgtgcttctggttgatggccatcatctcgcgtatcgtaacttctttgccctgaaaggattaaccaccagcctgggcgagccggtacagggtgtctacggctttgcaaagtcgctcctgaaagctctgaaagaagacggtgatgtggtgattgttgtctttgatgcgaaagcgccaagttttcgccacgaagcgtacgaagcttacaaagccgggcgtgctccaacgccggaagactttcctcgccaattggcgcttatgaaggaattagtggatttgcttggcctcgaacgcttggaagttcccggtttcgaggcagacgacgtattagcgactctcgcaaagaaagccgaacgtgagggctatgaagtccagatcttgacagcagatcgcgatcttttccagcttttatctccgcgcatctcggtgttacacccggaagggcatcgtatcaccccggaatggctctgggagaaatatggtttgcgtcccgaacaatgggtggattttcgcgccttagcaggcgatccgagcgacaatattccgggagttaaaggtatcggcgagaagacggcgctcaagctccttaaagaatgggggtcgttggagaacttgcttaagaatttagatcaggtcaaaccagagtcagtgcgtgagaagattcttgctcacctcgaagacctcaaattaagccgcgaattgtcccgtgtacgcaccgatttgccgctcgaagttgatttcggtcgccgccgcgaacctgactgggagggtcttaaagcgtttttagagcgtcttgaatttggttcgctcttgcatgaattcggccttttagaaagcccgttactggccgaagaagcaccttggccaccgcccgagggcgcgtttttaggttaccgtttgagtcgcccggaaccgatgtgggccgaattactggctcttgcagcgtctgcccagggacgtgtgtatcgcgcggaagaccctcatggtgcgctccgcggcctcttcgaagtccgtggactccttgccaaagacttagctgttgttgcattgcgcgaaggtcttgatttacctccgactgatgatccaatgcttcttgcgtacctcttggacccgtcaaacacgacgcccgaaggcgtagcccgtcgttacggcggcgagtggaccgaagatgcagcgaaacgcgcgttattggccgaacgtttgcacgccaatttattaggacgtttgcaaggcgaggaacgtctcctctggctttacgaagaagtggagaaaccattgagtcgcgtgctcgcgcatatggaagctaccggtgtcaaattagacgtggcgtatttggagaatctcagccttgaagttgctgcccacatgcgccgcttggaggaagaagtattccgtttagcaggccgttcctttcgccttaactctcgcgatcagttagaacgtgtgttgttcgatgaacttggtctccctcctatcggcaagacagagaagaccggtaaacgtagcacttcagcggcggttttagaagctcttcgcgaagtccatcccattgtggacaagatcttgcagtaccgcgaactcgcgaaattgaaaggcacctatattgaccgtcttccggcattagtccacccgaaaacgggacgcctccatacccgcttcaaccaaacagccacggcgaccggtcgtttgtcctcctctgatgggaaccttcagaatattccagtacgtaccccattgggccagaagatccgccgtgcgtttgtagctgaggagggttggcgtttagtggccctcgattatcgtcaaattgaattacgtgtccttgcccatctttctggcgatgagaacctcatccgcgtgtttcaggaaggcaaagacattcacactcaaacggcaagctggatgtttggattatcagctgaagcgatcgatcctttgatgcgtcgtgcagcgaagaccatcaatttcggtgttctctacggtatgagtgcctttcgtttgtcgcaggaattaggcattccctatgaagaagctcaggcgttcattcagaaatactttcaaagctatcccaaagttaaagcatggatcgagaagactctccgtgaaggccgcacacgtggttacgtagagaccttatttggacgtcgccgctatgttcccgatttaaacgctcgcgtgaaaggcaagcgtgaagccgccgaacgcatggcgttcaacatgcctgtacagggcacggcagctgacctcatgaaacttgcaatggtgcgcctttttccacaattgcgtgaagttggtgcccgcatgctcttgcaggtccacgatgaactcttgttagaagcgccaaaagagcgtgcggaagaggtggcagccctcgcgaaagaagttatggaaggcgtgtggcccttagcggtgcctcttgaagtcgaagttggtattggcgaggattggctggctgccaaagga

SEQ ID NO: 4566 - protein, 841 aa, synthetic construct
  REGION 1..841: note = Variant of DNA polymerase I from Thermus sp. strain 2.9
MHHHHHHGGSGVLPVFEPKGRVLLVDGHHLAYRNFFALKGLTTSLGEPVQGVYGFAKSLLKALKEDGDVVIVVFDAKAPSFRHEAYEAYKAGRAPTPEDFPRQLALMKELVDLLGLERLEVPGFEADDVLATLAKKAEREGYEVQILTADRDLFQLLSPRISVLHPEGHRITPEWLWEKYGLRPEQWVDFRALAGDPSDNIPGVKGIGEKTALKLLKEWGSLENLLKNLDQVKPESVREKILAHLEDLKLSRELSRVRTDLPLEVDFGRRREPDWEGLKAFLERLEFGSLLHEFGLLESPLLAEEAPWPPPEGAFLGYRLSRPEPMWAELLALAASAQGRVYRAEDPHGALRGLFEVRGLLAKDLAVVALREGLDLPPTDDPMLLAYLLDPSNTTPEGVARRYGGEWTEDAAKRALLAERLHANLLGRLQGEERLLWLYEEVEKPLSRVLAHMEATGVKLDVAYLENLSLEVAAHMRRLEEEVFRLAGRSFRLNSRDQLERVLFDELGLPPIGKTEKTGKRSTSAAVLEALREVHPIVDKILQYRELAKLKGTYIDRLPALVHPKTGRLHTRFNQTATATGRLSSSDGNLQNIPVRTPLGQKIRRAFVAEEGWRLVALDYRQIELRVLAHLSGDENLIRVFQEGKDIHTQTASWMFGLSAEAIDPLMRRAAKTINFGVLYGMSAFRLSQELGIPYEEAQAFIQKYFQSYPKVKAWIEKTLREGRTRGYVETLFGRRRYVPDLNARVKGKREAAERMAFNMPVQGTAADLMKLAMVRLFPQLREVGARMLLQVHDELLLEAPKERAEEVAALAKEVMEGVWPLAVPLEVEVGIGEDWLAAKG

SEQ ID NO: 4567 - DNA, 2523 bp, synthetic construct
  misc_feature 1..2523: note = Variant of DNA polymerase I from Thermus sp. strain 2.9
  source 1..2523: mol_type = other DNA
atgcaccatcatcatcatcatggcggtagcggcgtgttaccggtgttcgagcctaaaggtcgcgtgcttctggttgatggccatcatctcgcgtatcgtaacttctttgccctgaaaggattaaccaccagcctgggcgagccggtacagggtgtctacggctttgcaaagtcgctcctgaaagctctgaaagaagacggtgatgtggtgattgttgtctttgatgcgaaagcgccaagttttcgccacgaagcgtacgaagcttacaaagccgggcgtgctccaacgccggaagactttcctcgccaattggcgcttatgaaggaattagtggatttgcttggcctcgaacgcttggaagttcccggtttcgaggcagacgacgtattagcgactctcgcaaagaaagccgaacgtgagggctatgaagtccagatcttgacagcagatcgcgatcttttccagcttttatctccgcgcatctcggtgttacacccggaagggcatcgtatcaccccggaatggctctgggagaaatatggtttgcgtcccgaacaatgggtggattttcgcgccttagcaggcgatccgagcgacaatattccgggagttaaaggtatcggcgagaagacggcgctcaagctccttaaagaatgggggtcgttggagaacttgcttaagaatttagatcaggtcaaaccagagtcagtgcgtgagaagattcttgctcacctcgaagacctcaaattaagccgcgaattgtcccgtgtacgcaccgatttgccgctcgaagttgatttcggtcgccgccgcgaacctgactgggagggtcttaaagcgtttttagagcgtcttgaatttggttcgctcttgcatgaattcggccttttagaaagcccgttactggccgaagaagcaccttggccaccgcccgagggcgcgtttttaggttaccgtttgagtcgcccggaaccgatgtgggccgaattactggctcttgcagcgtctgcccagggacgtgtgtatcgcgcggaagaccctcatggtgcgctccgcggcctcttcgaagtccgtggactccttgccaaagacttagctgttgttgcattgcgcgaaggtcttgatttacctccgactgatgatccaatgcttcttgcgtacctcttggacccgtcaaacacgacgcccgaaggcgtagcccgtcgttacggcggcgagtggaccgaagatgcagcgaaacgcgcgttattggccgaacgtttgcacgccaatttattaggacgtttgcaaggcgaggaacgtctcctctggctttacgaagaagtggagaaaccattgagtcgcgtgctcgcgcatatggaagctaccggtgtcaaattagacgtggcgtatttggagaatctcagccttgaagttgctgcccacatgcgccgcttggaggaagaagtattccgtttagcaggccgttcctttcgccttaactctcgcgatcagttagaacgtgtgttgttcgatgaacttggtctccctcctatcggcaagacagagaagaccggtaaacgtagcacttcagcggcggttttagaagctcttcgcgaagtccatcccattgtggacaagatcttgcagtaccgcgaactcgcgaaattgaaaggcacctatattgaccgtcttccggcattagtccacccgaaaacgggacgcctccatacccgcttcaaccaaacagccacggcgaccggtcgtttgtcctcctctgatccaaaccttcagaatattccagtacgtaccccattgggccagaagatccgccgtgcgtttgtagctgaggagggttggcgtttagtggccctcgattatcgtcaaattgaattacgtgtccttgcccatctttctggcgatgagaacctcatccgcgtgtttcaggaaggcaaagacattcacactcaaacggcaagctggatgtttggattatcagctgaagcgatcgatcctttgatgcgtcgtgcagcgaagaccatcaatttcggtgttctctacggtatgagtgcctttcgtttgtcgcaggaattaggcattccctatgaagaagctcaggcgttcattcagaaatactttcaaagctatcccaaagttaaagcatggatcgagaagactctccgtgaaggccgcacacgtggttacgtagagaccttatttggacgtcgccgctatgttcccgatttaaacgctcgcgtgaaaggcaagcgtgaactggccgaacgcatggcgttcaacatgcctgtacagggcacggcagctgacctcatgaaacttgcaatggtgcgcctttttccacaattgcgtgaagttggtgcccgcatgctcttgcaggtccacgatgaactcttgttagaagcgccaaaagagcgtgcggaagaggtggcagccctcgcgaaagaagttatggaaggcgtgtggcccttagcggtgcctcttgaagtcgaagttggtattggcgaggattggctggctgccaaagga

SEQ ID NO: 4568 - protein, 841 aa, synthetic construct
  REGION 1..841: note = Variant of DNA polymerase I from Thermus sp. strain 2.9
MHHHHHHGGSGVLPVFEPKGRVLLVDGHHLAYRNFFALKGLTTSLGEPVQGVYGFAKSLLKALKEDGDVVIVVFDAKAPSFRHEAYEAYKAGRAPTPEDFPRQLALMKELVDLLGLERLEVPGFEADDVLATLAKKAEREGYEVQILTADRDLFQLLSPRISVLHPEGHRITPEWLWEKYGLRPEQWVDFRALAGDPSDNIPGVKGIGEKTALKLLKEWGSLENLLKNLDQVKPESVREKILAHLEDLKLSRELSRVRTDLPLEVDFGRRREPDWEGLKAFLERLEFGSLLHEFGLLESPLLAEEAPWPPPEGAFLGYRLSRPEPMWAELLALAASAQGRVYRAEDPHGALRGLFEVRGLLAKDLAVVALREGLDLPPTDDPMLLAYLLDPSNTTPEGVARRYGGEWTEDAAKRALLAERLHANLLGRLQGEERLLWLYEEVEKPLSRVLAHMEATGVKLDVAYLENLSLEVAAHMRRLEEEVFRLAGRSFRLNSRDQLERVLFDELGLPPIGKTEKTGKRSTSAAVLEALREVHPIVDKILQYRELAKLKGTYIDRLPALVHPKTGRLHTRFNQTATATGRLSSSDPNLQNIPVRTPLGQKIRRAFVAEEGWRLVALDYRQIELRVLAHLSGDENLIRVFQEGKDIHTQTASWMFGLSAEAIDPLMRRAAKTINFGVLYGMSAFRLSQELGIPYEEAQAFIQKYFQSYPKVKAWIEKTLREGRTRGYVETLFGRRRYVPDLNARVKGKRELAERMAFNMPVQGTAADLMKLAMVRLFPQLREVGARMLLQVHDELLLEAPKERAEEVAALAKEVMEGVWPLAVPLEVEVGIGEDWLAAKG

SEQ ID NO: 4569 - DNA, 2523 bp, synthetic construct
  misc_feature 1..2523: note = Variant of DNA polymerase I from Thermus sp. strain 2.9
  source 1..2523: mol_type = other DNA
atgcaccatcatcatcatcatggcggtagcggcgtgttaccggtgttcgagcctaaaggtcgcgtgcttctggttgatggccatcatctcgcgtatcgtaacttctttgccctgaaaggattaaccaccagcctgggcgagccggtacagggtgtctacggctttgcaaagtcgctcctgaaagctctgaaagaagacggtgatgtggtgattgttgtctttgatgcgaaagcgccaagttttcgccacgaagcgtacgaagcttacaaagccgggcgtgctccaacgccggaagactttcctcgccaattggcgcttatgaaggaattagtggatttgcttggcctcgaacgcttggaagttcccggtttcgaggcagacgacgtattagcgactctcgcaaagaaagccgaacgtgagggctatgaagtccagatcttgacagcagatcgcgatcttttccagcttttatctccgcgcatctcggtgttacacccggaagggcatcgtatcaccccggaatggctctgggagaaatatggtttgcgtcccgaacaatgggtggattttcgcgccttagcaggcgatccgagcgacaatattccgggagttaaaggtatcggcgagaagacggcgctcaagctccttaaagaatgggggtcgttggagaacttgcttaagaatttagatcaggtcaaaccagagtcagtgcgtgagaagattcttgctcacctcgaagacctcaaattaagccgcgaattgtcccgtgtacgcaccgatttgccgctcgaagttgatttcggtcgccgccgcgaacctgactgggagggtcttaaagcgtttttagagcgtcttgaatttggttcgctcttgcatgaattcggccttttagaaagcccgttactggccgaagaagcaccttggccaccgcccgagggcgcgtttttaggttaccgtttgagtcgcccggaaccgatgtgggccgaattactggctcttgcagcgtctgcccagggacgtgtgtatcgcgcggaagaccctcatggtgcgctccgcggcctcttcgaagtccgtggactccttgccaaagacttagctgttgttgcattgcgcgaaggtcttgatttacctccgactgatgatccaatgcttcttgcgtacctcttggacccgtcaaacacgacgcccgaaggcgtagcccgtcgttacggcggcgagtggaccgaagatgcagcgaaacgcgcgttattggccgaacgtttgcacgccaatttattaggacgtttgcaaggcgaggaacgtctcctctggctttacgaagaagtggagaaaccattgagtcgcgtgctcgcgcatatggaagctaccggtgtcaaattagacgtggcgtatttggagaatctcagccttgaagttgctgcccacatgcgccgcttggaggaagaagtattccgtttagcaggccgttcctttcgccttaactctcgcgatcagttagaacgtgtgttgttcgatgaacttggtctccctcctatcggcaagacagagaagaccggtaaacgtagcacttcagcggcggttttagaagctcttcgcgaagtccatcccattgtggacaagatcttgcagtaccgcgaactcgcgaaattgaaaggcacctatattgaccgtcttccggcattagtccacccgaaaacgggacgcctccatacccgcttcatgcaaacagccacggcgaccggtcgtttgtcctcctctgatccaaaccttcagaatattccagtacgtaccccattgggccagaagatccgccgtgcgtttgtagctgaggagggttggcgtttagtggccctcgattatcgtcaaattgaattacgtgtccttgcccatctttctggcgatgagaacctcatccgcgtgtttcaggaaggcaaagacattcacactcaaacggcaagctggatgtttggattatcagctgaagcgatcgatcctttgatgcgtcgtgcagcgaagaccatcaatttcggtgttctctacggtatgagtgcctttcgtttgtcgcaggaattaggcattccctatgaagaagctcaggcgttcattcagaaatactttcaaagctatcccaaagttaaagcatggatcgagaagactctccgtgaaggccgcacacgtggttacgtagagaccttatttggacgtcgccgctatgttcccgatttaaacgctcgcgtgaaaggcaagcgtgaagccgccgaacgcatggcgttcaacatgcctgtacagggcacggcagctgacctcatgaaacttgcaatggtgcgcctttttccacaattgcgtgaagttggtgcccgcatgctcttgcaggtccacgatgaactcttgttagaagcgccaaaagagcgtgcggaagaggtggcagccctcgcgaaagaagttatggaaggcgtgtggcccttagcggtgcctcttgaagtcgaagttggtattggcgaggattggctggctgccaaagga

SEQ ID NO: 4570 - protein, 841 aa, synthetic construct
  REGION 1..841: note = Variant of DNA polymerase I from Thermus sp. strain 2.9
MHHHHHHGGSGVLPVFEPKGRVLLVDGHHLAYRNFFALKGLTTSLGEPVQGVYGFAKSLLKALKEDGDVVIVVFDAKAPSFRHEAYEAYKAGRAPTPEDFPRQLALMKELVDLLGLERLEVPGFEADDVLATLAKKAEREGYEVQILTADRDLFQLLSPRISVLHPEGHRITPEWLWEKYGLRPEQWVDFRALAGDPSDNIPGVKGIGEKTALKLLKEWGSLENLLKNLDQVKPESVREKILAHLEDLKLSRELSRVRTDLPLEVDFGRRREPDWEGLKAFLERLEFGSLLHEFGLLESPLLAEEAPWPPPEGAFLGYRLSRPEPMWAELLALAASAQGRVYRAEDPHGALRGLFEVRGLLAKDLAVVALREGLDLPPTDDPMLLAYLLDPSNTTPEGVARRYGGEWTEDAAKRALLAERLHANLLGRLQGEERLLWLYEEVEKPLSRVLAHMEATGVKLDVAYLENLSLEVAAHMRRLEEEVFRLAGRSFRLNSRDQLERVLFDELGLPPIGKTEKTGKRSTSAAVLEALREVHPIVDKILQYRELAKLKGTYIDRLPALVHPKTGRLHTRFMQTATATGRLSSSDPNLQNIPVRTPLGQKIRRAFVAEEGWRLVALDYRQIELRVLAHLSGDENLIRVFQEGKDIHTQTASWMFGLSAEAIDPLMRRAAKTINFGVLYGMSAFRLSQELGIPYEEAQAFIQKYFQSYPKVKAWIEKTLREGRTRGYVETLFGRRRYVPDLNARVKGKREAAERMAFNMPVQGTAADLMKLAMVRLFPQLREVGARMLLQVHDELLLEAPKERAEEVAALAKEVMEGVWPLAVPLEVEVGIGEDWLAAKG

SEQ ID NO: 4571 - DNA, 2523 bp, synthetic construct
  misc_feature 1..2523: note = Variant of DNA polymerase I from Thermus sp. strain 2.9
  source 1..2523: mol_type = other DNA
atgcaccatcatcatcatcatggcggtagcggcgtgttaccggtgttcgagcctaaaggtcgcgtgcttctggttgatggccatcatctcgcgtatcgtaacttctttgccctgaaaggattaaccaccagcctgggcgagccggtacagggtgtctacggctttgcaaagtcgctcctgaaagctctgaaagaagacggtgatgtggtgattgttgtctttgatgcgaaagcgccaagttttcgccacgaagcgtacgaagcttacaaagccgggcgtgctccaacgccggaagactttcctcgccaattggcgcttatgaaggaattagtggatttgcttggcctcgaacgcttggaagttcccggtttcgaggcagacgacgtattagcgactctcgcaaagaaagccgaacgtgagggctatgaagtccagatcttgacagtggatcgcgatcttttccagcttttatctccgcgcatctcggtgttacacccggaagggcatcgtatcaccccggaatggctctgggagaaatatggtttgcgtcccgaacaatgggtggattttcgcgccttagcaggcgatccgagcgacaatattccgggagttaaaggtatcggcgagaagacggcgctcaagctccttaaagaatgggggtcgttggagaacttgcttaagaatttagatcaggtcaaaccagagtcagtgcgtgagaagattcttgctcacctcgaagacctcaaattaagccgcgaattgtcccgtgtacgcaccgatttgccgctcgaagttgatttcggtcgccgccgcgaacctgactgggagggtcttaaagcgtttttagagcgtcttgaatttggttcgctcttgcatgaattcggccttttagaaagcccgttactggccgaagaagcaccttggccaccgcccgagggcgcgtttttaggttaccgtttgagtcgcccggaaccgatgtgggccgaattactggctcttgcagcgtctgcccagggacgtgtgtatcgcgcggaagaccctcatggtgcgctccgcggcctcttcgaagtccgtggactccttgccaaagacttagctgttgttgcattgcgcgaaggtcttgatttacctccgactgatgatccaatgcttcttgcgtacctcttggacccgtcaaacacgacgcccgaaggcgtagcccgtcgttacggcggcgagtggaccgaagatgcagcgaaacgcgcgttattggccgaacgtttgcacgccaatttattaggacgtttgcaaggcgaggaacgtctcctctggctttacgaagaagtggagaaaccattgagtcgcgtgctcgcgcatatggaagctaccggtgtcaaattagacgtggcgtatttggagaatctcagccttgaagttgctgcccacatgcgccgcttggaggaagaagtattccgtttagcaggccgttcctttcgccttaactctcgcgatcagttagaacgtgtgttgttcgatgaacttggtctccctcctatcggcaagacagagaagaccggtaaacgtagcacttcagcggcggttttagaagctcttcgcgaagtccatcccattgtggacaagatcttgcagtaccgcgaactcgcgaaattgaaaggcacctatattgaccgtcttccggcattagtccacccgaaaacgggacgcctccatacccgcttcaaccaaacagccacggcgaccggtcgtttgtcctcctctgatccaaaccttcagaatattccagtacgtaccccattgggccagaagatccgccgtgcgtttgtagctgaggagggttggcgtttagtggccctcgattatcgtcaaattgaattacgtgtccttgcccatctttctggcgatgagaacctcatccgcgtgtttcaggaaggcaaagacattcacactcaaacggcaagctggatgtttggattatcagctgaagcgatcgatcctttgatgcgtcgtgcagcgaagaccatcaatttcggtgttctctacggtatgagtgcctttcgtttgtcgcaggaattaggcattccctatgaagaagctcaggcgttcattcagaaatactttcaaagctatcccaaagttaaagcatggatcgagaagactctccgtgaaggccgcacacgtggttacgtagagaccttatttggacgtcgccgctatgttcccgatttaaacgctcgcgtgaaaggcaagcgtgaagccgccgaacgcatggcgttcaacatgcctgtacagggcacggcagctgacctcatgaaacttgcaatggtgcgcctttttccacaattgcgtgaagttggtgcccgcatgctcttgcaggtccacgatgaactcttgttagaagcgccaaaagagcgtgcggaagaggtggcagccctcgcgaaagaagttatggaaggcgtgtggcccttagcggtgcctcttgaagtcgaagttggtattggcgaggattggctggctgccaaagga

SEQ ID NO: 4572 - protein, 841 aa, synthetic construct
  REGION 1..841: note = Variant of DNA polymerase I from Thermus sp. strain 2.9
MHHHHHHGGSGVLPVFEPKGRVLLVDGHHLAYRNFFALKGLTTSLGEPVQGVYGFAKSLLKALKEDGDVVIVVFDAKAPSFRHEAYEAYKAGRAPTPEDFPRQLALMKELVDLLGLERLEVPGFEADDVLATLAKKAEREGYEVQILTVDRDLFQLLSPRISVLHPEGHRITPEWLWEKYGLRPEQWVDFRALAGDPSDNIPGVKGIGEKTALKLLKEWGSLENLLKNLDQVKPESVREKILAHLEDLKLSRELSRVRTDLPLEVDFGRRREPDWEGLKAFLERLEFGSLLHEFGLLESPLLAEEAPWPPPEGAFLGYRLSRPEPMWAELLALAASAQGRVYRAEDPHGALRGLFEVRGLLAKDLAVVALREGLDLPPTDDPMLLAYLLDPSNTTPEGVARRYGGEWTEDAAKRALLAERLHANLLGRLQGEERLLWLYEEVEKPLSRVLAHMEATGVKLDVAYLENLSLEVAAHMRRLEEEVFRLAGRSFRLNSRDQLERVLFDELGLPPIGKTEKTGKRSTSAAVLEALREVHPIVDKILQYRELAKLKGTYIDRLPALVHPKTGRLHTRFNQTATATGRLSSSDPNLQNIPVRTPLGQKIRRAFVAEEGWRLVALDYRQIELRVLAHLSGDENLIRVFQEGKDIHTQTASWMFGLSAEAIDPLMRRAAKTINFGVLYGMSAFRLSQELGIPYEEAQAFIQKYFQSYPKVKAWIEKTLREGRTRGYVETLFGRRRYVPDLNARVKGKREAAERMAFNMPVQGTAADLMKLAMVRLFPQLREVGARMLLQVHDELLLEAPKERAEEVAALAKEVMEGVWPLAVPLEVEVGIGEDWLAAKG

SEQ ID NO: 4573 - DNA, 2523 bp, synthetic construct
  misc_feature 1..2523: note = Variant of DNA polymerase I from Thermus sp. strain 2.9
  source 1..2523: mol_type = other DNA
atgcaccatcatcatcatcatggcggtagcggcgtgttaccggtgttcgagcctaaaggtcgcgtgcttctggttgatggccatcatctcgcgtatcgtaacttctttgccctgaaaggattaaccaccagcctgggcgagccggtacagggtgtctacggctttgcaaagtcgctcctgaaagctctgaaagaagacggtgatgtggtgattgttgtctttgatgcgaaagcgccaagttttcgccacgaagcgtacgaagcttacaaagccgggcgtgctccaacgccggaagactttcctcgccaattggcgcttatgaaggaattagtggatttgcttggcctcgaacgcttggaagttcccggtttcgaggcagacgacgtattagcgactctcgcaaagaaagccgaacgtgagggctatgaagtccagatcttgacagcagatcgcgatcttttccagcttttatctccggggatctcggtgttacacccggaagggcatcgtatcaccccggaatggctctgggagaaatatggtttgcgtcccgaacaatgggtggattttcgcgccttagcaggcgatccgagcgacaatattccgggagttaaaggtatcggcgagaagacggcgctcaagctccttaaagaatgggggtcgttggagaacttgcttaagaatttagatcaggtcaaaccagagtcagtgcgtgagaagattcttgctcacctcgaagacctcaaattaagccgcgaattgtcccgtgtacgcaccgatttgccgctcgaagttgatttcggtcgccgccgcgaacctgactgggagggtcttaaagcgtttttagagcgtcttgaatttggttcgctcttgcatgaattcggccttttagaaagcccgttactggccgaagaagcaccttggccaccgcccgagggcgcgtttttaggttaccgtttgagtcgcccggaaccgatgtgggccgaattactggctcttgcagcgtctgcccagggacgtgtgtatcgcgcggaagaccctcatggtgcgctccgcggcctcttcgaagtccgtggactccttgccaaagacttagctgttgttgcattgcgcgaaggtcttgatttacctccgactgatgatccaatgcttcttgcgtacctcttggacccgtcaaacacgacgcccgaaggcgtagcccgtcgttacggcggcgagtggaccgaagatgcagcgaaacgcgcgttattggccgaacgtttgcacgccaatttattaggacgtttgcaaggcgaggaacgtctcctctggctttacgaagaagtggagaaaccattgagtcgcgtgctcgcgcatatggaagctaccggtgtcaaattagacgtggcgtatttggagaatctcagccttgaagttgctgcccacatgcgccgcttggaggaagaagtattccgtttagcaggccgttcctttcgccttaactctcgcgatcagttagaacgtgtgttgttcgatgaacttggtctccctcctatcggcaagacagagaagaccggtaaacgtagcacttcagcggcggttttagaagctcttcgcgaagtccatcccattgtggacaagatcttgcagtaccgcgaactcgcgaaattgaaaggcacctatattgaccgtcttccggcattagtccacccgaaaacgggacgcctccatacccgcttcaaccaaacagccacggcgaccggtcgtttgtcctcctctgatccaaaccttcagaatattccagtacgtaccccattgggccagaagatccgccgtgcgtttgtagctgaggagggttggcgtttagtggccctcgattatcgtcaaattgaattacgtgtccttgcccatctttctggcgatgagaacctcatccgcgtgtttcaggaaggcaaagacattcacactcaaacggcaagctggatgtttggattatcagctgaagcgatcgatcctttgatgcgtcgtgcagcgaagaccatcaatttcggtgttctctacggtatgagtgcctttcgtttgtcgcaggaattaggcattccctatgaagaagctcaggcgttcattcagaaatactttcaaagctatcccaaagttaaagcatggatcgagaagactctccgtgaaggccgcacacgtggttacgtagagaccttatttggacgtcgccgctatgttcccgatttaaacgctcgcgtgaaaggcaagcgtgaagccgccgaacgcatggcgttcaacatgcctgtacagggcacggcagctgacctcatgaaacttgcaatggtgcgcctttttccacaattgcgtgaagttggtgcccgcatgctcttgcaggtccacgatgaactcttgttagaagcgccaaaagagcgtgcggaagaggtggcagccctcgcgaaagaagttatggaaggcgtgtggcccttagcggtgcctcttgaagtcgaagttggtattggcgaggattggctggctgccaaagga

SEQ ID NO: 4574 - protein, 841 aa, synthetic construct
  REGION 1..841: note = Variant of DNA polymerase I from Thermus sp. strain 2.9
MHHHHHHGGSGVLPVFEPKGRVLLVDGHHLAYRNFFALKGLTTSLGEPVQGVYGFAKSLLKALKEDGDVVIVVFDAKAPSFRHEAYEAYKAGRAPTPEDFPRQLALMKELVDLLGLERLEVPGFEADDVLATLAKKAEREGYEVQILTADRDLFQLLSPGISVLHPEGHRITPEWLWEKYGLRPEQWVDFRALAGDPSDNIPGVKGIGEKTALKLLKEWGSLENLLKNLDQVKPESVREKILAHLEDLKLSRELSRVRTDLPLEVDFGRRREPDWEGLKAFLERLEFGSLLHEFGLLESPLLAEEAPWPPPEGAFLGYRLSRPEPMWAELLALAASAQGRVYRAEDPHGALRGLFEVRGLLAKDLAVVALREGLDLPPTDDPMLLAYLLDPSNTTPEGVARRYGGEWTEDAAKRALLAERLHANLLGRLQGEERLLWLYEEVEKPLSRVLAHMEATGVKLDVAYLENLSLEVAAHMRRLEEEVFRLAGRSFRLNSRDQLERVLFDELGLPPIGKTEKTGKRSTSAAVLEALREVHPIVDKILQYRELAKLKGTYIDRLPALVHPKTGRLHTRFNQTATATGRLSSSDPNLQNIPVRTPLGQKIRRAFVAEEGWRLVALDYRQIELRVLAHLSGDENLIRVFQEGKDIHTQTASWMFGLSAEAIDPLMRRAAKTINFGVLYGMSAFRLSQELGIPYEEAQAFIQKYFQSYPKVKAWIEKTLREGRTRGYVETLFGRRRYVPDLNARVKGKREAAERMAFNMPVQGTAADLMKLAMVRLFPQLREVGARMLLQVHDELLLEAPKERAEEVAALAKEVMEGVWPLAVPLEVEVGIGEDWLAAKG

SEQ ID NO: 4575 - DNA, 2523 bp, synthetic construct
  misc_feature 1..2523: note = Variant of DNA polymerase I from Thermus sp. strain 2.9
  source 1..2523: mol_type = other DNA
atgcaccatcatcatcatcatggcggtagcggcgtgttaccggtgttcgagcctaaaggtcgcgtgcttctggttgatggccatcatctcgcgtatcgtaacttctttgccctgaaaggattaaccaccagcctgggcgagccggtacagggtgtctacggctttgcaaagtcgctcctgaaagctctgaaagaagacggtgatgtggtgattgttgtctttgatgcgaaagcgccaagttttcgccacgaagcgtacgaagcttacaaagccgggcgtgctccaacgccggaagactttcctcgccaattggctcttatgaaggaattagtggatttgcttggcctcgaacgcttggaagttcccggtttcgaggcagacgacgtattagcgactctcgcaaagaaagccgaacgtgagggctatgaagtccagatcttgacagcagatcgcgatcttttccagcttttatctccgcgcatctcggtgttacacccggaagggcatcgtatcaccccggaatggctctgggagaaatatggtttgcgtcccgaacaatgggtggattttcgcgccttagcaggcgatccgagcgacaatattccgggagttaaaggtatcggcgagaagacggcgctcaagctccttaaagaatgggggtcgttggagaacttgcttaagaatttagatcaggtcaaaccagagtcagtgcgtgagaagattcttgctcacctcgaagacctcaagttaagccgcgaattgtcccgtgtacgcaccgatttgccgctcgaagttgatttcggtcgccgccgcgaacctgactgggagggtcttaaagcgtttttagagcgtcttgaatttggttcgctcttgcatgaattcggccttttagaaagcccgttactggccgaagaagcaccttggccaccgcccgagggcgcgtttttaggttaccgtttgacccgcccggaaccgatgtgggccgaattactggctcttgcagcgtctgcccagggacgtgtgtatcgcgcggaagaccctcatggtgcgctccgcggcctcttcgaagtccgtggactccttgccaaagacttagctgttgttgcattgcgcgaaggtcttgatttacctccgactgatgatccaatgcttcttgcgtacctcttggacccgtcaaacacgacgcccgaaggcgtagcccgtcgttacggcggcgagtggaccgaagatgcagcgaaacgcgcgttattggccgaacgtttgcacgccaatttattaggacgtttgcaaggcgaggaacgtctcctctggctttacgaagaagtggagaaaccattgagtgtggtgctcgctcatatggaagctaccggtgtcaaattagacgtggcgtatttggagaatctcagccttgaagttgctgcccacatgcgccgcttggaggaagaagtattccgtttagcaggccgttcctttcgccttaactctcgcgatcagttagaacgtgtgttgttcgatgaacttggtctccctcctatcggcaagacagagaagaccggtaaacgtagcacttcagcggcggttttagatgctcttcgcgaagtccatcccattgtggacaagatcttgcagtaccgcgaactcgcgaaattgaaaggcacctatattgaccgtcttccggcattagtccacccgaaaacgggacgcctccatacccgcttcaaccaaacagccacggcgaccggtcgtttgtcctcctctgatccaaaccttcagaatattccagtacgtaccccattgggccagaagatccgccgtgcgtttgtagctgaggagggttggcgtttagtggccctcgattatcgtcaaattgaattacgtgtccttgcccatctttctggcgatgagaacctcatccgcgtgtttcaggaaggcaaagacattcacactcaaacggcaagctggatgtttggattatcagctgaagcgatcgatcctttgatgcgtcgtgcagcgaagaagatcaatttcggtgttctctacggtatgagtgcctttcgtttgtcgcaggaattaggcattccctatgaagaagctcaggcgttcattcagaaatactttcaaagctatcccaaagttaaagcatggatcgagaagactctccgtgaaggccgcacacgtggttacgtagagaccttatttggacgtcgccgctatgttcccgatttaaacgctcgcgtgaaaggcaagcgtgaagccgccgaacgcatggcgttcaacatgcctgtacagggcacggcagctgacctcatgaaacttgcaatggtgcgcctttttccacaattgcgtgaagttggtgcccgcatgctcttgcaggtccatgatgaactcttgctggaagcgccaaaagagcgtgcggaagaggtggcagccctcgcgaaagaagttatggaaggcgtgtggcccttagcggtgcctcttgaagtcgaagttggtattggcgaggattggctggctgccaaagga

SEQ ID NO: 4576 - protein, 841 aa, synthetic construct
  REGION 1..841: note = Variant of DNA polymerase I from Thermus sp. strain 2.9
MHHHHHHGGSGVLPVFEPKGRVLLVDGHHLAYRNFFALKGLTTSLGEPVQGVYGFAKSLLKALKEDGDVVIVVFDAKAPSFRHEAYEAYKAGRAPTPEDFPRQLALMKELVDLLGLERLEVPGFEADDVLATLAKKAEREGYEVQILTADRDLFQLLSPRISVLHPEGHRITPEWLWEKYGLRPEQWVDFRALAGDPSDNIPGVKGIGEKTALKLLKEWGSLENLLKNLDQVKPESVREKILAHLEDLKLSRELSRVRTDLPLEVDFGRRREPDWEGLKAFLERLEFGSLLHEFGLLESPLLAEEAPWPPPEGAFLGYRLTRPEPMWAELLALAASAQGRVYRAEDPHGALRGLFEVRGLLAKDLAVVALREGLDLPPTDDPMLLAYLLDPSNTTPEGVARRYGGEWTEDAAKRALLAERLHANLLGRLQGEERLLWLYEEVEKPLSVVLAHMEATGVKLDVAYLENLSLEVAAHMRRLEEEVFRLAGRSFRLNSRDQLERVLFDELGLPPIGKTEKTGKRSTSAAVLDALREVHPIVDKILQYRELAKLKGTYIDRLPALVHPKTGRLHTRFNQTATATGRLSSSDPNLQNIPVRTPLGQKIRRAFVAEEGWRLVALDYRQIELRVLAHLSGDENLIRVFQEGKDIHTQTASWMFGLSAEAIDPLMRRAAKKINFGVLYGMSAFRLSQELGIPYEEAQAFIQKYFQSYPKVKAWIEKTLREGRTRGYVETLFGRRRYVPDLNARVKGKREAAERMAFNMPVQGTAADLMKLAMVRLFPQLREVGARMLLQVHDELLLEAPKERAEEVAALAKEVMEGVWPLAVPLEVEVGIGEDWLAAKG

SEQ ID NO: 4577 - DNA, 2523 bp, synthetic construct
  misc_feature 1..2523: note = Variant of DNA polymerase I from Thermus sp. strain 2.9
  source 1..2523: mol_type = other DNA
atgcaccatcatcatcatcatggcggtagcggcgtgttaccggtgttcgagcctaaaggtcgcgtgcttctggttgatggccatcatctcgcgtatcgtaacttctttgccctgaaaggattaaccaccagcctaggcgagccggtacagggtgtctacggctttgcaaagtcgctcctgaaagctctgaaagaagacggtgatgtggtgattgttgtctttgatgcgaaagcgccaagttttcgccacgaagcgtacgaagcttacaaagccgggcgtgctccaacgccggaagactttcctcgccaattggcgcttatgaaggaattagtggatttgcttggcctcgaacgcttggaagttcccggtttcgaggcagacgacgtattagcgactctcgcaaagaaagccgaacgtgagggctatgaagtccagatcttgacagcagatcgcgatcttttccagcttttatctccgcgcatctcggtgttacacccggaagggcatcgtatcaccccggaatggctctgggagaaatatggtttgcgtcccgaacaatgggtggattttcgcgccttagcaggcgatccgagcgacaatattccgggagttaaaggtatcggcgagaagacggcgctcaagctccttaaagaatgggggtcgttggagaacttgcttaagaatttagatcaggtcaaaccagagtcagtgcgtgagaagattcttgctcacctcgaagacctcaaattaagccgcgaattgtcccgtgtacgcaccgatttgccgctcgaagttgatttcggtcgccgccgcgaacctgactgggagggtcttaaagcgtttttagagcgtcttgaatttggttcgctcttgcatgaattcggccttttagaaagcccgttactggccgaagaagcaccttggccaccgcccgagggcgcgtttttaggttaccgtttgagtcgcccggaaccgatgtgggccgaattactggctcttgcagcgtctgcccagggacgtgtgtatcgcgcggaagaccctcatggtgcgctccgcggcctcttcgaagtccgtggactccttgccaaagacttagctgttgttgcattgcgcgaaggtcttgatttacctccgactgatgatccaatgcttcttgcgtacctcttggacccgtcaaacacgacgcccgaaggcgtagcccgtcgttacggcggcgagtggaccgaagatgcagcgaaacgcgcgttattggccgaacgtttgcacgccaatttattaggacgtttgcaaggcgaggaacgtctcctctggctttacgaagaagtggagaaaccattgagtcgcgtgctcgcgcatatggaagctaccggtgtcaaattagacgtggcgtatttggagaatctcagccttgaagttgctgcccacatgcgccgcttggaggaagaagtattccgtttagcaggccgttcctttcgccttaactctcgcgatcagttagaacgtgtgttgttcgatgaacttggtctccctcctatcggcaagacagagaagaccggtaaacgtagcacttcagcggcggttttagaagctcttttggaagtccatcccattgtggacaagatcttgcagtaccgcgaactcgcgaaattgaaaggcacctatattgaccgtcttccggcattagtccacccgaaaacgggacgcctccatacccgcttcaaccaaacagccacggcgaccggtcgtttgtcctcctctgatccaaaccttcagaatattccagtacgtaccccattgggccagaagatccgccgtgcgtttgtagctgaggagggttggcgtttagtggccctcgattatcgtcaaattgaattacgtgtccttgcccatctttctggcgatgagaacctcatccgcgtgtttcaggaaggcaaagacattcacactcaaacggcaagctggatgtttggattatcagctgaagcgatcgatcctttgatgcgtcgtgcagcgaagaccatcaatttcggtgttctctacggtatgagtgcctttcgtttgtcgcaggaattaggcattccctatgaagaagctcaggcgttcattcagaaatactttcaaagctatcccaaagttaaagcatggatcgagaagactctccgtgaaggccgcacacgtggttacgtagagaccttatttggacgtcgccgctatgttcccgatttaaacgctcgcgtgaaaggcaagcgtgaagccgccgaacgcatggcgttcaacatgcctgtacagggcacggcagctgacctcatgaaacttgcaatggtgcgcctttttccacaattgcgtgaagttggtgcccgcatgctcttgcaggtccacgatgaactcttgttagaagcgccaaaagagcgtgcggaagaggtggcagccctcgcgaaagaagttatggaaggcgtgtggcccttagcggtgcctcttgaagtcgaagttggtattggcgaggattggctggctgccaaagga

SEQ ID NO: 4578 - protein, 841 aa, synthetic construct
  REGION 1..841: note = Variant of DNA polymerase I from Thermus sp. strain 2.9
MHHHHHHGGSGVLPVFEPKGRVLLVDGHHLAYRNFFALKGLTTSLGEPVQGVYGFAKSLLKALKEDGDVVIVVFDAKAPSFRHEAYEAYKAGRAPTPEDFPRQLALMKELVDLLGLERLEVPGFEADDVLATLAKKAEREGYEVQILTADRDLFQLLSPRISVLHPEGHRITPEWLWEKYGLRPEQWVDFRALAGDPSDNIPGVKGIGEKTALKLLKEWGSLENLLKNLDQVKPESVREKILAHLEDLKLSRELSRVRTDLPLEVDFGRRREPDWEGLKAFLERLEFGSLLHEFGLLESPLLAEEAPWPPPEGAFLGYRLSRPEPMWAELLALAASAQGRVYRAEDPHGALRGLFEVRGLLAKDLAVVALREGLDLPPTDDPMLLAYLLDPSNTTPEGVARRYGGEWTEDAAKRALLAERLHANLLGRLQGEERLLWLYEEVEKPLSRVLAHMEATGVKLDVAYLENLSLEVAAHMRRLEEEVFRLAGRSFRLNSRDQLERVLFDELGLPPIGKTEKTGKRSTSAAVLEALLEVHPIVDKILQYRELAKLKGTYIDRLPALVHPKTGRLHTRFNQTATATGRLSSSDPNLQNIPVRTPLGQKIRRAFVAEEGWRLVALDYRQIELRVLAHLSGDENLIRVFQEGKDIHTQTASWMFGLSAEAIDPLMRRAAKTINFGVLYGMSAFRLSQELGIPYEEAQAFIQKYFQSYPKVKAWIEKTLREGRTRGYVETLFGRRRYVPDLNARVKGKREAAERMAFNMPVQGTAADLMKLAMVRLFPQLREVGARMLLQVHDELLLEAPKERAEEVAALAKEVMEGVWPLAVPLEVEVGIGEDWLAAKG

SEQ ID NO: 4579 - DNA, 2523 bp, synthetic construct
  misc_feature 1..2523: note = Variant of DNA polymerase I from Thermus sp. strain 2.9
  source 1..2523: mol_type = other DNA
atgcaccatcatcatcatcatggcggtagcggcgtgttaccggtgttcgagcctaaaggtcgcgtgcttctggttgatggccatcatctcgcgtatcgtaacttctttgccctgaaaggattaaccaccagcctgggcgagccggtacagggtgtctacggctttgcaaagtcgctcctgaaagctctgaaagaagacggtgatgtggtgattgttgtctttgatgcgaaagcgccaagttttcgccacgaagcgtacgaagcttacaaagccgggcgtgctccaacgccggaagactttcctcgccaattggcgcttatgaaggaattagtggatttgcttggcctcgaacgcttggaagttcccggtttcgaggcagacgacgtattagcgactctcgcaaagaaagccgaacgtgagggctatgaagtccagatcttgacagcagatcgcgatcttttccagcttttatctccgcgcatctcggtgttacacccggaagggcatcgtatcaccccggaatggctctgggagaaatatggtttgcgtcccgaacaatgggtggattttcgcgccttagcaggcgatccgagcgacaatattccgggagttaaaggtatcggcgagaagacggcgctcaagctccttaaagaatgggggtcgttggagaacttgcttaagaatttagatcaggtcaaaccagagtcagtgcgtgagaagattcttgctcacctcgaagacctcaaattaagccgcgaattgtcccgtgtacgcaccgatttgccgctcgaagttgatttcggtcgccgccgcgaacctgactgggagggtcttaaagcgtttttagagcgtcttgaatttggttcgctcttgcatgaattcggccttttagaaagcccgttactggccgaagaagcaccttggccaccgcccgagggcgcgtttttaggttaccgtttgagtcgcccggaaccgatgtgggccgaattactggctcttgcagcgtctgcccagggacgtgtgtatcgcgcggaagaccctcatggtgcgctccgcggcctcttcgaagtccgtggactccttgccaaagacttagctgttgttgcattgcgcgaaggtcttgatttacctccgactgatgatccaatgcttcttgcgtacctcttggacccgtcaaacacgacgcccgaaggcgtagcccgtcgttacggcggcgagtggaccgaagatgcagcgaaacgcgcgttattggccgaacgtttgcacgccaatttattaggacgtttgcaaggcgaggaacgtctcctctggctttacgaagaagtggagaaaccattgagtcgcgtgctcgcgcatatggaagctaccggtgtcaaattagacgtggcgtatttggagaatctcagccttgaagttgctgcccacatgcgccgcttggaggaagaagtattccgtttagcaggccgttcctttcgccttaactctcgcgatcagttagaacgtgtgttgttcgatgaacttggtctccctcctatcggcaagacagagaagaccggtaaacgtagcacttcagcggcggttttagaagctcttcgcggtgtccatcccattgtggacaagatcttgcagtaccgcgaactcgcgaaattgaaaggcacctatattgaccgtcttccggcattagtccacccgaaaacgggacgcctccatacccgcttcaaccaaacagccacggcgaccggtcgtttgtcctcctctgatccaaaccttcagaatattccagtacgtaccccattgggccagaagatccgccgtgcgtttgtagctgaggagggttggcgtttagtggccctcgattatcgtcaaattgaattacgtgtccttgcccatctttctggcgatgagaacctcatccgcgtgtttcaggaaggcaaagacattcacactcaaacggcaagctggatgtttggattatcagctgaagcgatcgatcctttgatgcgtcgtgcagcgaagaccatcaatttcggtgttctctacggtatgagtgcctttcgtttgtcgcaggaattaggcattccctatgaagaagctcaggcgttcattcagaaatactttcaaagctatcccaaagttaaagcatggatcgagaagactctccgtgaaggccgcacacgtggttacgtagagaccttatttggacgtcgccgctatgttcccgatttaaacgctcgcgtgaaaggcaagcgtgaagccgccgaacgcatggcgttcaacatgcctgtacagggcacggcagctgacctcatgaaacttgcaatggtgcgcctttttccacaattgcgtgaagttggtgcccgcatgctcttgcaggtccacgatgaactcttgttagaagcgccaaaagagcgtgcggaagaggtggcagccctcgcgaaagaagttatggaaggcgtgtggcccttagcggtgcctcttgaagtcgaagttggtattggcgaggattggctggctgccaaagga

SEQ ID NO: 4580 - protein, 841 aa, synthetic construct
  REGION 1..841: note = Variant of DNA polymerase I from Thermus sp. strain 2.9
MHHHHHHGGSGVLPVFEPKGRVLLVDGHHLAYRNFFALKGLTTSLGEPVQGVYGFAKSLLKALKEDGDVVIVVFDAKAPSFRHEAYEAYKAGRAPTPEDFPRQLALMKELVDLLGLERLEVPGFEADDVLATLAKKAEREGYEVQILTADRDLFQLLSPRISVLHPEGHRITPEWLWEKYGLRPEQWVDFRALAGDPSDNIPGVKGIGEKTALKLLKEWGSLENLLKNLDQVKPESVREKILAHLEDLKLSRELSRVRTDLPLEVDFGRRREPDWEGLKAFLERLEFGSLLHEFGLLESPLLAEEAPWPPPEGAFLGYRLSRPEPMWAELLALAASAQGRVYRAEDPHGALRGLFEVRGLLAKDLAVVALREGLDLPPTDDPMLLAYLLDPSNTTPEGVARRYGGEWTEDAAKRALLAERLHANLLGRLQGEERLLWLYEEVEKPLSRVLAHMEATGVKLDVAYLENLSLEVAAHMRRLEEEVFRLAGRSFRLNSRDQLERVLFDELGLPPIGKTEKTGKRSTSAAVLEALRGVHPIVDKILQYRELAKLKGTYIDRLPALVHPKTGRLHTRFNQTATATGRLSSSDPNLQNIPVRTPLGQKIRRAFVAEEGWRLVALDYRQIELRVLAHLSGDENLIRVFQEGKDIHTQTASWMFGLSAEAIDPLMRRAAKTINFGVLYGMSAFRLSQELGIPYEEAQAFIQKYFQSYPKVKAWIEKTLREGRTRGYVETLFGRRRYVPDLNARVKGKREAAERMAFNMPVQGTAADLMKLAMVRLFPQLREVGARMLLQVHDELLLEAPKERAEEVAALAKEVMEGVWPLAVPLEVEVGIGEDWLAAKG

SEQ ID NO: 4581 - DNA, 2523 bp, synthetic construct
  misc_feature 1..2523: note = Variant of DNA polymerase I from Thermus sp. strain 2.9
  source 1..2523: mol_type = other DNA
atgcaccatcatcatcatcatggcggtagcggcgtgttaccggtgttcgagcctaaaggtcgcgtgcttctggttgatggccatcatctcgcgtatcgtaacttctttgccctgaaaggattaaccaccagcctgggcgagccggtacagggtgtctacggctttgcaaagtcgctcctgaaagctctgaaagaagacggtgatgtggtgattgttgtctttgatgcgaaagcgccaagttttcgccacgaagcgtacgaagcttacaaagccgggcgtgctccaacgccggaagactttcctcgccaattggcgcttatgaaggaattagtggatttgcttggcctcgaacgcttggaagttcccggtttcgaggcagacgacgtattagcgactctcgcaaagaaagccgaacgtgagggctatgaagtccagatcttgacagcagatcgcgatcttttccagcttttatctccgcgcatctcggtgttacacccggaagggcatcgtatcaccccggaatggctctgggagaaatatggtttgcgtcccgaacaatgggtggattttcgcgccttagcaggcgatccgagcgacaatattccgggagttaaaggtatcggcgagaagacggcgctcaagctccttaaagaatgggggtcgttggagaacttgcttaagaatttagatcaggtcaaaccagagtcagtgcgtgagaagattcttgctcacctcgaagacctcaaattaagccgcgaattgtcccgtgtacgcaccgatttgccgctcgaagttgatttcggtcgccgccgcgaacctgactgggagggtcttaaagcgtttttagagcgtcttgaatttggttcgctcttgcatgaattcggccttttagaaagcccgttactggccgaagaagcaccttggccaccgcccgagggcgcgtttttaggttaccgtttgagtcgcccggaaccgatgtgggccgaattactggctcttgcagcgtctgcccagggacgtgtgtatcgcgcggaagaccctcatggtgcgctccgcggcctcttcgaagtccgtggactccttgccaaagacttagctgttgttgcattgcgcgaaggtcttgatttacctccgactgatgatccaatgcttcttgcgtacctcttggacccgtcaaacacgacgcccgaaggcgtagcccgtcgttacggcggcgagtggaccgaagatgcagcgaaacgcgcgttattggccgaacgtttgcacgccaatttattaggacgtttgcaaggcgaggaacgtctcctctggctttacgaagaagtggagaaaccattgagtcgcgtgctcgcgcatatggaagctaccggtgtcaaattagacgtggcgtatttggagaatctcagccttgaagttgctgcccacatgcgccgcttggaggaagaagtattccgtttagcaggccgttcctttcgccttaactctcgcgatcagttagaacgtgtgttgttcgatgaacttggtctccctcctatcggcaagacagagaagaccggtaaacgtagcacttcacaggcggttttagaagctcttcgcgaagtccatcccattgtggacaagatcttgcagtaccgcgaactcgcgaaattgaaaggcacctatattgaccgtcttccggcattagtccacccgaaaacgggacgcctccatacccgcttcaaccaaacagccacggcgaccggtcgtttgtcctcctctgatccaaaccttcagaatattccagtacgtaccccattgggccagaagatccgccgtgcgtttgtagctgaggagggttggcgtttagtggccctcgattatcgtcaaattgaattacgtgtccttgcccatctttctggcgatgagaacctcatccgcgtgtttcaggaaggcaaagacattcacactcaaacggcaagctggatgtttggattatcagctgaagcgatcgatcctttgatgcgtcgtgcagcgaagaccatcaatttcggtgttctctacggtatgagtgcctttcgtttgtcgcaggaattaggcattccctatgaagaagctcaggcgttcattcagaaatactttcaaagctatcccaaagttaaagcatggatcgagaagactctccgtgaaggccgcacacgtggttacgtagagaccttatttggacgtcgccgctatgttcccgatttaaacgctcgcgtgaaaggcaagcgtgaagccgccgaacgcatggcgttcaacatgcctgtacagggcacggcagctgacctcatgaaacttgcaatggtgcgcctttttccacaattgcgtgaagttggtgcccgcatgctcttgcaggtccacgatgaactcttgttagaagcgccaaaagagcgtgcggaagaggtggcagccctcgcgaaagaagttatggaaggcgtgtggcccttagcggtgcctcttgaagtcgaagttggtattggcgaggattggctggctgccaaagga

SEQ ID NO: 4582 - protein, 841 aa, synthetic construct
  REGION 1..841: note = Variant of DNA polymerase I from Thermus sp. strain 2.9
MHHHHHHGGSGVLPVFEPKGRVLLVDGHHLAYRNFFALKGLTTSLGEPVQGVYGFAKSLLKALKEDGDVVIVVFDAKAPSFRHEAYEAYKAGRAPTPEDFPRQLALMKELVDLLGLERLEVPGFEADDVLATLAKKAEREGYEVQILTADRDLFQLLSPRISVLHPEGHRITPEWLWEKYGLRPEQWVDFRALAGDPSDNIPGVKGIGEKTALKLLKEWGSLENLLKNLDQVKPESVREKILAHLEDLKLSRELSRVRTDLPLEVDFGRRREPDWEGLKAFLERLEFGSLLHEFGLLESPLLAEEAPWPPPEGAFLGYRLSRPEPMWAELLALAASAQGRVYRAEDPHGALRGLFEVRGLLAKDLAVVALREGLDLPPTDDPMLLAYLLDPSNTTPEGVARRYGGEWTEDAAKRALLAERLHANLLGRLQGEERLLWLYEEVEKPLSRVLAHMEATGVKLDVAYLENLSLEVAAHMRRLEEEVFRLAGRSFRLNSRDQLERVLFDELGLPPIGKTEKTGKRSTSQAVLEALREVHPIVDKILQYRELAKLKGTYIDRLPALVHPKTGRLHTRFNQTATATGRLSSSDPNLQNIPVRTPLGQKIRRAFVAEEGWRLVALDYRQIELRVLAHLSGDENLIRVFQEGKDIHTQTASWMFGLSAEAIDPLMRRAAKTINFGVLYGMSAFRLSQELGIPYEEAQAFIQKYFQSYPKVKAWIEKTLREGRTRGYVETLFGRRRYVPDLNARVKGKREAAERMAFNMPVQGTAADLMKLAMVRLFPQLREVGARMLLQVHDELLLEAPKERAEEVAALAKEVMEGVWPLAVPLEVEVGIGEDWLAAKG

SEQ ID NO: 4583 - DNA, 2523 bp, synthetic construct
  misc_feature 1..2523: note = Variant of DNA polymerase I from Thermus sp. strain 2.9
  source 1..2523: mol_type = other DNA
atgcaccatcatcatcatcatggcggtagcggcgtgttaccggtgttcgagcctaaaggtcgcgtgcttctggttgatggccatcatctcgcgtatcgtaacttctttgccctgaaaggattaaccaccagcctgggcgagccggtacagggtgtctacggctttgcaaagtcgctcctgaaagctctgaaagaagacggtgatgtggtgattgttgtctttgatgcgaaagcgccaagttttcgccacgaagcgtacgaagcttacaaagccgggcgtgctccaacgccggaagactttcctcgccaattggcgcttatgaaggaattagtggatttgcttggcctcgaacgcttggaagttcccggtttcgaggcagacgacgtattagcgactctcgcaaagaaagccgaacgtgagggctatgaagtccagatcttgacagcagatcgcgatcttttccagcttttatctccgcgcatctcggtgttacacccggaagggcatcgtatcaccccggaatggctctgggagaaatatggtttgcgtcccgaacaatgggtggattttcgcgccttagcaggcgatccgagcgacaatattccgggagttaaaggtatcggcgagaagacggcgctcaagctccttaaagaatgggggtcgttggagaacttgcttaagaatttagatcaggtcaaaccagagtcagtgcgtgagaagattcttgctcacctcgaagacctcaaattaagccgcgaattgtcccgtgtacgcaccgatttgccgctcgaagttgatttcggtcgccgccgcgaacctgactgggagggtcttaaagcgtttttagagcgtcttgaatttggttcgctcttgcatgaattcggccttttagaaagcccgttactggccgaagaagcaccttggccaccgcccgagggcgcgtttttaggttaccgtttgagtcgcccggaaccgatgtgggccgaattactggctcttgcagcgtctgcccagggacgtgtgtatcgcgcggaagaccctcatggtgcgctccgcggcctcttcgaagtccgtggactccttgccaaagacttagctgttgttgcattgcgcgaaggtcttgatttacctccgactgatgatccaatgcttcttgcgtacctcttggacccgtcaaacacgacgcccgaaggcgtagcccgtcgttacggcggcgagtggaccgaagatgcagcgaaacgcgcgttattggccgaacgtttgcacgccaatttattaggacgtttgcaaggcgaggaacgtctcctctggctttacgaagaagtggagaaaccattgagtcgcgtgctcgcgcatatggaagctaccggtgtcaaattagacgtggcgtatttggagaatctcagccttgaagttgctgcccacatgcgccgcttggaggaagaagtattccgtttagcaggccgttcctttcgccttaactctcgcgatcagttagaacgtgtgttgttcgatgaacttggtctccctcctatcggcaagacagagaagaccggtaaacgtagcacttcagcggcggttttagaagctcttcgcgaagtccatcccattgtggacaagatcttgcagtaccgcgaactcgcgaaattgaaaggcacctatattgaccgtcttccggcattagtccacccgaaaacgggacgcctccatacccgcttcaaccaaacagccacggcgaccggtcgtttgtcctcctctgatccaaaccttcagaatattccagtacgtaccccattgggccagaagatccgccgtgcgtttgtagctgaggagggttggcgtttagtggccctcgattatcgtcaaattgaattacgtgtccttgcccatctttctggcgatgagaacctcatccgcgtgtttcaggaaggcaaagacattcacactcaaacggcaagctggatgtttggattatcagctgaagcgatcgatcctttgatgcgtcgtgcagcgaagaccatcaatttcggtgttctctacggtatgagtgcctttcgtttgtcgcaggaattaggcattccctatgaagaagctcaggcgttcattcagaaatactttcaaagctatcccaaagttaaagcatggatcgagaagactctccgtgaaggccgcacacgtggttacgtagagaccttatttggacgtcgccgctatgttcccgatttaaacgctcgcgtgaaaggcaagcgtgaagccgccgaacgcatggcgttcaacatgcctgtacagggcacggcagctgacatgatgaaacttgcaatggtgcgcctttttccacaattgcgtgaagttggtgcccgcatgctcttgcaggtccacgatgaactcttgttagaagcgccaaaagagcgtgcggaagaggtggcagccctcgcgaaagaagttatggaaggcgtgtggcccttagcggtgcctcttgaagtcgaagttggtattggcgaggattggctggctgccaaagga

SEQ ID NO: 4584 - protein, 841 aa, synthetic construct
  REGION 1..841: note = Variant of DNA polymerase I from Thermus sp. strain 2.9
MHHHHHHGGSGVLPVFEPKGRVLLVDGHHLAYRNFFALKGLTTSLGEPVQGVYGFAKSLLKALKEDGDVVIVVFDAKAPSFRHEAYEAYKAGRAPTPEDFPRQLALMKELVDLLGLERLEVPGFEADDVLATLAKKAEREGYEVQILTADRDLFQLLSPRISVLHPEGHRITPEWLWEKYGLRPEQWVDFRALAGDPSDNIPGVKGIGEKTALKLLKEWGSLENLLKNLDQVKPESVREKILAHLEDLKLSRELSRVRTDLPLEVDFGRRREPDWEGLKAFLERLEFGSLLHEFGLLESPLLAEEAPWPPPEGAFLGYRLSRPEPMWAELLALAASAQGRVYRAEDPHGALRGLFEVRGLLAKDLAVVALREGLDLPPTDDPMLLAYLLDPSNTTPEGVARRYGGEWTEDAAKRALLAERLHANLLGRLQGEERLLWLYEEVEKPLSRVLAHMEATGVKLDVAYLENLSLEVAAHMRRLEEEVFRLAGRSFRLNSRDQLERVLFDELGLPPIGKTEKTGKRSTSAAVLEALREVHPIVDKILQYRELAKLKGTYIDRLPALVHPKTGRLHTRFNQTATATGRLSSSDPNLQNIPVRTPLGQKIRRAFVAEEGWRLVALDYRQIELRVLAHLSGDENLIRVFQEGKDIHTQTASWMFGLSAEAIDPLMRRAAKTINFGVLYGMSAFRLSQELGIPYEEAQAFIQKYFQSYPKVKAWIEKTLREGRTRGYVETLFGRRRYVPDLNARVKGKREAAERMAFNMPVQGTAADMMKLAMVRLFPQLREVGARMLLQVHDELLLEAPKERAEEVAALAKEVMEGVWPLAVPLEVEVGIGEDWLAAKG

SEQ ID NO: 4585 - DNA, 2523 bp, synthetic construct
  misc_feature 1..2523: note = Variant of DNA polymerase I from Thermus sp. strain 2.9
  source 1..2523: mol_type = other DNA
atgcaccatcatcatcatcatggcggtagcggcgtgttaccggtgttcgagcctaaaggtcgcgtgcttctggttgatggccatcatctcgcgtatcgtaacttctttgccctgaaaggattaaccaccagcctgggcgagccggtacagggtgtctacggctttgcaaagtcgctcctgaaagctctgaaagaagacggtgatgtggtgattgttgtctttgatgcgaaagcgccaagttttcgccacgaagcgtacgaagcttacaaagccgggcgtgctccaacgccggaagactttcctcgccaattggctcttatgaaggaattagtggatttgcttggcctcgaacgcttggaagttcccggtttcgaggcagacgacgtattagcgactctcgcaaagaaagccgaagatgagggctatgaagtccagatcttgacagcagatcgcgatcttttccagcttttatctccgcgcatctcggtgttacacccggaagggcatcgtatcaccccggaatggctctgggagaaatatggtttgcgtcccgaacaatgggtggattttcgcgccttagcaggcgatccgagcgacaatattccgggagttaaaggtatcggcgagaagacggcgctcaagctccttaaagaatgggggtcgttggagaacttgcttaagaatttagatcaggtcaaaccagagtcagtgcgtgagaagattcttgctcacctcgaagacctcgagttaagccgcgaattgtcccgtgtacgcaccgatttgccgctcgaagttgatttcggtcgccgccgcgaacctgactgggagggtcttaaagcgtttttagagcgtcttgaatttggttcgctcttgcatgaattcggccttttagaaagcccgttactggccgaagaagcaccttggccaccgcccgagggcgcgtttttaggttaccgtttgagtcgcccggaaccgatgtgggccgaattactggctcttgcagcgtctgcccagggacgtgtgtatcgcgcggaagaccctcatggtgcgctccgcggcctcttcgaagtccgtggactccttgccaaagacttagctgttgttgcattgcgcgaaggtcttgatttacctccgactgatgatccaatgcttcttgcgtacctcttggacccgtcaaacacgacgcccgaaggcgtagcccgtcgttacggcggcgagtggaccgaagatgcagcgaaacgcgcgttattggccgaacgtttgcacgcgaatttacgtggacgtttgcaaggcgaggaacgtctcctctggctttacgaagaagtggagaaaccattgagtcgtgtgctcggtcatatggaagctaccggtgtcaaattagacgtggcgtatttggagaatctcagccttgaagttgctgcccacatgcgccgcttggaggaagaagtattccgtttagcaggccgttcctttcgccttaactctcgcgatcagttagaaaaagtgttgttcgatgaacttggtctccctcctatcggcaagacagagaagaccggtaaacgtagcacttcagcggcggttttagaagctcttcgcgaagtccatcccattgtggacaagatcttgcagtaccgcgaactcgcgaaattgaaaggcacctatattgaccgtcttccggcattagtccacccgaaaacgggacgcctccatacccgcttcaaccaaacagccacggcgaccggtcgtttgtcctcctctgatccaaaccttcagaatattccagtacgtaccccattgggccagaagatccgccgtgcgtttgtagctgaggagggttggcgtttagtggccctcgattatcgtcaaattgaattacgtgtccttgcccatctttctggcgatgagaacctcatccgcgtgtttcaagaaggcaaagacattcacactcaaacggcaagctggatgtttggattaagcgctgaagcgatcgatcctttgatgcgtcgtgcagcgaagaagatcaatttcggtgttctctacggtatgagtgcatttcgtttgtcgcaggaattaggcattccctatgaagaagctcaggcgttcattcagaaatactttcaaagctatcccaaagttaaagcatggatcgagaagactctccgtgaaggccgcacacgtggttacgtagagaccttatttggacgtcgccgctatgttcccgatttaaacggccgcgtgaaaggcaagcgtgaagccgccgaacgcatggcgttcaacatgcctgtacagggcacggcagctgacctcatgaaacttgcaatggtgcgcctttttccacaattgcgtgaagttggtgcccgcatgctcttgcaggtccatgatgaactcttgctggaagcgccaaaagagcgtgcggaagaggtggcagccctcgcgaaagaagttatggaaggcgtgtggcccttagcggtgcctcttgaagtcgaagttggtattggcgaggattggctggctgccaaagga

SEQ ID NO: 4586 - protein, 841 aa, synthetic construct
  REGION 1..841: note = Variant of DNA polymerase I from Thermus sp. strain 2.9
MHHHHHHGGSGVLPVFEPKGRVLLVDGHHLAYRNFFALKGLTTSLGEPVQGVYGFAKSLLKALKEDGDVVIVVFDAKAPSFRHEAYEAYKAGRAPTPEDFPRQLALMKELVDLLGLERLEVPGFEADDVLATLAKKAEDEGYEVQILTADRDLFQLLSPRISVLHPEGHRITPEWLWEKYGLRPEQWVDFRALAGDPSDNIPGVKGIGEKTALKLLKEWGSLENLLKNLDQVKPESVREKILAHLEDLELSRELSRVRTDLPLEVDFGRRREPDWEGLKAFLERLEFGSLLHEFGLLESPLLAEEAPWPPPEGAFLGYRLSRPEPMWAELLALAASAQGRVYRAEDPHGALRGLFEVRGLLAKDLAVVALREGLDLPPTDDPMLLAYLLDPSNTTPEGVARRYGGEWTEDAAKRALLAERLHANLRGRLQGEERLLWLYEEVEKPLSRVLGHMEATGVKLDVAYLENLSLEVAAHMRRLEEEVFRLAGRSFRLNSRDQLEKVLFDELGLPPIGKTEKTGKRSTSAAVLEALREVHPIVDKILQYRELAKLKGTYIDRLPALVHPKTGRLHTRFNQTATATGRLSSSDPNLQNIPVRTPLGQKIRRAFVAEEGWRLVALDYRQIELRVLAHLSGDENLIRVFQEGKDIHTQTASWMFGLSAEAIDPLMRRAAKKINFGVLYGMSAFRLSQELGIPYEEAQAFIQKYFQSYPKVKAWIEKTLREGRTRGYVETLFGRRRYVPDLNGRVKGKREAAERMAFNMPVQGTAADLMKLAMVRLFPQLREVGARMLLQVHDELLLEAPKERAEEVAALAKEVMEGVWPLAVPLEVEVGIGEDWLAAKG

SEQ ID NO: 4587 - DNA, 2523 bp, synthetic construct
  misc_feature 1..2523: note = Variant of DNA polymerase I from Thermus sp. strain 2.9
  source 1..2523: mol_type = other DNA
atgcaccatcatcatcatcatggcggtagcggcgtgttaccggtgttcgagcataaaggtcgcgtgcttctggttgatggccatcatctcgcgtatcgtaacttctttgccctgaaaggattaaccaccagcctgggcgagccggtacagggtgtctacggctttgcaaagtcgctcctgaaagctctgaaagaagacggtgatgtggtgattgttgtctttgatgcgaaagcgccaagttttcgccacgaagcgtacgaagcttacaaagccgggcgtgctccaacgccggaagactttcctcgccaattggcgcttatgaaggaattagtggatttgcttggcctcgaacgcttggaagttcccggtttcgaggcagacgacgtattagcgactctcgcaaagaaagccgaacgtgagggctatgaagtccagatcttgacagcagatcgcgatcttttccagcttttatctccgcgcatctcggtgttacacccggaagggcatcgtatcaccccggaatggctctgggagaaatatggtttgcgtcccgaacaatgggtggattttcgcgccttagcaggcgatccgagcgacaatattccgggagttaaaggtatcggcgagaagacggcgctcaagctccttaaagaatgggggtcgttggagaacttgcttaagaatttagatcaggtcaaaccagagtcagtgcgtgagaagattcttgctcacctcgaagacctcaaattaagccgcgaattgtcccgtgtacgcaccgatttgccgctcgaagttgatttcggtcgccgccgcgaacctgactgggagggtcttaaagcgtttttagagcgtcttgaatttggttcgctcttgcatgaattcggccttttagaaagcccgttactggccgaagaagcaccttggccaccgcccgagggcgcgtttttaggttaccgtttgacccgcccggaaccgatgtgggccgaattactggctcttgcagcgtctgcccagggacgtgtgtatcgcgcggaagaccctcatggtgcgctccgcggcctcttcgaagtccgtggactccttgccaaagacttagctgttgttgcattgcgcgaaggtcttgatttacctccgactgatgatccaatgcttcttgcgtacctcttggacccgtcaaacacgacgcccgaaggcgtagcccgtcgttacggcggcgagtggaccgaagatgcagcgaaacgcgcgttattggccgaacgtttgcacgagaatttactgggacgtttgcaaggcgaggaacgtctcctctggctttacgaagaagtggagaaaccattgagtcgtgtgctcgctcatatggaagctaccggtgtcaaattagacgtggcgtatttggagaatctcagccttgaagttgctgcccacatgcgccgcttggaggaagaagtattccgtttagcaggccgttcctttcgccttaactctcgcgatcagttagaacgtgtgttgttcgatgaacttggtctccctcctatcggcaagacagagaagaccggtaaacgtagcacttcagcggcggttttagaagctcttcgcgaagtccatcccattgtggacaagatcttgcagtaccgcgaactggcgaaattgaaaggcacctatattgaccgtcttccggcattagtccacccgaaaacgggacgcctccatacccgcttcaaccaaacagccacggcgaccggtcgtttgtcctcctctgatccaaaccttcagaatattccagtacgtaccccattgggccagaagatccgccgtgcgtttgtagctgaggagggttggcgtttagtggccctcgattatcgtcaaattgaattacgtgtccttgcccatctttctggcgatgagaacctcatccgcgtgtttcaggaaggcaaagacattcacactcaaacggcaagctggatgtttggattatcagctgaagcgatcgatcctttgatgcgtcgtgcagcgaagaccatcaatttcggtgttctctacggtatgagtgcctttcgtttgtcgcaggaattaggcattccctatgaagaagctcaggcgttcattcagaaatactttcaaagctatcccaaagttaaagcatggatcgagaagactctccgtgaaggccgcacacgtggttacgtagagaccttatttggacgtcgccgctatgttcccgatttaaacgctcgcgtgaaaggcaagcgtgaagccgccgaacgcatggcgttcaacatgcctgtacagggcacggcagctgacctcatgaaacttgcaatggtgcgcctttttccacaattgcgtgaagttggtgcccgcatgctcttgcaggtccacgatgaactcttgttagaagcgccaaaagagcgtgcggaagaggtggcagccctcgcgaaagaagttatggaaggcgtgtggcccttagcggtgcctcttgaagtcgaagttggtattggcgaggattggctggctgccaaagga

SEQ ID NO: 4588 - protein, 841 aa, synthetic construct
  REGION 1..841: note = Variant of DNA polymerase I from Thermus sp. strain 2.9
MHHHHHHGGSGVLPVFEHKGRVLLVDGHHLAYRNFFALKGLTTSLGEPVQGVYGFAKSLLKALKEDGDVVIVVFDAKAPSFRHEAYEAYKAGRAPTPEDFPRQLALMKELVDLLGLERLEVPGFEADDVLATLAKKAEREGYEVQILTADRDLFQLLSPRISVLHPEGHRITPEWLWEKYGLRPEQWVDFRALAGDPSDNIPGVKGIGEKTALKLLKEWGSLENLLKNLDQVKPESVREKILAHLEDLKLSRELSRVRTDLPLEVDFGRRREPDWEGLKAFLERLEFGSLLHEFGLLESPLLAEEAPWPPPEGAFLGYRLTRPEPMWAELLALAASAQGRVYRAEDPHGALRGLFEVRGLLAKDLAVVALREGLDLPPTDDPMLLAYLLDPSNTTPEGVARRYGGEWTEDAAKRALLAERLHENLLGRLQGEERLLWLYEEVEKPLSRVLAHMEATGVKLDVAYLENLSLEVAAHMRRLEEEVFRLAGRSFRLNSRDQLERVLFDELGLPPIGKTEKTGKRSTSAAVLEALREVHPIVDKILQYRELAKLKGTYIDRLPALVHPKTGRLHTRFNQTATATGRLSSSDPNLQNIPVRTPLGQKIRRAFVAEEGWRLVALDYRQIELRVLAHLSGDENLIRVFQEGKDIHTQTASWMFGLSAEAIDPLMRRAAKTINFGVLYGMSAFRLSQELGIPYEEAQAFIQKYFQSYPKVKAWIEKTLREGRTRGYVETLFGRRRYVPDLNARVKGKREAAERMAFNMPVQGTAADLMKLAMVRLFPQLREVGARMLLQVHDELLLEAPKERAEEVAALAKEVMEGVWPLAVPLEVEVGIGEDWLAAKG

SEQ ID NO: 4589 - DNA, 2523 bp, synthetic construct
  misc_feature 1..2523: note = Variant of DNA polymerase I from Thermus sp. strain 2.9
  source 1..2523: mol_type = other DNA
atgcaccatcatcatcatcatggcggtagcggcgtgttaccggtgttcgagcctaaaggtcgcgtgcttctggttgatggccatcatctcgcgtatcgtaacttctttgccctgaaaggattaaccaccagcctgggcgagccggtacagggtgtctacggctttgcaaagtcgctcctgaaagctctgaaagaagacggtgatgtggtgattgttgtctttgatgcgaaagcgccaagttttcgccacgaagcgtacgaagcttacaaagccgggcgtgctccaacgccggaagactttcctcgccaattggcgcttatgaaggaattagtggatttgcttggcctcgaacgcttggaagttcccggtttcgaggcagacgacgtattagcgactctcgcaaagaaagccgaacgtgagggctatgaagtccagatcttgacagcagatcgcgatcttttccagcttttatctccgcgcatctcggtgttacacccggaagggcatcgtatcaccccggaatggctctgggagaaatatggtttgcgtcccgaacaatgggtggattttcgcgccttagcaggcgatccgagcgacaatattccgggagttaaaggtatcggcgagaagacggcgctcaagctccttaaagaatgggggtcgttggagaacttgcttaagaatttagatcaggtcaaaccagagtcagtgcgtgagaagattcttgctcacctcgaagacctcaaattaagccgcgaattgtcccgtgtacgcaccgatttgccgctcgaagttgatttcggtcgccgccgcgaacctgactgggagggtcttaaagcgtttttagagcgtcttgaatttggttcgctcttgcatgaattcggccttttagaaagcccgttactggccgaagaagcaccttggccaccgcccgagggcgcgtttttaggttaccgtttgagtcgcccggaaccgatgtgggccgaattactggctcttgcagcgtctgcccagggacgtgtgtatcgcgcggaagaccctcatggtgcgctccgcggcctcttcgaagtccgtggactccttgccaaagacttagctgttgttgcattgcgcgaaggtcttgatttacctccgactgatgatccaatgcttcttgcgtacctcttggacccgtcaaacacgacgcccgaaggcgtagcccgtcgttacggcggcgagtggaccgaagatgcagcgaaacgcgcgttattggccgaacgtttgcacgccaatttattaggacgtttgcaaggcgaggaacgtctcctctggctttacgaagaagtggagaaaccattgagtcgcgtgctcgcgcatatggaagtgaccggtgtcaaattagacgtggcgtatttggagaatctcagccttgaagttgctgcccacatgcgccgcttggaggaagaagtattccgtttagcaggccgttcctttcgccttaactctcgcgatcagttagaacgtgtgttgttcgatgaacttggtctccctcctatcggcaagacagagaagaccggtaaacgtagcacttcagcggcggttttagaagctcttcgcgaagtccatcccattgtggacaagatcttgcagtaccgcgaactcgcgaaattgaaaggcacctatattgaccgtcttccggcattagtccacccgaaaacgggacgcctccatacccgcttcaaccaaacagccacggcgaccggtcgtttgtcctcctctgatccaaaccttcagaatattccagtacgtaccccattgggccagaagatccgccgtgcgtttgtagctgaggagggttggcgtttagtggccctcgattatcgtcaaattgaattacgtgtccttgcccatctttctggcgatgagaacctcatccgcgtgtttcaggaaggcaaagacattcacactcaaacggcaagctggatgtttggattatcagctgaagcgatcgatcctttgatgcgtcgtgcagcgaagaccatcaatttcggtgttctctacggtatgagtgcctttcgtttgtcgcaggaattaggcattccctatgaagaagctcaggcgttcattcagaaatactttcaaagctatcccaaagttaaagcatggatcgagaagactctccgtgaaggccgcacacgtggttacgtagagaccttatttggacgtcgccgctatgttcccgatttaaacgctcgcgtgaaaggcaagcgtgaagccgccgaacgcatggcgttcaacatgcctgtacagggcacggcagctgacctcatgaaacttgcaatggtgcgcctttttccacaattgcgtgaagttggtgcccgcatgctcttgcaggtccacgatgaactcttgttagaagcgccaaaagagcgtgcggaagaggtggcagccctcgcgaaagaagttatggaaggcgtgtggcccttagcggtgcctcttgaagtcgaagttggtattggcgaggattggctggctgccaaagga

SEQ ID NO: 4590 - protein, 841 aa, synthetic construct
  REGION 1..841: note = Variant of DNA polymerase I from Thermus sp. strain 2.9
MHHHHHHGGSGVLPVFEPKGRVLLVDGHHLAYRNFFALKGLTTSLGEPVQGVYGFAKSLLKALKEDGDVVIVVFDAKAPSFRHEAYEAYKAGRAPTPEDFPRQLALMKELVDLLGLERLEVPGFEADDVLATLAKKAEREGYEVQILTADRDLFQLLSPRISVLHPEGHRITPEWLWEKYGLRPEQWVDFRALAGDPSDNIPGVKGIGEKTALKLLKEWGSLENLLKNLDQVKPESVREKILAHLEDLKLSRELSRVRTDLPLEVDFGRRREPDWEGLKAFLERLEFGSLLHEFGLLESPLLAEEAPWPPPEGAFLGYRLSRPEPMWAELLALAASAQGRVYRAEDPHGALRGLFEVRGLLAKDLAVVALREGLDLPPTDDPMLLAYLLDPSNTTPEGVARRYGGEWTEDAAKRALLAERLHANLLGRLQGEERLLWLYEEVEKPLSRVLAHMEVTGVKLDVAYLENLSLEVAAHMRRLEEEVFRLAGRSFRLNSRDQLERVLFDELGLPPIGKTEKTGKRSTSAAVLEALREVHPIVDKILQYRELAKLKGTYIDRLPALVHPKTGRLHTRFNQTATATGRLSSSDPNLQNIPVRTPLGQKIRRAFVAEEGWRLVALDYRQIELRVLAHLSGDENLIRVFQEGKDIHTQTASWMFGLSAEAIDPLMRRAAKTINFGVLYGMSAFRLSQELGIPYEEAQAFIQKYFQSYPKVKAWIEKTLREGRTRGYVETLFGRRRYVPDLNARVKGKREAAERMAFNMPVQGTAADLMKLAMVRLFPQLREVGARMLLQVHDELLLEAPKERAEEVAALAKEVMEGVWPLAVPLEVEVGIGEDWLAAKG

SEQ ID NO: 4591 - DNA, 2523 bp, synthetic construct
  misc_feature 1..2523: note = Variant of DNA polymerase I from Thermus sp. strain 2.9
  source 1..2523: mol_type = other DNA
atgcaccatcatcatcatcatggcggtagcggcgtgttaccggtgttcgagcctaaaggtcgcgtgcttctggttgatggccatcatctcgcgtatcgtaacttctttgccctgaaaggattaaccaccagcctgggcgagccggtacagggtgtctacggctttgcaaagtcgctcctgaaagctctgaaagaagacggtgatgtggtgattgttgtctttgatgcgaaagcgccaagttttcgccacgaagcgtacgaagcttacaaagccgggcgtgctccaacgccggaagactttcctcgccaattggcgcttatgaaggaattagtggatttgcttggcctcgaacgcttggaagttcccggtttcgaggcagacgacgtattagcgactctcgcaaagaaagccgaacgtgagggctatgaagtccagatcttgacagcagatcgcgatcttttccagcttttatctccgcgcatctcggtgttacacccggaagggcatcgtatcaccccggaatggctctgggagaaatatggtttgcgtcccgaacaatgggtggattttcgcgccttagcaggcgatccgagcgacaatattccgggagttaaaggtatcggcgagaagacggcgctcaagctccttaaagaatgggggtcgttggagaacttgcttaagaatttagatcaggtcaaaccagagtcagtgcgtgagaagattcttgctcacctcgaagacctcaaattaagccgcgaattgtcccgtgtacgcaccgatttgccgctcgaagttgatttcggtcgccgccgcgaacctgactgggagggtcttaaagcgtttttagagcgtcttgaatttggttcgctcttgcatgaattcggccttttagaaagcccgttactggccgaagaagcaccttggccaccgcccgagggcgcgtttttaggttaccgtttgagtcgcccggaaccgatgtgggccgaattactggctcttgcagcgtctgcccagggacgtgtgtatcgcgcggaagaccctcatggtgcgctccgcggcctcttcgaagtccgtggactccttgccaaagacttagctgttgttgcattgcgcgaaggtcttgatttacctccgactgatgatccaatgcttcttgcgtacctcttggacccgtcaaacacgacgcccgaaggcgtagcccgtcgttacggcggcgagtggaccgaagatgcagcgaaacgcgcgttattggccgaacgtttgcacgccaatttattaggacgtttgcaaggcgaggaacgtctcctctggctttacgaagaagtggagaaaccattgagtcgcgtgctcgcgcatatggaagctaccggtgtcaaattagacgtggcgtatttggagaatctcagccttgaagttgctgcccacatgcgccgcttggaggaagaagtattccgtttagcaggccgttcctttcgccttaactctcgcgatcagttagaacgtgtgttgttcgatgaacttggtctcactcctatcggcaagacagagaagaccggtaaacgtagcacttcagcggcggttttagaagctcttcgcgaagtccatcccattgtggacaagatcttgcagtaccgcgaactcgcgaaattgaaaggcacctatattgaccgtcttccggcattagtccacccgaaaacgggacgcctccatacccgcttcaaccaaacagccacggcgaccggtcgtttgtcctcctctgatccaaaccttcagaatattccagtacgtaccccattgggccagaagatccgccgtgcgtttgtagctgaggagggttggcgtttagtggccctcgattatcgtcaaattgaattacgtgtccttgcccatctttctggcgatgagaacctcatccgcgtgtttcaggaaggcaaagacattcacactcaaacggcaagctggatgtttggattatcagctgaagcgatcgatcctttgatgcgtcgtgcagcgaagaccatcaatttcggtgttctctacggtatgagtgcctttcgtttgtcgcaggaattaggcattccctatgaagaagctcaggcgttcattcagaaatactttcaaagctatcccaaagttaaagcatggatcgagaagactctccgtgaaggccgcacacgtggttacgtagagaccttatttggacgtcgccgctatgttcccgatttaaacgctcgcgtgaaaggcaagcgtgaagccgccgaacgcatggcgttcaacatgcctgtacagggcacggcagctgacctcatgaaacttgcaatggtgcgcctttttccacaattgcgtgaagttggtgcccgcatgctcttgcaggtccacgatgaactcttgttagaagcgccaaaagagcgtgcggaagaggtggcagccctcgcgaaagaagttatggaaggcgtgtggcccttagcggtgcctcttgaagtcgaagttggtattggcgaggattggctggctgccaaagga

SEQ ID NO: 4592 - protein, 841 aa, synthetic construct
  REGION 1..841: note = Variant of DNA polymerase I from Thermus sp. strain 2.9
MHHHHHHGGSGVLPVFEPKGRVLLVDGHHLAYRNFFALKGLTTSLGEPVQGVYGFAKSLLKALKEDGDVVIVVFDAKAPSFRHEAYEAYKAGRAPTPEDFPRQLALMKELVDLLGLERLEVPGFEADDVLATLAKKAEREGYEVQILTADRDLFQLLSPRISVLHPEGHRITPEWLWEKYGLRPEQWVDFRALAGDPSDNIPGVKGIGEKTALKLLKEWGSLENLLKNLDQVKPESVREKILAHLEDLKLSRELSRVRTDLPLEVDFGRRREPDWEGLKAFLERLEFGSLLHEFGLLESPLLAEEAPWPPPEGAFLGYRLSRPEPMWAELLALAASAQGRVYRAEDPHGALRGLFEVRGLLAKDLAVVALREGLDLPPTDDPMLLAYLLDPSNTTPEGVARRYGGEWTEDAAKRALLAERLHANLLGRLQGEERLLWLYEEVEKPLSRVLAHMEATGVKLDVAYLENLSLEVAAHMRRLEEEVFRLAGRSFRLNSRDQLERVLFDELGLTPIGKTEKTGKRSTSAAVLEALREVHPIVDKILQYRELAKLKGTYIDRLPALVHPKTGRLHTRFNQTATATGRLSSSDPNLQNIPVRTPLGQKIRRAFVAEEGWRLVALDYRQIELRVLAHLSGDENLIRVFQEGKDIHTQTASWMFGLSAEAIDPLMRRAAKTINFGVLYGMSAFRLSQELGIPYEEAQAFIQKYFQSYPKVKAWIEKTLREGRTRGYVETLFGRRRYVPDLNARVKGKREAAERMAFNMPVQGTAADLMKLAMVRLFPQLREVGARMLLQVHDELLLEAPKERAEEVAALAKEVMEGVWPLAVPLEVEVGIGEDWLAAKG

SEQ ID NO: 4593 - DNA, 2523 bp, synthetic construct
  misc_feature 1..2523: note = Variant of DNA polymerase I from Thermus sp. strain 2.9
  source 1..2523: mol_type = other DNA
atgcaccatcatcatcatcatggcggtagcggcgtgttaccggtgttcgagcctaaaggtcgcgtgcttctggttgatggccatcatctcgcgtatcgtaacttctttgccctgaaaggattaaccaccagcctgggcgagccggtacagggtgtctacggctttgcaaagtcgctcctgaaagctctgaaagaagacggtgatgtggtgattgttgtctttgatgcgaaagcgccaagttttcgccacgaagcgtacgaagcttacaaagccgggcgtgctccaacgccggaagactttcctcgccaattggcgcttatgaaggaattagtggatttgcttggcctcgaacgcttggaagttcccggtttcgaggcagacgacgtattagcgactctcgcaaagaaagccgaacgtgagggctatgaagtccagatcttgacagcagatcgcgatcttttccagcttttatctccgcgcatctcggtgttacacccggaagggcatcgtatcaccccggaatggctctgggagaaatatggtttgcgtcccgaacaatgggtggattttcgcgccttagcaggcgatccgagcgacaatattccgggagttaaaggtatcggcgagaagacggcgctcaagctccttaaagaatgggggtcgttggagaacttgcttaagaatttagatcaggtcaaaccagagtcagtgcgtgagaagattcttgctcacctcgaagacctcaaattaagccgcgaattgtcccgtgtacgcaccgatttgccgctcgaagttgatttcggtcgccgccgcgaacctgactgggagggtcttaaagcgtttttagagcgtcttgaatttggttcgctcttgcatgaattcggccttttagaaagcccgttactggccgaagaagcaccttggccaccgcccgagggcgcgtttttaggttaccgtttgagtcgcccggaaccgatgtgggccgaattactggctcttgcagcgtctgcccagggacgtgtgtatcgcgcggaagaccctcatggtgcgctccgcggcctcttcgaagtccgtggactccttgccaaagacttagctgttgttgcattgcgcgaaggtcttgatttacctccgactgatgatccaatgcttcttgcgtacctcttggacccgtcaaacacgacgcccgaaggcgtagcccgtcgttacggcggcgagtggaccgaagatgcagcgaaacgcgcgttattggccgaacgtttgcacgccaatttattaggacgtttgcaaggcgaggaacgtctcctctggctttacgaagaagtggagaaaccattgagtcgcgtgctcgcgcatatggaagctaccggtgtcaaattagacgtggcgtatttggagaatctcagccttgaagttgctgcccacatgcgccgcttggaggaagaagtattccgtttagcaggccgttcctttcgccttaactctcgcgatcagttagaacgtgtgttgttcgatgaacttggtctccctcctatcggcaagacagagaagaccggtaaacgtagcacttcagcggcggttttagaagctcttcgcgaagtccatcccattgtggacaagatcttgcagtaccgcgaactcgcgaaattgaaaggcacctatattgaccgtcttccggcattagtccacccgaaaacgggacgcctccatacccgcttcaaccaaacacttacggcgaccggtcgtttgtcctcctctgatccaaaccttcagaatattccagtacgtaccccattgggccagaagatccgccgtgcgtttgtagctgaggagggttggcgtttagtggccctcgattatcgtcaaattgaattacgtgtccttgcccatctttctggcgatgagaacctcatccgcgtgtttcaggaaggcaaagacattcacactcaaacggcaagctggatgtttggattatcagctgaagcgatcgatcctttgatgcgtcgtgcagcgaagaccatcaatttcggtgttctctacggtatgagtgcctttcgtttgtcgcaggaattaggcattccctatgaagaagctcaggcgttcattcagaaatactttcaaagctatcccaaagttaaagcatggatcgagaagactctccgtgaaggccgcacacgtggttacgtagagaccttatttggacgtcgccgctatgttcccgatttaaacgctcgcgtgaaaggcaagcgtgaagccgccgaacgcatggcgttcaacatgcctgtacagggcacggcagctgacctcatgaaacttgcaatggtgcgcctttttccacaattgcgtgaagttggtgcccgcatgctcttgcaggtccacgatgaactcttgttagaagcgccaaaagagcgtgcggaagaggtggcagccctcgcgaaagaagttatggaaggcgtgtggcccttagcggtgcctcttgaagtcgaagttggtattggcgaggattggctggctgccaaagga

SEQ ID NO: 4594 - protein, 841 aa, synthetic construct
  REGION 1..841: note = Variant of DNA polymerase I from Thermus sp. strain 2.9
MHHHHHHGGSGVLPVFEPKGRVLLVDGHHLAYRNFFALKGLTTSLGEPVQGVYGFAKSLLKALKEDGDVVIVVFDAKAPSFRHEAYEAYKAGRAPTPEDFPRQLALMKELVDLLGLERLEVPGFEADDVLATLAKKAEREGYEVQILTADRDLFQLLSPRISVLHPEGHRITPEWLWEKYGLRPEQWVDFRALAGDPSDNIPGVKGIGEKTALKLLKEWGSLENLLKNLDQVKPESVREKILAHLEDLKLSRELSRVRTDLPLEVDFGRRREPDWEGLKAFLERLEFGSLLHEFGLLESPLLAEEAPWPPPEGAFLGYRLSRPEPMWAELLALAASAQGRVYRAEDPHGALRGLFEVRGLLAKDLAVVALREGLDLPPTDDPMLLAYLLDPSNTTPEGVARRYGGEWTEDAAKRALLAERLHANLLGRLQGEERLLWLYEEVEKPLSRVLAHMEATGVKLDVAYLENLSLEVAAHMRRLEEEVFRLAGRSFRLNSRDQLERVLFDELGLPPIGKTEKTGKRSTSAAVLEALREVHPIVDKILQYRELAKLKGTYIDRLPALVHPKTGRLHTRFNQTLTATGRLSSSDPNLQNIPVRTPLGQKIRRAFVAEEGWRLVALDYRQIELRVLAHLSGDENLIRVFQEGKDIHTQTASWMFGLSAEAIDPLMRRAAKTINFGVLYGMSAFRLSQELGIPYEEAQAFIQKYFQSYPKVKAWIEKTLREGRTRGYVETLFGRRRYVPDLNARVKGKREAAERMAFNMPVQGTAADLMKLAMVRLFPQLREVGARMLLQVHDELLLEAPKERAEEVAALAKEVMEGVWPLAVPLEVEVGIGEDWLAAKG

SEQ ID NO: 4595 - DNA, 2523 bp, synthetic construct
  misc_feature 1..2523: note = Variant of DNA polymerase I from Thermus sp. strain 2.9
  source 1..2523: mol_type = other DNA
atgcaccatcatcatcatcatggcggtagcggcgtgttaccggtgttcgagcctaaaggtcgcgtgcttctggttgatggccatcatctcgcgtatcgtaacttctttgccctgaaaggattaaccaccagcctgggcgagccggtacagggtgtctacggctttgcaaagtcgctcctgaaagctctgaaagaagacggtgatgtggtgattgttgtctttgatgcgaaagcgccaagttttcgccacgaagcgtacgaagcttacaaagccgggcgtgctccaacgccggaagactttcctcgccaattggcgcttatgaaggaattagtggatttgcttggcctcgaacgcttggaagttcccggtttcgaggcagacgacgtattagcgactctcgcaaagaaagccgaacgtgagggctatgaagtccagatcttgacagcagatcgcgatcttttccagcttttatctccgcgcatctcggtgttacacccggaagggcatcgtatcaccccggaatggctctgggagaaatatggtttgcgtcccgaacaatgggtggattttcgcgccttagcaggcgatccgagcgacaatattccgggagttaaaggtatcggcgagaagacggcgctcaagctccttaaagaatgggggtcgttggagaacttgcttaagaatttagatcaggtcaaaccagagtcagtgcgtgagaagattcttgctcacctcgaagacctcaaattaagccgcgaattgtcccgtgtacgcaccgatttgccgctcgaagttgatttcggtcgccgccgcgaacctgactgggagggtcttaaagcgtttttagagcgtcttgaatttggttcgctcttgcatgaattcggccttttagaaagcccgttactggccgaagaagcaccttggccaccgcccgagggcgcgtttttaggttaccgtttgagtcgcccggaaccgatgtgggccgaattactggctcttgcagcgtctgcccagggacgtgtgtatcgcgcggaagaccctcatggtgcgctccgcggcctcttcgaagtccgtggactccttgccaaagacttagctgttgttgcattgcgcgaaggtcttgatttacctccgactgatgatccaatgcttcttgcgtacctcttggacccgtcaaacacgacgcccgaaggcgtagcccgtcgttacggcggcgagtggaccgaagatgcagcgaaacgcgcgttattggccgaacgtttgcacgccaatttattaggacgtttgcaaggcgaggaacgtctcctctggctttacgaagaagtggagaaaccattgagtcgcgtgctcgcgcatatggaagctaccggtgtcaaattagacgtggcgtatttggagaatctcagccttgaagttgctgcccacatgcgccgcttggaggaagaagtattccgtttagcaggccgttcctttcgccttaactctcgcgatcagttagaacgtgtgttgttcgatgaacttggtctccctcctatcggcaagacagagaagaccggtaaacgtagcacttcagcggcggttttagaagctcttcgcgaagtccatcccattgtggacaagatcttgcagtaccgcgaactcgcgaaattgaaaggcacctatattgaccgtcttccggcattagtccacccgaaaacgggacgcctccatacccgcttcaaccaaacagccacggcgaccggtcgtttgtcctcctctgatccaaaccttcagaatattccagtacgtaccccattgggccagaagatccgccgtgcgtttgtagctgaggagggttggcgtttagtggccctcgattatcgtcaaattgaattacgtgtccttgcccatctttctggcgatgagaacctcatccgcgtgtttcaggaaggcaaagacattcacactcaaacggcaagcaagatgtttggattatcagctgaagcgatcgatcctttgatgcgtcgtgcagcgaagaccatcaatttcggtgttctctacggtatgagtgcctttcgtttgtcgcaggaattaggcattccctatgaagaagctcaggcgttcattcagaaatactttcaaagctatcccaaagttaaagcatggatcgagaagactctccgtgaaggccgcacacgtggttacgtagagaccttatttggacgtcgccgctatgttcccgatttaaacgctcgcgtgaaaggcaagcgtgaagccgccgaacgcatggcgttcaacatgcctgtacagggcacggcagctgacctcatgaaacttgcaatggtgcgcctttttccacaattgcgtgaagttggtgcccgcatgctcttgcaggtccacgatgaactcttgttagaagcgccaaaagagcgtgcggaagaggtggcagccctcgcgaaagaagttatggaaggcgtgtggcccttagcggtgcctcttgaagtcgaagttggtattggcgaggattggctggctgccaaagga

SEQ ID NO: 4596 - protein, 841 aa, synthetic construct
  REGION 1..841: note = Variant of DNA polymerase I from Thermus sp. strain 2.9
MHHHHHHGGSGVLPVFEPKGRVLLVDGHHLAYRNFFALKGLTTSLGEPVQGVYGFAKSLLKALKEDGDVVIVVFDAKAPSFRHEAYEAYKAGRAPTPEDFPRQLALMKELVDLLGLERLEVPGFEADDVLATLAKKAEREGYEVQILTADRDLFQLLSPRISVLHPEGHRITPEWLWEKYGLRPEQWVDFRALAGDPSDNIPGVKGIGEKTALKLLKEWGSLENLLKNLDQVKPESVREKILAHLEDLKLSRELSRVRTDLPLEVDFGRRREPDWEGLKAFLERLEFGSLLHEFGLLESPLLAEEAPWPPPEGAFLGYRLSRPEPMWAELLALAASAQGRVYRAEDPHGALRGLFEVRGLLAKDLAVVALREGLDLPPTDDPMLLAYLLDPSNTTPEGVARRYGGEWTEDAAKRALLAERLHANLLGRLQGEERLLWLYEEVEKPLSRVLAHMEATGVKLDVAYLENLSLEVAAHMRRLEEEVFRLAGRSFRLNSRDQLERVLFDELGLPPIGKTEKTGKRSTSAAVLEALREVHPIVDKILQYRELAKLKGTYIDRLPALVHPKTGRLHTRFNQTATATGRLSSSDPNLQNIPVRTPLGQKIRRAFVAEEGWRLVALDYRQIELRVLAHLSGDENLIRVFQEGKDIHTQTASKMFGLSAEAIDPLMRRAAKTINFGVLYGMSAFRLSQELGIPYEEAQAFIQKYFQSYPKVKAWIEKTLREGRTRGYVETLFGRRRYVPDLNARVKGKREAAERMAFNMPVQGTAADLMKLAMVRLFPQLREVGARMLLQVHDELLLEAPKERAEEVAALAKEVMEGVWPLAVPLEVEVGIGEDWLAAKG

SEQ ID NO: 4597 - DNA, 2523 bp, synthetic construct
  misc_feature 1..2523: note = Variant of DNA polymerase I from Thermus sp. strain 2.9
  source 1..2523: mol_type = other DNA
atgcaccatcatcatcatcatggcggtagcggcgtgttaccggtgttcgagcctaaaggtcgcgtgcttctggttgatggccatcatctcgcgtatcgtaacttctttgccctgaaaggattaaccaccagcctgggcgagccggtacagggtgtctacggctttgcaaagtcgctcctgaaagctctgaaagaagacggtgatgtggtgattgttgtctttgatgcgaaagcgccaagttttcgccacgaagcgtacgaagcttacaaagccgggcgtgctccaacgccggaagactttcctcgccaattggcgcttatgaaggaattagtggatttgcttggcctcgaacgcttggaagttcccggtttcgaggcagacgacgtattagcgactctcgcaaagaaagccgaacgtgagggctatgaagtccagatcttgacagcagatcgcgatcttttccagcttttatctccgcgcatctcggtgttacacccggaagggcatcgtatcaccccggaatggctctgggagaaatatggtttgcgtcccgaacaatgggtggattttcgcgccttagcaggcgatccgagcgacaatattccgggagttaaaggtatcggcgagaagacggcgctcaagctccttaaagaatgggggtcgttggagaacttgcttaagaatttagatcaggtcaaaccagagtcagtgcgtgagaagattcttgctcacctcgaagacctcaaattaagccgcgaattgtcccgtgtacgcaccgatttgccgctcgaagttgatttcggtcgccgccgcgaacctgactgggagggtcttaaagcgtttttagagcgtcttgaatttggttcgctcttgcatgaattcggccttttagaaagcccgttactggccgaagaagcaccttggccaccgcccgagggcgcgtttttaggttaccgtttgagtcgcccggaaccgatgtgggccgaattactggctcttgcagcgtctgcccagggacgtgtgtatcgcgcggaagaccctcatggtgcgctccgcggcctcttcgaagtccgtggactccttgccaaagacttagctgttgttgcattgcgcgaaggtcttgatttacctccgactgatgatccaatgcttcttgcgtacctcttggacccgtcaaacacgacgcccgaaggcgtagcccgtcgttacggcggcgagtggaccgaagatgcagcgaaacgcgcgttattggccgaacgtttgcacgccaatttattaggacgtttgcaaggcgaggaacgtctcctctggctttacgaagaagtggagaaaccattgagtcgcgtgctcgcgcatatggaagctaccggtgtcaaattagacgtggcggtgttggagaatctcagccttgaagttgctgcccacatgcgccgcttggaggaagaagtattccgtttagcaggccgttcctttcgccttaactctcgcgatcagttagaacgtgtgttgttcgatgaacttggtctccctcctatcggcaagacagagaagaccggtaaacgtagcacttcagcggcggttttagaagctcttcgcgaagtccatcccattgtggacaagatcttgcagtaccgcgaactcgcgaaattgaaaggcacctatattgaccgtcttccggcattagtccacccgaaaacgggacgcctccatacccgcttcaaccaaacagccacggcgaccggtcgtttgtcctcctctgatccaaaccttcagaatattccagtacgtaccccattgggccagaagatccgccgtgcgtttgtagctgaggagggttggcgtttagtggccctcgattatcgtcaaattgaattacgtgtccttgcccatctttctggcgatgagaacctcatccgcgtgtttcaggaaggcaaagacattcacactcaaacggcaagctggatgtttggattatcagctgaagcgatcgatcctttgatgcgtcgtgcagcgaagaccatcaatttcggtgttctctacggtatgagtgcctttcgtttgtcgcaggaattaggcattccctatgaagaagctcaggcgttcattcagaaatactttcaaagctatcccaaagttaaagcatggatcgagaagactctccgtgaaggccgcacacgtggttacgtagagaccttatttggacgtcgccgctatgttcccgatttaaacgctcgcgtgaaaggcaagcgtgaagccgccgaacgcatggcgttcaacatgcctgtacagggcacggcagctgacctcatgaaacttgcaatggtgcgcctttttccacaattgcgtgaagttggtgcccgcatgctcttgcaggtccacgatgaactcttgttagaagcgccaaaagagcgtgcggaagaggtggcagccctcgcgaaagaagttatggaaggcgtgtggcccttagcggtgcctcttgaagtcgaagttggtattggcgaggattggctggctgccaaagga

SEQ ID NO: 4598 - protein, 841 aa, synthetic construct
  REGION 1..841: note = Variant of DNA polymerase I from Thermus sp. strain 2.9
MHHHHHHGGSGVLPVFEPKGRVLLVDGHHLAYRNFFALKGLTTSLGEPVQGVYGFAKSLLKALKEDGDVVIVVFDAKAPSFRHEAYEAYKAGRAPTPEDFPRQLALMKELVDLLGLERLEVPGFEADDVLATLAKKAEREGYEVQILTADRDLFQLLSPRISVLHPEGHRITPEWLWEKYGLRPEQWVDFRALAGDPSDNIPGVKGIGEKTALKLLKEWGSLENLLKNLDQVKPESVREKILAHLEDLKLSRELSRVRTDLPLEVDFGRRREPDWEGLKAFLERLEFGSLLHEFGLLESPLLAEEAPWPPPEGAFLGYRLSRPEPMWAELLALAASAQGRVYRAEDPHGALRGLFEVRGLLAKDLAVVALREGLDLPPTDDPMLLAYLLDPSNTTPEGVARRYGGEWTEDAAKRALLAERLHANLLGRLQGEERLLWLYEEVEKPLSRVLAHMEATGVKLDVAVLENLSLEVAAHMRRLEEEVFRLAGRSFRLNSRDQLERVLFDELGLPPIGKTEKTGKRSTSAAVLEALREVHPIVDKILQYRELAKLKGTYIDRLPALVHPKTGRLHTRFNQTATATGRLSSSDPNLQNIPVRTPLGQKIRRAFVAEEGWRLVALDYRQIELRVLAHLSGDENLIRVFQEGKDIHTQTASWMFGLSAEAIDPLMRRAAKTINFGVLYGMSAFRLSQELGIPYEEAQAFIQKYFQSYPKVKAWIEKTLREGRTRGYVETLFGRRRYVPDLNARVKGKREAAERMAFNMPVQGTAADLMKLAMVRLFPQLREVGARMLLQVHDELLLEAPKERAEEVAALAKEVMEGVWPLAVPLEVEVGIGEDWLAAKG

SEQ ID NO: 4599 - DNA, 2523 bp, synthetic construct
  misc_feature 1..2523: note = Variant of DNA polymerase I from Thermus sp. strain 2.9
  source 1..2523: mol_type = other DNA
atgcaccatcatcatcatcatggcggtagcggcgtgttaccggtgttcgagcctaaaggtcgcgtgcttctggttgatggccatcatctcgcgtatcgtaacttctttgccctgaaaggattaaccaccagcctgggcgagccggtacagggtgtctacggctttgcaaagtcgctcctgaaagctctgaaagaagacggtgatgtggtgattgttgtctttgatgcgaaagcgccaagttttcgccacgaagcgtacgaagcttacaaagccgggcgtgctccaacgccggaagactttcctcgccaattggcgcttatgaaggaattagtggatttgcttggcctcgaacgcttggaagttcccggtttcgaggcagacgacgtattagcgactctcgcaaagaaagccgaacgtgagggctatgaagtccagatcttgacagcagatcgcgatcttttccagcttttatctccgcgcatctcggtgttacacccggaagggcatcgtatcaccccggaatggctctgggagaaatatggtttgcgtcccgaacaatgggtggattttcgcgccttagcaggcgatccgagcgacaatattccgggagttaaaggtatcggcgagaagacggcgctcaagctccttaaagaatgggggtcgttggagaacttgcttaagaatttagatcaggtcaaaccagagtcagtgcgtgagaagattcttgctcacctcgaagacctcaaattaagccgcgaattgtcccgtgtacgcaccgatttgccgctcgaagttgatttcggtcgccgccgcgaacctgactgggagggtcttaaagcgtttttagagcgtcttgaatttggttcgctcttgcatgaattcggccttttagaaagcccgttactggccgaagaagcaccttggccaccgggggagggcgcgtttttaggttaccgtttgagtcgcccggaaccgatgtgggccgaattactggctcttgcagcgtctgcccagggacgtgtgtatcgcgcggaagaccctcatggtgcgctccgcggcctcttcgaagtccgtggactccttgccaaagacttagctgttgttgcattgcgcgaaggtcttgatttacctccgactgatgatccaatgcttcttgcgtacctcttggacccgtcaaacacgacgcccgaaggcgtagcccgtcgttacggcggcgagtggaccgaagatgcagcgaaacgcgcgttattggccgaacgtttgcacgccaatttattaggacgtttgcaaggcgaggaacgtctcctctggctttacgaagaagtggagaaaccattgagtcgcgtgctcgcgcatatggaagctaccggtgtcaaattagacgtggcgtatttggagaatctcagccttgaagttgctgcccacatgcgccgcttggaggaagaagtattccgtttagcaggccgttcctttcgccttaactctcgcgatcagttagaacgtgtgttgttcgatgaacttggtctccctcctatcggcaagacagagaagaccggtaaacgtagcacttcagcggcggttttagaagctcttcgcgaagtccatcccattgtggacaagatcttgcagtaccgcgaactcgcgaaattgaaaggcacctatattgaccgtcttccggcattagtccacccgaaaacgggacgcctccatacccgcttcaaccaaacagccacggcgaccggtcgtttgtcctcctctgatccaaaccttcagaatattccagtacgtaccccattgggccagaagatccgccgtgcgtttgtagctgaggagggttggcgtttagtggccctcgattatcgtcaaattgaattacgtgtccttgcccatctttctggcgatgagaacctcatccgcgtgtttcaggaaggcaaagacattcacactcaaacggcaagctggatgtttggattatcagctgaagcgatcgatcctttgatgcgtcgtgcagcgaagaccatcaatttcggtgttctctacggtatgagtgcctttcgtttgtcgcaggaattaggcattccctatgaagaagctcaggcgttcattcagaaatactttcaaagctatcccaaagttaaagcatggatcgagaagactctccgtgaaggccgcacacgtggttacgtagagaccttatttggacgtcgccgctatgttcccgatttaaacgctcgcgtgaaaggcaagcgtgaagccgccgaacgcatggcgttcaacatgcctgtacagggcacggcagctgacctcatgaaacttgcaatggtgcgcctttttccacaattgcgtgaagttggtgcccgcatgctcttgcaggtccacgatgaactcttgttagaagcgccaaaagagcgtgcggaagaggtggcagccctcgcgaaagaagttatggaaggcgtgtggcccttagcggtgcctcttgaagtcgaagttggtattggcgaggattggctggctgccaaagga

SEQ ID NO: 4600 - protein, 841 aa, synthetic construct
  REGION 1..841: note = Variant of DNA polymerase I from Thermus sp. strain 2.9
MHHHHHHGGSGVLPVFEPKGRVLLVDGHHLAYRNFFALKGLTTSLGEPVQGVYGFAKSLLKALKEDGDVVIVVFDAKAPSFRHEAYEAYKAGRAPTPEDFPRQLALMKELVDLLGLERLEVPGFEADDVLATLAKKAEREGYEVQILTADRDLFQLLSPRISVLHPEGHRITPEWLWEKYGLRPEQWVDFRALAGDPSDNIPGVKGIGEKTALKLLKEWGSLENLLKNLDQVKPESVREKILAHLEDLKLSRELSRVRTDLPLEVDFGRRREPDWEGLKAFLERLEFGSLLHEFGLLESPLLAEEAPWPPGEGAFLGYRLSRPEPMWAELLALAASAQGRVYRAEDPHGALRGLFEVRGLLAKDLAVVALREGLDLPPTDDPMLLAYLLDPSNTTPEGVARRYGGEWTEDAAKRALLAERLHANLLGRLQGEERLLWLYEEVEKPLSRVLAHMEATGVKLDVAYLENLSLEVAAHMRRLEEEVFRLAGRSFRLNSRDQLERVLFDELGLPPIGKTEKTGKRSTSAAVLEALREVHPIVDKILQYRELAKLKGTYIDRLPALVHPKTGRLHTRFNQTATATGRLSSSDPNLQNIPVRTPLGQKIRRAFVAEEGWRLVALDYRQIELRVLAHLSGDENLIRVFQEGKDIHTQTASWMFGLSAEAIDPLMRRAAKTINFGVLYGMSAFRLSQELGIPYEEAQAFIQKYFQSYPKVKAWIEKTLREGRTRGYVETLFGRRRYVPDLNARVKGKREAAERMAFNMPVQGTAADLMKLAMVRLFPQLREVGARMLLQVHDELLLEAPKERAEEVAALAKEVMEGVWPLAVPLEVEVGIGEDWLAAKG

SEQ ID NO: 4601 - DNA, 2523 bp, synthetic construct
  misc_feature 1..2523: note = Variant of DNA polymerase I from Thermus sp. strain 2.9
  source 1..2523: mol_type = other DNA
atgcaccatcatcatcatcatggcggtagcggcgtgttaccggtgttcgagcctaaaggtcgcgtgcttctggttgatggccatcatctcgcgtatcgtaacttctttgccctgaaaggattaaccaccagcctgggcgagccggtacagggtgtctacggctttgcaaagtcgctcctgaaagctctgaaagaagacggtgatgtggtgattgttgtctttgatgcgaaagcgccaagttttcgccacgaagcgtacgaagcttacaaagccgggcgtgctccaacgccggaagactttcctcgccaattggcgcttatgaaggaattagtggatttgcttggcctcgaacgcttggaagttcccggtttcgaggcagacgacgtattagcgactctcgcaaagaaagccgaacgtgagggctatgaagtccagatcttgacagcagatcgcgatcttttccagcttttatctccgcgcatctcggtgttacacccggaagggcatcgtatcaccccggaatggctctgggagaaatatggtttgcgtcccgaacaatgggtggattttcgcgccttagcaggcgatccgagcgacaatattccgggagttaaaggtatcggcgagaagacggcgctcaagctccttaaagaatgggggtcgttggagaacttgcttaagaatttagatcaggtcaaaccagagtcagtgcgtgagaagattcttgctcacctcgaagacctcaaattaagccgcgaattgtcccgtgtacgcaccgatttgccgctcgaagttgatttcggtcgccgccgcgaacctgactgggagggtcttaaagcgtttttagagcgtcttgaatttggttcgctcttgcatgaattcggccttttagaaagcccgttactggccgaagaagcaccttggccaccgcccgagggcgcgtttttaggttaccgtttgagtcgcccggaaccgatgtgggccgaattactggctcttgcagcgtctgcccagggacgtgtgtatcgcgcggaagaccctcatggtgcgctccgcggcctcttcgaagtccgtggactccttgccaaagacttagctgttgttgcattgcgcgaaggtcttgatttacctccgactgatgatccaatgcttcttgcgtacctcttggacccgtcaaacacgacgcccgaaggcgtagcccgtcgttacggcggcgagtggaccgaagatgcagcgaaacgcgcgttattggccgaacgtttgcacgccaatttattaggacgtttgcaaggcgaggaacgtctcctctggctttacgaagaagtggagaaaccattgagtcgcgtgctcgcgcatatggaagctaccggtgtcaaattagacgtggcgtatttggagaatctcagccttgaagttgctgcccacatgcgccgcttggaggaagaagtattccgtttagcaggccgttcctttcgccttaactctcgcgatcagttagaacgtgtgttgttcgatgaacttggtctccctcctatcggcaagacagagaagaccggtaaacgtagcacttcagcggcggttttagaagctcttcgcgaagtccatcccattgtggacaagatcttgcagtaccgcgaactcgcgaaattgaaaggcacctatattgaccgtcttccggcattagtccacccgaaaacgggacgcctccatacccgcttcaaccaaacagccacggcgaccggtcgtttgtcctcctctgatccaaaccttcagaatattccagtacgtaccccattgggccagaagatccgccgtgcgtttgtagctgaggagggttggcgtttagtggccctcgattatcgtcaaattgaattacgtgtccttgcccatctttctggcgatgagaacctcatccgcgtgtttcaggaaggcaaagacattcacactcaaacggcaagctggatgtttggattatcagctgaagcgatcgatcctttgatgcgtcgtgcagcgaagaccatcaatttcggtgttctctacggtatgagtgcctttcgtttgtcgcaggaattaggcattccctatgaagaagctcaggcgttcattcagaaatactttcaaagctatcccaaagttaaagcatggatcgagaagactctccgtgaaggccgcacacgtggttacgtagagaccttatttggacgtcgccgcggggttcccgatttaaacgctcgcgtgaaaggcaagcgtgaagccgccgaacgcatggcgttcaacatgcctgtacagggcacggcagctgacctcatgaaacttgcaatggtgcgcctttttccacaattgcgtgaagttggtgcccgcatgctcttgcaggtccacgatgaactcttgttagaagcgccaaaagagcgtgcggaagaggtggcagccctcgcgaaagaagttatggaaggcgtgtggcccttagcggtgcctcttgaagtcgaagttggtattggcgaggattggctggctgccaaagga
